United States Patent Application Publication US 2011/0183924 A1 - sequence listing, part 88

SEQ ID NO: 294949 - DNA, 10455 bp, Homo sapiens
  misc_feature (69)..(69): n is a, c, g, or t
  misc_feature (1160)..(1160): n is a, c, g, or t
agagcacaggctttgaccgatagtaacctctgcgctcggtgcagccgaatctataaaaggaactagtcncggcaaaaaccccgtaattgcgagcgagagtgagtggggccgggacccgcagagccgagccgacccttctctcccgggctgcggcagggcagggcggggagctccgcgcaccaacagagccggttctcagggcgctttgctccttgttttttccccggttctgttttctccccttctccggaaggcttgtcaaggggtaggagaaagagacgcaaacacaaaagtggaaaacagttaatgaccagccacggcgtccctgctgtgagctctggccgctgccttccagggctcccgagccacacgctgggggtgctggctgagggaacatggcttgttggcctcagctgaggttgctgctgtggaagaacctcactttcagaagaagacaaacatgtcagctgctgctggaagtggcctggcctctatttatcttcctgatcctgatctctgttcggctgagctacccaccctatgaacaacatgaatgccattttccaaataaagccatgccctctgcaggaacacttccttgggttcaggggattatctgtaatgccaacaacccctgtttccgttacccgactcctggggaggctcccggagttgttggaaactttaacaaatccattgtggctcgcctgttctcagatgctcggaggcttcttttatacagccagaaagacaccagcatgaaggacatgcgcaaagttctgagaacattacagcagatcaagaaatccagctcaaacttgaagcttcaagatttcctggtggacaatgaaaccttctctgggttcctgtatcacaacctctctctcccaaagtctactgtggacaagatgctgagggctgatgtcattctccacaaggtatttttgcaaggctaccagttacatttgacaagtctgtgcaatggatcaaaatcagaagagatgattcaacttggtgaccaagaagtttctgagctttgtggcctaccaagggagaaactggctgcagcagagcgagtacttcgttccaacatggacatcctgaagccaatcctgagaacactaaactctacatctcccttcccgagcaaggagctggcngaagccacaaaaacattgctgcatagtcttgggactctggcccaggagctgttcagcatgagaagctggagtgacatgcgacaggaggtgatgtttctgaccaatgtgaacagctccagctcctccacccaaatctaccaggctgtgtctcgtattgtctgcgggcatcccgagggaggggggctgaagatcaagtctctcaactggtatgaggacaacaactacaaagccctctttggaggcaatggcactgaggaagatgctgaaaccttctatgacaactctacaactccttactgcaatgatttgatgaagaatttggagtctagtcctctttcccgcattatctggaaagctctgaagccgctgctcgttgggaagatcctgtatacacctgacactccagccacaaggcaggtcatggctgaggtgaacaagaccttccaggaactggctgtgttccatgatctggaaggcatgtgggaggaactcagccccaagatctggaccttcatggagaacagccaagaaatggaccttgtccggatgctgttggacagcagggacaatgaccacttttgggaacagcagttggatggcttagattggacagcccaagacatcgtggcgtttttggccaagcacccagaggatgtccagtccagtaatggttctgtgtacacctggagagaagctttcaacgagactaaccaggcaatccggaccatatctcgcttcatggagtgtgtcaacctgaacaagctagaacccatagcaacagaagtctggctcatcaacaagtccatggagctgctggatgagaggaagttctgggctggtattgtgttcactggaattactccaggcagcattgagctgccccatcatgtcaagtacaagatccgaatggacattgacaatgtggagaggacaaataaaatcaaggatgggtactgggaccctggtcctcgagctgacccctttgaggacatgcggtacgtctgggggggcttcgcctacttgcaggatgtggtggagcaggcaatcatcagggtgctgacgggcaccgagaagaaaactggtgtctatatgcaacagatgccctatccctgttacgttgatgacatctttctgcgggtgatgagccggtcaatgcccctcttcatgacgctggcctggatttactcagtggctgtgatcatcaagggcatcgtgtatgagaaggaggcacggctgaaagagaccatgcggatcatgggcctggacaacagcatcctctggtttagctggttcattagtagcctcattcctcttcttgtgagcgctggcctgctagtggtcatcctgaagttaggaaacctgctgccctacagtgatcccagcgtggtgtttgtcttcctgtccgtgtttgctgtggtgacaatcctgcagtgcttcctgattagcacactcttctccagagccaacctggcagcagcctgtgggggcatcatctacttcacgctgtacctgccctacgtcctgtgtgtggcatggcaggactacgtgggcttcacactcaagatcttcgctagcctgctgtctcctgtggcttttgggtttggctgtgagtactttgccctttttgaggagcagggcattggagtgcagtgggacaacctgtttgagagtcctgtggaggaagatggcttcaatctcaccacttcggtctccatgatgctgtttgacaccttcctctatggggtgatgacctggtacattgaggctgtctttccaggccagtacggaattcccaggccctggtattttccttgcaccaagtcctactggtttggcgaggaaagtgatgagaagagccaccctggttccaaccagaagagaatatcagaaatctgcatggaggaggaacccacccacttgaagctgggcgtgtccattcagaacctggtaaaagtctaccgagatgggatgaaggtggctgtcgatggcctggcactgaatttttatgagggccagatcacctccttcctgggccacaatggagcggggaagacgaccaccatgtcaatcctgaccgggttgttccccccgacctcgggcaccgcctacatcctgggaaaagacattcgctctgagatgagcaccatccggcagaacctgggggtctgtccccagcataacgtgctgtttgacatgctgactgtcgaagaacacatctggttctatgcccgcttgaaagggctctctgagaagcacgtgaaggcggagatggagcagatggccctggatgttggtttgccatcaagcaagctgaaaagcaaaacaagccagctgtcaggtggaatgcagagaaagctatctgtggccttggcctttgtcgggggatctaaggttgtcattctggatgaacccacagctggtgtggacccttactcccgcaggggaatatgggagctgctgctgaaataccgacaaggccgcaccattattctctctacacaccacatggatgaagcggacgtcctgggggacaggattgccatcatctcccatgggaagctgtgctgtgtgggctcctccctgtttctgaagaaccagctgggaacaggctactacctgaccttggtcaagaaagatgtggaatcctccctcagttcctgcagaaacagtagtagcactgtgtcatacctgaaaaaggaggacagtgtttctcagagcagttctgatgctggcctgggcagcgaccatgagagtgacacgctgaccatcgatgtctctgctatctccaacctcatcaggaagcatgtgtctgaagcccggctggtggaagacatagggcatgagctgacctatgtgctgccatatgaagctgctaaggagggagcctttgtggaactctttcatgagattgatgaccggctctcagacctgggcatttctagttatggcatctcagagacgaccctggaagaaatattcctcaaggtggccgaagagagtggggtggatgctgagacctcagatggtaccttgccagcaagacgaaacaggcgggccttcggggacaagcagagctgtcttcgcccgttcactgaagatgatgctgctgatccaaatgattctgacatagacccagaatccagagagacagacttgctcagtgggatggatggcaaagggtcctaccaggtgaaaggctggaaacttacacagcaacagtttgtggcccttttgtggaagagactgctaattgccagacggagtcggaaaggattttttgctcagattgtcttgccagctgtgtttgtctgcattgcccttgtgttcagcctgatcgtgccaccctttggcaagtaccccagcctggaacttcagccctggatgtacaacgaacagtacacatttgtcagcaatgatgctcctgaggacacgggaaccctggaactcttaaacgccctcaccaaagaccctggcttcgggacccgctgtatggaaggaaacccaatcccagacacgccctgccaggcaggggaggaagagtggaccactgccccagttccccagaccatcatggacctcttccagaatgggaactggacaatgcagaacccttcacctgcatgccagtgtagcagcgacaaaatcaagaagatgctgcctgtgtgtcccccaggggcaggggggctgcctcctccacaaagaaaacaaaacactgcagatatccttcaggacctgacaggaagaaacatttcggattatctggtgaagacgtatgtgcagatcatagccaaaagcttaaagaacaagatctgggtgaatgagtttaggtatggcggcttttccctgggtgtcagtaatactcaagcacttcctccgagtcaagaagttaatgatgccatcaaacaaatgaagaaacacctaaagctggccaaggacagttctgcagatcgatttctcaacagcttgggaagatttatgacaggactggacaccagaaataatgtcaaggtgtggttcaataacaagggctggcatgcaatcagctctttcctgaatgtcatcaacaatgccattctccgggccaacctgcaaaagggagagaaccctagccattatggaattactgctttcaatcatcccctgaatctcaccaagcagcagctctcagaggtggctctgatgaccacatcagtggatgtccttgtgtccatctgtgtcatctttgcaatgtccttcgtcccagccagctttgtcgtattcctgatccaggagcgggtcagcaaagcaaaacacctgcagttcatcagtggagtgaagcctgtcatctactggctctctaattttgtctgggatatgtgcaattacgttgtccctgccacactggtcattatcatcttcatctgcttccagcagaagtcctatgtgtcctccaccaatctgcctgtgctagcccttctacttttgctgtatgggtggtcaatcacacctctcatgtacccagcctcctttgtgttcaagatccccagcacagcctatgtggtgctcaccagcgtgaacctcttcattggcattaatggcagcgtggccacctttgtgctggagctgttcaccgacaataagctgaataatatcaatgatatcctgaagtccgtgttcttgatcttcccacatttttgcctgggacgagggctcatcgacatggggagaatcgctttgtgtcaccattatcttgggacttggtgggacgaaacctcttcgccatggccgtggaaggggtggtgttcttcctcattactgttctgatccagtacagattcttcatcaggcccagacctgtaaatgcaaagctatctcctctgaatgatgaagatgaagatgtgaggcgggaaagacagagaattcttgatggtggaggccagaatgacatcttagaaatcaaggagttgacgaagatatatagaaggaagcggaagcctgctgttgacaggatttgcgtgggcattcctcctggtgagtgctttgggctcctgggagttaatggggctggaaaatcatcaactttcaagatgttaacaggagataccactgttaccagaggagatgctttccttaacaaaaatagtatcttatcaaacatccatgaagtacatcagaacatgggctactgccctcagtttgatgccatcacagagctgttgactgggagagaacacgtggagttctttgcccttttgagaggagtcccagagaaagaagttggcaaggttggtgagtgggcgattcggaaactgggcctcgtgaagtatggagaaaaatatgctggtaactatagtggaggcaacaaacgcaagctctctacagccatggctttgatcggcgggcctcctgtggtgtttctggatgaacccaccacaggcatggatcccaaagcccggcggttcttgtggaattgtgccctaagtgttgtcaaggaggggagatcagtagtgcttacatctcatagtatggaagaatgtgaagctctttgcactaggatggcaatcatggtcaatggaaggttcaggtgccttggcagtgtccagcatctaaaaaataggtttggagatggttatacaatagttgtacgaatagcagggtccaacccggacctgaagcctgtccaggatttctttggacttgcatttcctggaagtgttctaaaagagaaacaccggaacatgctacaataccagcttccatcttcattatcttctctggccaggatattcagcatcctctcccagagcaaaaagcgactccacatagaagactactctgtttctcagacaacacttgaccaagtatttgtgaactttgccaaggaccaaagtgatgatgaccacttaaaagacctctcattacacaaaaaccagacagtagtggacgttgcagttctcacatcttttctacaggatgagaaagtgaaagaaagctatgtatgaagaatcctgttcatacggggtggctgaaagtaaagaggaactagactttcctttgcaccatgtgaagtgttgtggagaaaagagccagaagttgatgtgggaagaagtaaactggatactgtactgatactattcaatgcaatgcaattcaatgcaatgaaaacaaaattccattacaggggcagtgcctttgtagcctatgtcttgtatggctctcaagtgaaagacttgaatttagttttttacctatacctatgtgaaactctattatggaacccaatggacatatgggtttgaactcacactttttttttttttttgttcctgtgtattctcattggggttgcaacaataattcatcaagtaatcatggccagcgattattgatcaaaatcaaaaggtaatgcacatcctcattcactaagccatgccatgcccaggagactggtttcccggtgacacatccattgctggcaatgagtgtgccagagttattagtgccaagtttttcagaaagtttgaagcaccatggtgtgtcatgctcacttttgtgaaagctgctctgctcagagtctatcaacattgaatatcagttgacagaatggtgccatgcgtggctaacatcctgctttgattccctctgataagctgttctggtggcagtaacatgcaacaaaaatgtgggtgtctctaggcacgggaaacttggttccattgttatattgtcctatgcttcgagccatgggtctacagggtcatccttatgagactcttaaatatacttagatcctggtaagaggcaaagaatcaacagccaaactgctggggctgcaagctgctgaagccagggcatgggattaaagagattgtgcgttcaaacctagggaagcctgtgcccatttgtcctgactgtctgctaacatggtacactgcatctcaagatgtttatctgacacaagtgtattatttctggctttttgaattaatctagaaaatgaaaagatggagttgtattttgacaaaaatgtttgtactttttaatgttatttggaattttaagttctatcagtgacttctgaatccttagaatggcctctttgtagaaccctgtggtatagaggagtatggccactgccccactatttttattttcttatgtaagtttgcatatcagtcatgactagtgcctagaaagcaatgtgatggtcaggatctcatgacattatatttgagtttctttcagatcatttaggatactcttaatctcacttcatcaatcaaatattttttgagtgtatgctgtagctgaaagagtatgtacgtacgtataagactagagagatattaagtctcagtacacttcctgtgccatgttattcagctcactggtttacaaatataggttgtcttgtggttgtaggagcccactgtaacaatactgggcagcctttttttttttttttaaattgcaacaatgcaaaagccaagaaagtataagggtcacaagtctaaacaatgaattcttcaacagggaaaacagctagcttgaaaacttgctgaaaaacacaacttgtgtttatggcatttagtaccttcaaataattggctttgcagatattggataccccattaaatctgacagtctcaaatttttcatctcttcaatcactagtcaagaaaaatataaaaacaacaaatacttccatatggagcatttttcagagttttctaacccagtcttatttttctagtcagtaaacatttgtaaaaatactgtttcactaatacttactgttaactgtcttgagagaaaagaaaaatatgagagaactattgtttggggaagttcaagtgatctttcaatatcattactaacttcttccactttttccaaaatttgaatattaacgctaaaggtgtaagacttcagatttcaaattaatctttctatattttttaaatttacagaatattatataacccactgctgaaaaagaaaaaaatgattgttttagaagttaaagtcaatattgattttaaatataagtaatgaaggcatatttccaataactagtgatatggcatcgttgcattttacagtatcttcaaaaatacagaatttatagaataatttctcctcatttaatatttttcaaaatcaaagttatggtttcctcattttactaaaatcgtattctaattcttcattatagtaaatctatgagcaactccttacttcggttcctctgatttcaaggccatattttaaaaaatcaaaaggcactgtgaactattttgaagaaaacacaacattttaatacagattgaaaggacctcttctgaagctagaaacaatctatagttatacatcttcattaatactgtgttaccttttaaaatagtaattttttacattttcctgtgtaaacctaattgtggtagaaatttttaccaactctatactcaatcaagcaaaatttctgtatattccctgtggaatgtacctatgtgagtttcagaaattctcaaaatacgtgttcaaaaatttctgcttttgcatctttgggacacctcagaaaacttattaacaactgtgaatatgagaaatacagaagaaaataataagccctctatacataaatgcccagcacaattcattgttaaaaaacaaccaaacctcacactactgtatttcattatctgtactgaaagcaaatgctttgtgactattaaatgttgcacatcattcattcactgtatagtaatcattgactaaagccatttgtctgtgttttcttcttgtggttgtatatatcaggtaaaatattttccaaagagccatgtgtcatgtaatactgaaccactttgatattgagacattaatttgtacccttgttattatctactagtaataatgtaatactgtagaaatattgctctaattcttttcaaaattgttgcatcccccttagaatgtttctatttccataaggatttaggtatgctattatcccttcttataccctaagatgaagctgtttttgtgctctttgttcatcattggccctcattccaagcactttacgctgtctgtaatgggatctatttttgcactggaatatctgagaattgcaaaactagacaaaagtttcacaacagatttctaagttaaatcattttcattaaaaggaaaaaagaaaaaaaattttgtatgtcaataactttatatgaagtattaaaatgcatatttctatgttgtaatataatgagtcacaaaataaagctgtgacagttctgttggtctacaaaaaaaa

SEQ ID NO: 294950 - DNA, 5324 bp, Homo sapiens
tttacattgtcatatttttagacttaaaaatgatcatcttaaccctgaataaaatgtgtctggtgaacagatgtttttccttgggctgtgcctcagatatctctgtgtgtgtgtacgtgtgtgtttgtctgtgtgtccatgtcctcactgattgagccctaactgcatcaaagacccctcagattttcacacgctttttctctccaggatgaccacatcagtggatgtccttgtgtccatctgtgtcatctttgcaatgtccttcgtcccagccagctttgtcgtattcctgatccaggagcgggtcagcaaagcaaaacacctgcagttcatcagtggagtgaagcctgtcatctactggctctctaattttgtctgggatatgtgcaattacgttgtccctgccacactggtcattatcatcttcatctgcttccagcagaagtcctatgtgtcctccaccaatctgcctgtgctagcccttctacttttgctgtatgggtggtcaatcacacctctcatgtacccagcctcctttgtgttcaagatccccagcacagcctatgtggtgctcaccagcgtgaacctcttcattggcattaatggcagcgtggccacctttgtgctggagctgttcaccgacaataagctgaataatatcaatgatatcctgaagtccgtgttcttgatcttcccacatttttgcctgggacgagggctcatcgacatggggagaatcgctttgtgtcaccattatcttgggacttggtgggacgaaacctcttcgccatggccgtggaaggggtggtgttcttcctcattactgttctgatccagtacagattcttcatcaggcccagacctgtaaatgcaaagctatctcctctgaatgatgaagatgaagatgtgaggcgggaaagacagagaattcttgatggtggaggccagaatgacatcttagaaatcaaggagttgacgaagatatatagaaggaagcggaagcctgctgttgacaggatttgcgtgggcattcctcctggtgagtgctttgggctcctgggagttaatggggctggaaaatcatcaactttcaagatgttaacaggagataccactgttaccagaggagatgctttccttaacaaaaatagtatcttatcaaacatccatgaagtacatcagaacatgggctactgccctcagtttgatgccatcacagagctgttgactgggagagaacacgtggagttctttgcccttttgagaggagtcccagagaaagaagttggcaaggttggtgagtgggcgattcggaaactgggcctcgtgaagtatggagaaaaatatgctggtaactatagtggaggcaacaaacgcaagctctctacagccatggctttgatcggcgggcctcctgtggtgtttctggatgaacccaccacaggcatggatcccaaagcccggcggttcttgtggaattgtgccctaagtgttgtcaaggaggggagatcagtagtgcttacatctcatagtatggaagaatgtgaagctctttgcactaggatggcaatcatggtcaatggaaggttcaggtgccttggcagtgtccagcatctaaaaaataggtttggagatggttatacaatagttgtacgaatagcagggtccaacccggacctgaagcctgtccaggatttctttggacttgcatttcctggaagtgttctaaaagagaaacaccggaacatgctacaataccagcttccatcttcattatcttctctggccaggatattcagcatcctctcccagagcaaaaagcgactccacatagaagactactctgtttctcagacaacacttgaccaagtatttgtgaactttgccaaggaccaaagtgatgatgaccacttaaaagacctctcattacacaaaaaccagacagtagtggacgttgcagttctcacatcttttctacaggatgagaaagtgaaagaaagctatgtatgaagaatcctgttcatacggggtggctgaaagtaaagaggaactagactttcctttgcaccatgtgaagtgttgtggagaaaagagccagaagttgatgtgggaagaagtaaactggatactgtactgatactattcaatgcaatgcaattcaatgcaatgaaaacaaaattccattacaggggcagtgcctttgtagcctatgtcttgtatggctctcaagtgaaagacttgaatttagttttttacctatacctatgtgaaactctattatggaacccaatggacatatgggtttgaactcacactttttttttttttttgttcctgtgtattctcattggggttgcaacaataattcatcaagtaatcatggccagcgattattgatcaaaatcaaaaggtaatgcacatcctcattcactaagccatgccatgcccaggagactggtttcccggtgacacatccattgctggcaatgagtgtgccagagttattagtgccaagtttttcagaaagtttgaagcaccatggtgtgtcatgctcacttttgtgaaagctgctctgctcagagtctatcaacattgaatatcagttgacagaatggtgccatgcgtggctaacatcctgctttgattccctctgataagctgttctggtggcagtaacatgcaacaaaaatgtgggtgtctctaggcacgggaaacttggttccattgttatattgtcctatgcttcgagccatgggtctacagggtcatccttatgagactcttaaatatacttagatcctggtaagaggcaaagaatcaacagccaaactgctggggctgcaagctgctgaagccagggcatgggattaaagagattgtgcgttcaaacctagggaagcctgtgcccatttgtcctgactgtctgctaacatggtacactgcatctcaagatgtttatctgacacaagtgtattatttctggctttttgaattaatctagaaaatgaaaagatggagttgtattttgacaaaaatgtttgtactttttaatgttatttggaattttaagttctatcagtgacttctgaatccttagaatggcctctttgtagaaccctgtggtatagaggagtatggccactgccccactatttttattttcttatgtaagtttgcatatcagtcatgactagtgcctagaaagcaatgtgatggtcaggatctcatgacattatatttgagtttctttcagatcatttaggatactcttaatctcacttcatcaatcaaatattttttgagtgtatgctgtagctgaaagagtatgtacgtacgtataagactagagagatattaagtctcagtacacttcctgtgccatgttattcagctcactggtttacaaatataggttgtcttgtggttgtaggagcccactgtaacaatactgggcagcctttttttttttttttaaattgcaacaatgcaaaagccaagaaagtataagggtcacaagtctaaacaatgaattcttcaacagggaaaacagctagcttgaaaacttgctgaaaaacacaacttgtgtttatggcatttagtaccttcaaataattggctttgcagatattggataccccattaaatctgacagtctcaaatttttcatctcttcaatcactagtcaagaaaaatataaaaacaacaaatacttccatatggagcatttttcagagttttctaacccagtcttatttttctagtcagtaaacatttgtaaaaatactgtttcactaatacttactgttaactgtcttgagagaaaagaaaaatatgagagaactattgtttggggaagttcaagtgatctttcaatatcattactaacttcttccactttttccaaaatttgaatattaacgctaaaggtgtaagacttcagatttcaaattaatctttctatattttttaaatttacagaatattatataacccactgctgaaaaagaaaaaaatgattgttttagaagttaaagtcaatattgattttaaatataagtaatgaaggcatatttccaataactagtgatatggcatcgttgcattttacagtatcttcaaaaatacagaatttatagaataatttctcctcatttaatatttttcaaaatcaaagttatggtttcctcattttactaaaatcgtattctaattcttcattatagtaaatctatgagcaactccttacttcggttcctctgatttcaaggccatattttaaaaaatcaaaaggcactgtgaactattttgaagaaaacacaacattttaatacagattgaaaggacctcttctgaagctagaaacaatctatagttatacatcttcattaatactgtgttaccttttaaaatagtaattttttacattttcctgtgtaaacctaattgtggtagaaatttttaccaactctatactcaatcaagcaaaatttctgtatattccctgtggaatgtacctatgtgagtttcagaaattctcaaaatacgtgttcaaaaatttctgcttttgcatctttgggacacctcagaaaacttattaacaactgtgaatatgagaaatacagaagaaaataataagccctctatacataaatgcccagcacaattcattgttaaaaaacaaccaaacctcacactactgtatttcattatctgtactgaaagcaaatgctttgtgactattaaatgttgcacatcattcattcactgtatagtaatcattgactaaagccatttgtctgtgttttcttcttgtggttgtatatatcaggtaaaatattttccaaagagccatgtgtcatgtaatactgaaccactttgatattgagacattaatttgtacccttgttattatctactagtaataatgtaatactgtagaaatattgctctaattcttttcaaaattgttgcatcccccttagaatgtttctatttccataaggatttaggtatgctattatcccttcttataccctaagatgaagctgtttttgtgctctttgttcatcattggccctcattccaagcactttacgctgtctgtaatgggatctatttttgcactggaatatctgagaattgcaaaactagacaaaagtttcacaacagatttctaagttaaatcattttcattaaaaggaaaaaagaaaaaaaattttgtatgtcaataactttatatgaagtattaaaatgcatatttctatgttgtaatataatgagtcacaaaataaagctgtgacagttctgttggtctacaaaaaaaa

SEQ ID NO: 294951 - DNA, 3029 bp, Homo sapiens
  misc_feature (69)..(69): n is a, c, g, or t
  misc_feature (1160)..(1160): n is a, c, g, or t
agagcacaggctttgaccgatagtaacctctgcgctcggtgcagccgaatctataaaaggaactagtcncggcaaaaaccccgtaattgcgagcgagagtgagtggggccgggacccgcagagccgagccgacccttctctcccgggctgcggcagggcagggcggggagctccgcgcaccaacagagccggttctcagggcgctttgctccttgttttttccccggttctgttttctccccttctccggaaggcttgtcaaggggtaggagaaagagacgcaaacacaaaagtggaaaacagttaatgaccagccacggcgtccctgctgtgagctctggccgctgccttccagggctcccgagccacacgctgggggtgctggctgagggaacatggcttgttggcctcagctgaggttgctgctgtggaagaacctcactttcagaagaagacaaacatgtcagctgctgctggaagtggcctggcctctatttatcttcctgatcctgatctctgttcggctgagctacccaccctatgaacaacatgaatgccattttccaaataaagccatgccctctgcaggaacacttccttgggttcaggggattatctgtaatgccaacaacccctgtttccgttacccgactcctggggaggctcccggagttgttggaaactttaacaaatccattgtggctcgcctgttctcagatgctcggaggcttcttttatacagccagaaagacaccagcatgaaggacatgcgcaaagttctgagaacattacagcagatcaagaaatccagctcaaacttgaagcttcaagatttcctggtggacaatgaaaccttctctgggttcctgtatcacaacctctctctcccaaagtctactgtggacaagatgctgagggctgatgtcattctccacaaggtatttttgcaaggctaccagttacatttgacaagtctgtgcaatggatcaaaatcagaagagatgattcaacttggtgaccaagaagtttctgagctttgtggcctaccaagggagaaactggctgcagcagagcgagtacttcgttccaacatggacatcctgaagccaatcctgagaacactaaactctacatctcccttcccgagcaaggagctggcngaagccacaaaaacattgctgcatagtcttgggactctggcccaggagctgttcagcatgagaagctggagtgacatgcgacaggaggtgatgtttctgaccaatgtgaacagctccagctcctccacccaaatctaccaggctgtgtctcgtattgtctgcgggcatcccgagggaggggggctgaagatcaagtctctcaactggtatgaggacaacaactacaaagccctctttggaggcaatggcactgaggaagatgctgaaaccttctatgacaactctacaactccttactgcaatgatttgatgaagaatttggagtctagtcctctttcccgcattatctggaaagctctgaagccgctgctcgttgggaagatcctgtatacacctgacactccagccacaaggcaggtcatggctgaggtgaacaagaccttccaggaactggctgtgttccatgatctggaaggcatgtgggaggaactcagccccaagatctggaccttcatggagaacagccaagaaatggaccttgtccggatgctgttggacagcagggacaatgaccacttttgggaacagcagttggatggcttagattggacagcccaagacatcgtggcgtttttggccaagcacccagaggatgtccagtccagtaatggttctgtgtacacctggagagaagctttcaacgagactaaccaggcaatccggaccatatctcgcttcatggagtgtgtcaacctgaacaagctagaacccatagcaacagaagtctggctcatcaacaagtccatggagctgctggatgagaggaagttctgggctggtattgtgttcactggaattactccaggcagcattgagctgccccatcatgtcaagtacaagatccgaatggacattgacaatgtggagaggacaaataaaatcaaggatgggtactgggaccctggtcctcgagctgacccctttgaggacatgcggtacgtctgggggggcttcgcctacttgcaggatgtggtggagcaggcaatcatcagggtgctgacgggcaccgagaagaaaactggtgtctatatgcaacagatgccctatccctgttacgttgatgacatctttctgcgggtgatgagccggtcaatgcccctcttcatgacgctggcctggatttactcagtggctgtgatcatcaagggcatcgtgtatgagaaggaggcacggctgaaagagaccatgcggatcatgggcctggacaacagcatcctctggtttagctggttcattagtagcctcattcctcttcttgtgagcgctggcctgctagtggtcatcctgaagttaggaaacctgctgccctacagtgatcccagcgtggtgtttgtcttcctgtccgtgtttgctgtggtgacaatcctgcagtgcttcctgattagcacactcttctccagagccaacctggcagcagcctgtgggggcatcatctacttcacgctgtacctgccctacgtcctgtgtgtggcatggcaggactacgtgggcttcacactcaagatcttcgctagcctgctgtctcctgtggcttttgggtttggctgtgagtactttgccctttttgaggagcagggcattggagtgcagtgggacaacctgtttgagagtcctgtggaggaagatggcttcaatctcaccacttcggtctccatgatgctgtttgacaccttcctctatggggtgatgacctggtacattgaggctgtctttccaggtacactgctttgggcatctgtttggaaaatatgacttctagctgatgtcctttctttgtgctagaatctctgcagtgcatgggcttccctg

SEQ ID NO: 294952 - DNA, 2316 bp, Homo sapiens
  misc_feature (69)..(69): n is a, c, g, or t
  misc_feature (1160)..(1160): n is a, c, g, or t
agagcacaggctttgaccgatagtaacctctgcgctcggtgcagccgaatctataaaaggaactagtcncggcaaaaaccccgtaattgcgagcgagagtgagtggggccgggacccgcagagccgagccgacccttctctcccgggctgcggcagggcagggcggggagctccgcgcaccaacagagccggttctcagggcgctttgctccttgttttttccccggttctgttttctccccttctccggaaggcttgtcaaggggtaggagaaagagacgcaaacacaaaagtggaaaacagttaatgaccagccacggcgtccctgctgtgagctctggccgctgccttccagggctcccgagccacacgctgggggtgctggctgagggaacatggcttgttggcctcagctgaggttgctgctgtggaagaacctcactttcagaagaagacaaacatgtcagctgctgctggaagtggcctggcctctatttatcttcctgatcctgatctctgttcggctgagctacccaccctatgaacaacatgaatgccattttccaaataaagccatgccctctgcaggaacacttccttgggttcaggggattatctgtaatgccaacaacccctgtttccgttacccgactcctggggaggctcccggagttgttggaaactttaacaaatccattgtggctcgcctgttctcagatgctcggaggcttcttttatacagccagaaagacaccagcatgaaggacatgcgcaaagttctgagaacattacagcagatcaagaaatccagctcaaacttgaagcttcaagatttcctggtggacaatgaaaccttctctgggttcctgtatcacaacctctctctcccaaagtctactgtggacaagatgctgagggctgatgtcattctccacaaggtatttttgcaaggctaccagttacatttgacaagtctgtgcaatggatcaaaatcagaagagatgattcaacttggtgaccaagaagtttctgagctttgtggcctaccaagggagaaactggctgcagcagagcgagtacttcgttccaacatggacatcctgaagccaatcctgagaacactaaactctacatctcccttcccgagcaaggagctggcngaagccacaaaaacattgctgcatagtcttgggactctggcccaggagctgttcagcatgagaagctggagtgacatgcgacaggaggtgatgtttctgaccaatgtgaacagctccagctcctccacccaaatctaccaggctgtgtctcgtattgtctgcgggcatcccgagggaggggggctgaagatcaagtctctcaactggtatgaggacaacaactacaaagccctctttggaggcaatggcactgaggaagatgctgaaaccttctatgacaactctacaactccttactgcaatgatttgatgaagaatttggagtctagtcctctttcccgcattatctggaaagctctgaagccgctgctcgttgggaagatcctgtatacacctgacactccagccacaaggcaggtcatggctgaggtgaacaagaccttccaggaactggctgtgttccatgatctggaaggcatgtgggaggaactcagccccaagatctggaccttcatggagaacagccaagaaatggaccttgtccggatgctgttggacagcagggacaatgaccacttttgggaacagcagttggatggcttagattggacagcccaagacatcgtggcgtttttggccaagcacccagaggatgtccagtccagtaatggttctgtgtacacctggagagaagctttcaacgagactaaccaggcaatccggaccatatctcgcttcatggagtgtgtcaacctgaacaagctagaacccatagcaacagaagtctggctcatcaacaagtccatggagctgctggatgagaggaagttctgggctggtattgtgttcactggaattactccaggcagcattgagctgccccatcatgtcaagtacaagatccgaatggacattgacaatgtggagaggacaaataaaatcaaggatgggtactgggaccctggtcctcgagctgacccctttgaggacatgcggtacgtctgggggggcttcgcctacttgcaggatgtggtggagcaggcaatcatcagggtgctgacgggcaccgagaagaaaactggtgtctatatgcaacagatgccctatccctgttacgttgatgacatctatctgggcccagcctgctggtccgctc

SEQ ID NO: 294953 - DNA, 2315 bp, Homo sapiens
  misc_feature (69)..(69): n is a, c, g, or t
  misc_feature (1160)..(1160): n is a, c, g, or t
agagcacaggctttgaccgatagtaacctctgcgctcggtgcagccgaatctataaaaggaactagtcncggcaaaaaccccgtaattgcgagcgagagtgagtggggccgggacccgcagagccgagccgacccttctctcccgggctgcggcagggcagggcggggagctccgcgcaccaacagagccggttctcagggcgctttgctccttgttttttccccggttctgttttctccccttctccggaaggcttgtcaaggggtaggagaaagagacgcaaacacaaaagtggaaaacagttaatgaccagccacggcgtccctgctgtgagctctggccgctgccttccagggctcccgagccacacgctgggggtgctggctgagggaacatggcttgttggcctcagctgaggttgctgctgtggaagaacctcactttcagaagaagacaaacatgtcagctgctgctggaagtggcctggcctctatttatcttcctgatcctgatctctgttcggctgagctacccaccctatgaacaacatgaatgccattttccaaataaagccatgccctctgcaggaacacttccttgggttcaggggattatctgtaatgccaacaacccctgtttccgttacccgactcctggggaggctcccggagttgttggaaactttaacaaatccattgtggctcgcctgttctcagatgctcggaggcttcttttatacagccagaaagacaccagcatgaaggacatgcgcaaagttctgagaacattacagcagatcaagaaatccagctcaaacttgaagcttcaagatttcctggtggacaatgaaaccttctctgggttcctgtatcacaacctctctctcccaaagtctactgtggacaagatgctgagggctgatgtcattctccacaaggtatttttgcaaggctaccagttacatttgacaagtctgtgcaatggatcaaaatcagaagagatgattcaacttggtgaccaagaagtttctgagctttgtggcctaccaagggagaaactggctgcagcagagcgagtacttcgttccaacatggacatcctgaagccaatcctgagaacactaaactctacatctcccttcccgagcaaggagctggcngaagccacaaaaacattgctgcatagtcttgggactctggcccaggagctgttcagcatgagaagctggagtgacatgcgacaggaggtgatgtttctgaccaatgtgaacagctccagctcctccacccaaatctaccaggctgtgtctcgtattgtctgcgggcatcccgagggaggggggctgaagatcaagtctctcaactggtatgaggacaacaactacaaagccctctttggaggcaatggcactgaggaagatgctgaaaccttctatgacaactctacaactccttactgcaatgatttgatgaagaatttggagtctagtcctctttcccgcattatctggaaagctctgaagccgctgctcgttgggaagatcctgtatacacctgacactccagccacaaggcaggtcatggctgaggtgaacaagaccttccaggaactggctgtgttccatgatctggaaggcatgtgggaggaactcagccccaagatctggaccttcatggagaacagccaagaaatggaccttgtccggatgctgttggacagcagggacaatgaccacttttgggaacagcagttggatggcttagattggacagcccaagacatcgtggcgtttttggccaagcacccagaggatgtccagtccagtaatggttctgtgtacacctggagagaagctttcaacgagactaaccaggcaatccggaccatatctcgcttcatggagtgtgtcaacctgaacaagctagaacccatagcaacagaagtctggctcatcaacaagtccatggagctgctggatgagaggaagttctgggctggtattgtgttcactggaattactccaggcagcattgagctgccccatcatgtcaagtacaagatccgaatggacattgacaatgtggagaggacaaataaaatcaaggatgggtactgggaccctggtcctcgagctgacccctttgaggacatgcggtacgtctgggggggcttcgcctacttgcaggatgtggtggagcaggcaatcatcagggtgctgacgggcaccgagaagaaaactggtgtctatatgcaacagatcgcaggtctcttcaagtcacgacattctaatcaggggccacatgcctggtgtgga

SEQ ID NO: 294954 - DNA, 422 bp, Homo sapiens
agcacatacatcattatgctcatccctcctaatgctcatccctccttatgctcatccctccttatgctcatcccccttagaatgtttctatttccataaggatttaggtatgctattatcccttcttataccctaagatgaagctgtttttgtgctctttgttcatcattggccctcattccaagcactttacgctgtctgtaatgggatctatttttgcactggaatatctgagaattgcaaaactagacaaaagtttcacaacagatttctaagttaaatcattttcattaaaaggaaaaaagaaaaaaaattttgtatgtcaataactttatatgaagtattaaaatgcatatttctatgttgtaatataatgagtcacaaaataaagctgtgacagttctgttggtctacaaaaaaaa

SEQ ID NO: 294955 - DNA, 1618 bp, Homo sapiens
  misc_feature (801)..(801): n is a, c, g, or t
  misc_feature (951)..(951): n is a, c, g, or t
  misc_feature (967)..(967): n is a, c, g, or t
  misc_feature (1053)..(1053): n is a, c, g, or t
tttgtggcctccttcctctcaatttatgaagagaagcagtaagatgttcctctcgggtcctctgagggacctggggagctcaggctgggaatctccaaggcagtaggtcgcttgggcgttattgttttgtttcgaggccaaggaggcttcgggaagtgctcggtttcggggactttgatccggagccccacatccccaccacttgcaactcagatgggaccggaggcggtgttaaatggggagacgatgtcctagtacgagctctggtgaccccaggactctgcgctgctgcgcttggggcttgcccgacggtggagaccggggagcatctctgggcgtggagacccgggcgcagtaccccgggctcagaggggtcgggggttcccgggcgtgctgagggcgctgctgccgggtggggagagctgcaggtccggcaccgagcgctgctttgttcggagggccctgagctggctagaaacccttctggttgcaggtcggccagtacctacggagacaaatgccagcactgagtcttcactcggttcttaagaagctggtctgttctgacctgggaattggctatatgctccccgggactggagcggcacagtcccggactgtgaatccgggaactcgagttggaggtgtcccaaacggtccgtggtgctattgctcactagaggccttgggtctttgtttgacctgaggggtagggaggtcctgcctacagtctccgtgcgctcagctgagctggtgtccctggcgcagagcgcggacgagttttgtttccttttctttttnttttttttctttcctttaagtctcggtctgtcgcccaggctggagtgcaatggaacgatctccgctcactgcaacctccgcctcccgggttcaagcgattctcctgcctcagcctcctgagtagctgggattacaggcgcgtcaccacanccagctaatttttgtntttttagtagagacggggtttcaacttgttggccaggctggtctcgaaccctcgacctcaggtgatccaccggcctcggcctcccnaagtgctgggattataggcgtgagccaccgcgcgcggccgagttttgtttcttttaaaaacaagacttaggagagcctgcggagacccggaggtggggtgcccaatcctccctctcccacgttccctgcagccccatcttccagaccgttgctgctggtctctcggggcagcttctgcctgggcgcagatggggaagctgggccgagttggtgcagtggaatgaccgggagtaaccccggcgggcggcgcagaactcggagctccgccgcggggctgggctgggctctgccgtgagggtgggggtgctgggcgcgcgggctgcggtggccccccggagactggcccgcagcgcctcctagccggaggacctaggaatcggccggctctactaggtgtctttgctcgcggttccgactgtgaatccggtgaagaccggtggttgcagacggggaggaactatgaggctgaggcaggagaatcccttgaacctgggaggccgaggttgcagtgagccgggatcgcactaccgtactccagactgggcgacagagcgagactcctctc

SEQ ID NO: 294956 - DNA, 385 bp, Homo sapiens
tgacaactcaaataatatttataaatacagccacacttaaaatggtcccattatgaaatacatatttaaatatctatacgatgtgttaaaaccaagaaaatatttgattcttctctgatatttaagaattgaaggtttgaggtagttacgtgttaggggcatttatattcatgtttttagagtttgcttatacaacttaatctttccttttcagtgctttgggctcctgggagttaatggggctggaaaatcatcaactttcaagatgttaacaggagataccactgttaccagaggagatgctttccttaacaaaaataggtgagaaaagaagtggcttgtattttgctgcaaagactttgtttttaatttatttaaagaaata

SEQ ID NO: 294957 - DNA, 335 bp, Homo sapiens
tgatgtgtctcttccttcccagttaggaaacctgctgccctacagtgatcccagcgtggtgtttgtcttcctgtccgtgtttgctgtggtgacaatcctgcagtgcttcctgattagcacactcttctccagagccaacctggcagcagcctgtgggggcatcatctacttcacgctgtacctgccctacgtcctgtgtgtggcatggcaggactacgtgggcttcacactcaagatcttcgctgtgagtacctctggcctttcttcagtggctgtaggcatttgaccttcctttggagtccctgaataaaagcagcaagttgagaacagaagat

SEQ ID NO: 294958 - DNA, 524 bp, Homo sapiens
tgggcagagcagacgcaggcccctataatagccctcatgctagaaaggagccggagcctgtgtataaggccagcgcagcctactctggacagtgcagggttcccactctcccaactccccatctgcttgcctccagacccacattcacacacgagccactgggttggaggagcatctgtgagatgaaacaccattctttcctcaatgtctcagctatctaactgtgtgtgtaatcaggccaggtcctccctgctgggcagaaaccatgggagttaagagattgccaacatttattagaggaagctgacgtgtaacttctctgaggcaaaatttagccctcctttgaacaggaatttgactcagtgaaccttgtacacactcgcactgagtctgctgctgatgatactgtgcaccccactgtctgggttttaatgtcaggctgttcttttaggtatggcggcttttccctgggtgtcagtaatactcaagcacttcctccgagtcaagaagttaatgatgccatc

SEQ ID NO: 294959 - DNA, 376 bp, Homo sapiens
gtgatcactatgtcctgaacactgtaattacttcgccatattctctgatcatagtgttttgccttggtatgtgactagaatttctttctgaggtttatgggcatggttggtgggtatgcacctgcctgcaggagcccggtttgggggcattaccttgtacctggtatgttttctttcaggtgtggttcaataacaagggctggcatgcaatcagctctttcctgaatgtcatcaacaatgccattctccgggccaacctgcaaaagggagagaaccctagccattatggaattactgctttcaatcatcccctgaatctcaccaagcagcagctctcagaggtggctctgtaagtgtggctgtgtctgtatagatg

SEQ ID NO: 294960 - DNA, 294 bp, Homo sapiens
gtattgtgttcactggaattactccaggcagcattgagctgccccatcatgtcaagtacaagatccgaatggacattgacaatgtggagaggacaaataaaatcaaggatgggtaagtggaatcccatcacaccagcctggtcttggggaggtccagagcacctattatattaggacaagaggtactttattttaactaaaaatttggtagaaatttcaacaacaacaaaaaaactcaacttggtgtcatgattttggtgaaattggtacatgacttgctggaaggtttttcat

SEQ ID NO: 294961 - DNA, 964 bp, Homo sapiens
ctcgccacctccgcgacctctgctcccagcccacttctcggtcccgctcgcggcctctcccccgcggcactcgggcaggggctcactcgagaggttttgccgccagccgctgccacccgacgggacttgttgttgccgggcaaccgtggcttccgtccccggggtcagggcccactgaccccggcgcaaagcgtcctggggcttgtagtttcggccgagggtgggctccgcggtcgccggtttctcttcccagctctgccctcgcttgctggccggtctccggggtcagcgcggggccaccatccagccccttggggcccgccccaagcagctgtcgaggacgcactcagcctgcgcagccatggcctcggcaggggcggagaggcggccgggggtccaggaggcgacggtcgtggggcagggacagctcacggaggagcccggcagcgctcagacctccgagtgtccagtggcgggagaccagttcctggtgcctgcccatgaggcccgcggaacccagagtgaagaccagcgcccagcaggcgcagcttcggagtcggagctccaggaggaaggacccaagctgggggaggagcggcccaagccgcatgccggggcgctagaggagagaggccccaggcccgtggtctccattgtgaggccccgtcatggtccaaagagaaagcctgtcaagtctctcagcctcccgggccttcgtgcccatcttaaggctgaagctgagctgccacccaagctgccgctgcaggaggaggagccagaggacagccagagtgagccctcaccatctgccaaacagcacaaaaaagccaagaagcgcaagagcctgggggctcccgtgctccacgctgtggccagcatggtgtctgcacccttagagacattgaggctggagccctctgccctgccctgggtctttgcaggaaaggcccagcgcctgcggccg

SEQ ID NO: 294962 - DNA, 690 bp, Homo sapiens
ggctctcggggggaaggagctgcagccccggggttggggcacacaccacagtaggattcctaaatcctgcactcctgcagggaggattctcgtccccagccactaccatcactctcctcccgttcctcaagagcccccgtgtagggagcagcaggagagtgggagcttcagggcttgtaggggcctgggctcactggcctctaagcctcttgggcctggggtctcattgaccaggaacgggacaggcgtcgagccctggggctgtgggcaggctgggctattccctgggccagggaatgggagccagggctggagcctggctcaagtctcttgtccctggctcaggtctctcagcctcccgggccttcgtgcccatcttaaggctgaagctgagctgccacccaagctgccgctgcaggaggaggagccagaggacagccagagtgagccctcaccatctgccaaacagcacaaaaaagccaagaagcgcaagagcctgggggctcccgtgctccacgctgtggccagcatggtgtctgcacccttagagacattgaggctggagcgtgagtggcagtccctggactgttccttctccccctgcctgtggggcccgacatggcacaacctggcgctctagcctctgccctgccctgggtctttgcaggaaaggcccagcgcctgcggccg

SEQ ID NO: 294963 - DNA, 1261 bp, Homo sapiens
ctcgccacctccgcgacctctgctcccagcccacttctcggtcccgctcgcggcctctcccccgcggcactcgggcaggggctcactcgagaggttttgccgccagccgctgccacccgacgggacttgttgttgccgggcaaccgtggcttccgtccccggggtcagggcccactgaccccggcgcaaagcgtcctggggcttgtagtttcggccgagggtgggctccgcggtcgccggtttctcttcccagctctgccctcgcttgctggccggtctccggggtcagcgcggggccaccatccagccccttggggcccgccccaagcagctgtcgaggacgcactcagcctgcgcagccatggcctcggcaggggcggagaggcggccgggggtccaggaggcgacggtcgtggggcagggacagctcacggaggagcccggcagcgctcagacctccgaggtgaccgtcaggctgtttaaccttcaaacacagggccgcagcgctctgagaggtggaactgagcgccccgacccgctaactgccaggctgggccctccaggcggggaggggcacaggctggtgtccttattcccgtttcggtgtctaacgttaggtgttcagtgacggatccctatgtcctttgcccggccatggtgaccgatggcctgtgtgtcatctctagtgtccagtggcgggagaccagttcctggtgcctgcccatgaggcccgcggaacccagagtgaagaccagcgcccagcaggcgcagcttcggagtcggagctccaggaggaaggacccaagctgggggaggagcggcccaagccgcatgccggggcgctagaggagagaggccccaggcccgtggtctccattgtgaggccccgtcatggtccaaagagaaagcctgtcaagtctctcagcctcccgggccttcgtgcccatcttaaggctgaagctgagctgccacccaagctgccgctgcaggaggaggagccagaggacagccagagtgagccctcaccatctgccaaacagcacaaaaaagccaagaagcgcaagagcctgggggctcccgtgctccacgctgtggccagcatggtgtctgcacccttagagacattgaggctggagcgtgagtggcagtccctggactgttccttctccccctgcctgtggggcccgacatggcacaacctggcgctctagcctctgccctgccctgggtctttgcaggaaaggcccagcgcctgcggccg

SEQ ID NO: 294964 - DNA, 1038 bp, Homo sapiens
ctcgccacctccgcgacctctgctcccagcccacttctcggtcccgctcgcggcctctcccccgcggcactcgggcaggggctcactcgagaggttttgccgccagccgctgccacccgacgggacttgttgttgccgggcaaccgtggcttccgtccccggggtcagggcccactgaccccggcgcaaagcgtcctggggcttgtagtttcggccgagggtgggctccgcggtcgccggtttctcttcccagctctgccctcgcttgctggccggtctccggggtcagcgcggggccaccatccagccccttggggcccgccccaagcagctgtcgaggacgcactcagcctgcgcagccatggcctcggcaggggcggagaggcggccgggggtccaggaggcgacggtcgtggggcagggacagctcacggaggagcccggcagcgctcagacctccgagtgtccagtggcgggagaccagttcctggtgcctgcccatgaggcccgcggaacccagagtgaagaccagcgcccagcaggcgcagcttcggagtcggagctccaggaggaaggacccaagctgggggaggagcggcccaagccgcatgccggggcgctagaggagagaggccccaggcccgtggtctccattgtgaggccccgtcatggtccaaagagaaagcctgtcaagtctctcagcctcccgggccttcgtgcccatcttaaggctgaagctgagctgccacccaagctgccgctgcaggaggaggagccagaggacagccagagtgagccctcaccatctgccaaacagcacaaaaaagccaagaagcgcaagagcctgggggctcccgtgctccacgctgtggccagcatggtgtctgcacccttagagacattgaggctggagcgtgagtggcagtccctggactgttccttctccccctgcctgtggggcccgacatggcacaacctggcgctctagcctctgccctgccctgggtctttgcaggaaaggcccagcgcctgcggccg

SEQ ID NO: 294965 - DNA, 890 bp, Homo sapiens
cagggccagatggcgccgcctctgcccgactcagaaagagagaaacaagagccggagcagggagaggttgggaagaggcctgggctgccgcccgagcctcgcgagcagagggacgtggagcgagcgggtggaaaccaggcggccagccagctggagggaagctggcagggcggagatgctggaccacgccgtcctgcttcaggtgatcaaagaacagcaggtgcagcaaaagcgcttgctggaccagcaggagaagctgctggcggtgatcgaggagcagcacaaggagatccaccagcagaggcaggaggacgaggaggataaacccaggcaggtggaggtgcatcaagagcccggggcagcggtgcccagaggccaggaggcccctgaaggcaaggccagggagacggtggagaatctgcctcccctgcctttggaccctgtcctcagagctcctgggggccgccctgctccatcccaggaccttaaccagcgctccctggagcactctgaggggcctgtgggcagagaccctgctggccctcctgacggcggccctgacacagagcctcgggcagcccagggcaagctgagagatggccagaaggatgccgcccccagggcagctggcactgtgaaggagctccccaagggcccggagcaggtgcccgtgccagaccccgccagggaagccgggggcccagaggagcgcctcgcagaggaattccctgggcaaagtcaggacgttactggcggttcccaagacaggaaaaactggagggggggcagcagggccagatttgaggaagcacggtcgtggcggccggcacaacggggactcctagcagatgccgacggctgaggatgcggggggagggagcacccgtgtc

SEQ ID NO: 294966 - DNA, 171 bp, Homo sapiens
aattcaagcttctaacgatgtacggggtcatggtcccaacacaggctactgtgagagccagcatccaaccccacgcttgcagtgactcagaatgataattattatgactgtttatcgatgcttcccacagtgtggtagaaagtcttgaataaacacttttgccttcaccca

SEQ ID NO: 294967 - DNA, 2671 bp, Homo sapiens
tgtttttgtggagatgggggtcttgctatgtttcccaggctggtctctaactcctgggctcaagcgatctgcctgcctccgcctcccaaattgctgggattacaggcgtgagccgccgtgcccaggcttattttcttacgtgcttgtcctagaacaactgaatgtgtaaagtggaaaaaacaaaaacaaaaccccacccagcccagataaccatctctgacattctggcacattccttttgactgttgctctggacactcacttccatgggcaacgagcaggcttgctggggtcctgccgggtgcgcctggggcacagccagtgggagaactgatgcggcacagtggctggctgtgcgggagaggccatcccgggtgggcttccaggggcagtcagggcgcagcctctcccgggccctcaggcctgcgtgcatcactgagctgtccgggcttcacggtcacagtcatgatgggtgtcaccagtggccagtgttcgggcacactccctgcaggtgacctgtgcgttgccttgctgtgggccgcgccgtccctggcccagcacggtgcatgagcagcccgggcactctgactgtgtgctttccaaacccagaagctggcagggcggagatgctggaccacgccgtcctgcttcaggtgatcaaagaacagcaggtgcagcaaaagcgcttgctggaccagcaggagaagctgctggcggtgatcgaggagcagcacaaggagatccaccagcagaggcaggaggacgaggaggataaacccaggcagggtaggccgggctggcggatggagtggggtggggccaggcagggggtctcctgctgtcctcatgcggctgggtctgaggctcggtggcctctagacctgagcgtgagtctggttttggttcccaatgctgttgttgctggttcttctgagcccctccactggcagcctgtgtacagtgctgtggctaaattgatgatcgacttcatttgcagtggaggtgcatcaagagcccggggcagcggtgcccagaggccaggaggcccctgaaggcaaggccagggagacggtggagaatctgcctcccctgcctttggaccctgtcctcagagctcctgggggccgccctgctccatcccaggaccttaaccagcgctccctggagcactctgaggggcctgtgggcagagaccctgctggccctcctgacggcggccctgacacagagcctcgggcagcccagggcaagctgagagatggccagaaggatgccgcccccagggcagctggcactgtgaaggagctccccaagggcccggagcaggtgcccgtgccagaccccgccagggaagccgggggcccagaggagcgcctcgcagaggaattccctgggcaaagtcaggacgttactggcggttcccaagacaggaaaaaacctgggaaggaggtggcagccactggcaccagcattctgaaggaagccaactggctcgtggcagggccaggagcagagacgggggaccctcgcatgaagcccaagcaagtgagccgagacctgggccttgcagcggacctgcccggtggggcggaaggagcagctgcacagccccaggctgtgttacgccagccggaactgcgggtcatctctgatggcgagcagggtggacagcagggccaccggctggaccatggcggtcacctggagatgagaaaggcccgcgggggggaccatgtgcctgtgtcccacgagcagccgagaggcggggaggacgctgctgtccaggagcccaggcagaggccagagccagagctggggctcaaacgagctgtcccggggggccagaggccggacaatgccaagcccaaccgggacctgaaactgcaggctggctccgacctccggaggcgacggcgggaccttggccctcatgcagagggtcagctggccccgagggatggggtcatcattggccttaaccccctgcctgatgtccaggtgaacgacctccgtggcgccctggatgcccagctccgccaggctgcggggggagctctgcaggtggtccacagccggcagcttagacaggcgcctgggcctccagaggagtcctagcacctgctggccatgagggccacgccagccactgccctcctcggccagcagcaggtctgtctcagccgcatcccagccaaactctggaggtcacactcgcctctccccagggtttcatgtctgaggccctcaccaagtgtgagtgacagtataaaagattcactgtggcatcgtttccagaatgttcttgctgtcgttctgttgcagctcttagtctgaggtcctctgacctctagactctgagctcactccagcctgtgaggagaaacggcctccgctgcgagctggctggtgcactcccaggctcaggctggggagctgctgcgtctgtggtcaggcctcctgctcctgccagggagcacgcgtggtcttcgggttgagctcggccgtgcgtggaggtgcgcatggctgctcatggtcccaacacaggctactgtgagagccagcatccaaccccacgcttgcagtgactcagaatgataattattatgactgtttatcgatgcttcccacagtgtggtagaaagtcttgaataaacacttttgccttcaccca

SEQ ID NO: 294968 - DNA, 2526 bp, Homo sapiens
cagggccagatggcgccgcctctgcccgactcagaaagagagaaacaagagccggagcagggagaggttgggaagaggcctggacaggcccaggccttggaggaggcgggtgatcttcctgaagatccccagaaagttccagaagcagatggtcagccagctgtccagcctgcaaaggaggacctggggccaggagacaggtgcctgcatcctcggccccaggcagtgctgtctgagcagcagaacggcctggcggtgggtggaggggaaaaggccaaggggggaccgccgccaggcaacgccgccggggacacagggcagcccgcagaggacagcgaccacggtgggaagcctcccctcccagcggagaagccggctccagggcctgggctgccgcccgagcctcgcgagcagagggacgtggagcgagcgggtggaaaccaggcggccagccagctggagggaagctggcagggcggagatgctggaccacgccgtcctgcttcaggtgatcaaagaacagcaggtgcagcaaaagcgcttgctggaccagcaggagaagctgctggcggtgatcgaggagcagcacaaggagatccaccagcagaggcaggaggacgaggaggataaacccaggcagggtaggccgggctggcggatggagtggggtggggccaggcagggggtctcctgctgtcctcatgcggctgggtctgaggctcggtggcctctagacctgagcgtgagtctggttttggttcccaatgctgttgttgctggttcttctgagcccctccactggcagcctgtgtacagtgctgtggctaaattgatgatcgacttcatttgcagtggaggtgcatcaagagcccggggcagcggtgcccagaggccaggaggcccctgaaggcaaggccagggagacggtggagaatctgcctcccctgcctttggaccctgtcctcagagctcctgggggccgccctgctccatcccaggaccttaaccagcgctccctggagcactctgaggggcctgtgggcagagaccctgctggccctcctgacggcggccctgacacagagcctcgggcagcccagggcaagctgagagatggccagaaggatgccgcccccagggcagctggcactgtgaaggagctccccaagggcccggagcaggtgcccgtgccagaccccgccagggaagccgggggcccagaggagcgcctcgcagaggaattccctgggcaaagtcaggacgttactggcggttcccaagacaggaaaaaacctgggaaggaggtggcagccactggcaccagcattctgaaggaagccaactggctcgtggcagggccaggagcagagacgggggaccctcgcatgaagcccaagcaagtgagccgagacctgggccttgcagcggacctgcccggtggggcggaaggagcagctgcacagccccaggctgtgttacgccagccggaactgcgggtcatctctgatggcgagcagggtggacagcagggccaccggctggaccatggcggtcacctggagatgagaaaggcccgcgggggggaccatgtgcctgtgtcccacgagcagccgagaggcggggaggacgctgctgtccaggagcccaggcagaggccagagccagagctggggctcaaacgagctgtcccggggggccagaggccggacaatgccaagcccaaccgggacctgaaactgcaggctggctccgacctccggaggcgacggcgggaccttggccctcatgcagagggtcagctggccccgagggatggggtcatcattggccttaaccccctgcctgatgtccaggtgaacgacctccgtggcgccctggatgcccagctccgccaggctgcggggggagctctgcaggtggtccacagccggcagcttagacaggcgcctgggcctccagaggagtcctagcacctgctggccatgagggccacgccagccactgccctcctcggccagcagcaggtctgtctcagccgcatcccagccaaactctggaggtcacactcgcctctccccagggtttcatgtctgaggccctcaccaagtgtgagtgacagtataaaagattcactgtggcatcgtttccagaatgttcttgctgtcgttctgttgcagctcttagtctgaggtcctctgacctctagactctgagctcactccagcctgtgaggagaaacggcctccgctgcgagctggctggtgcactcccaggctcaggctggggagctgctgcgtctgtggtcaggcctcctgctcctgccagggagcacgcgtggtcttcgggttgagctcggccgtgcgtggaggtgcgcatggctgctcatggtcccaacacaggctactgtgagagccagcatccaaccccacgcttgcagtgactcagaatgataattattatgactgtttatcgatgcttcccacagtgtggtagaaagtcttgaataaacacttttgccttcaccca

SEQ ID NO: 294969 - DNA, 2315 bp, Homo sapiens
cagggccagatggcgccgcctctgcccgactcagaaagagagaaacaagagccggagcagggagaggttgggaagaggcctggacaggcccaggccttggaggaggcgggtgatcttcctgaagatccccagaaagttccagaagcagatggtcagccagctgtccagcctgcaaaggaggacctggggccaggagacaggtgcctgcatcctcggccccaggcagtgctgtctgagcagcagaacggcctggcggtgggtggaggggaaaaggccaaggggggaccgccgccaggcaacgccgccggggacacagggcagcccgcagaggacagcgaccacggtgggaagcctcccctcccagcggagaagccggctccagggcctgggctgccgcccgagcctcgcgagcagagggacgtggagcgagcgggtggaaaccaggcggccagccagctggagggaagctggcagggcggagatgctggaccacgccgtcctgcttcaggtgatcaaagaacagcaggtgcagcaaaagcgcttgctggaccagcaggagaagctgctggcggtgatcgaggagcagcacaaggagatccaccagcagaggcaggaggacgaggaggataaacccaggcaggtggaggtgcatcaagagcccggggcagcggtgcccagaggccaggaggcccctgaaggcaaggccagggagacggtggagaatctgcctcccctgcctttggaccctgtcctcagagctcctgggggccgccctgctccatcccaggaccttaaccagcgctccctggagcactctgaggggcctgtgggcagagaccctgctggccctcctgacggcggccctgacacagagcctcgggcagcccagggcaagctgagagatggccagaaggatgccgcccccagggcagctggcactgtgaaggagctccccaagggcccggagcaggtgcccgtgccagaccccgccagggaagccgggggcccagaggagcgcctcgcagaggaattccctgggcaaagtcaggacgttactggcggttcccaagacaggaaaaaacctgggaaggaggtggcagccactggcaccagcattctgaaggaagccaactggctcgtggcagggccaggagcagagacgggggaccctcgcatgaagcccaagcaagtgagccgagacctgggccttgcagcggacctgcccggtggggcggaaggagcagctgcacagccccaggctgtgttacgccagccggaactgcgggtcatctctgatggcgagcagggtggacagcagggccaccggctggaccatggcggtcacctggagatgagaaaggcccgcgggggggaccatgtgcctgtgtcccacgagcagccgagaggcggggaggacgctgctgtccaggagcccaggcagaggccagagccagagctggggctcaaacgagctgtcccggggggccagaggccggacaatgccaagcccaaccgggacctgaaactgcaggctggctccgacctccggaggcgacggcgggaccttggccctcatgcagagggtcagctggccccgagggatggggtcatcattggccttaaccccctgcctgatgtccaggtgaacgacctccgtggcgccctggatgcccagctccgccaggctgcggggggagctctgcaggtggtccacagccggcagcttagacaggcgcctgggcctccagaggagtcctagcacctgctggccatgagggccacgccagccactgccctcctcggccagcagcaggtctgtctcagccgcatcccagccaaactctggaggtcacactcgcctctccccagggtttcatgtctgaggccctcaccaagtgtgagtgacagtataaaagattcactgtggcatcgtttccagaatgttcttgctgtcgttctgttgcagctcttagtctgaggtcctctgacctctagactctgagctcactccagcctgtgaggagaaacggcctccgctgcgagctggctggtgcactcccaggctcaggctggggagctgctgcgtctgtggtcaggcctcctgctcctgccagggagcacgcgtggtcttcgggttgagctcggccgtgcgtggaggtgcgcatggctgctcatggtcccaacacaggctactgtgagagccagcatccaaccccacgcttgcagtgactcagaatgataattattatgactgtttatcgatgcttcccacagtgtggtagaaagtcttgaataaacacttttgccttcaccca

SEQ ID NO: 294970 - DNA, 2335 bp, Homo sapiens
cagggccagatggcgccgcctctgcccgactcagaaagagagaaacaagagccggagcagggagaggttgggaagaggcctggacaggcccaggccttggaggaggcgggtgatcttcctgaagatccccagaaagttccagaagcagatggtcagccagctgtccagcctgcaaaggaggacctggggccaggagacaggtgcctgcatcctcggccccaggcagtgctgtctgagcagcagaacggcctggcggtgggtggaggggaaaaggccaaggggggaccgccgccaggcaacgccgccggggacacagggcagcccgcagaggacagcgaccacggtgggaagcctcccctcccagcggagaagccggctccagggcctgggctgccgcccgagcctcgcgagcagagggacgtggagcgagcgggtggaaaccaggcggccagccagctggaggctgaaattaaaaagatagtagaagctggcagggcggagatgctggaccacgccgtcctgcttcaggtgatcaaagaacagcaggtgcagcaaaagcgcttgctggaccagcaggagaagctgctggcggtgatcgaggagcagcacaaggagatccaccagcagaggcaggaggacgaggaggataaacccaggcaggtggaggtgcatcaagagcccggggcagcggtgcccagaggccaggaggcccctgaaggcaaggccagggagacggtggagaatctgcctcccctgcctttggaccctgtcctcagagctcctgggggccgccctgctccatcccaggaccttaaccagcgctccctggagcactctgaggggcctgtgggcagagaccctgctggccctcctgacggcggccctgacacagagcctcgggcagcccagggcaagctgagagatggccagaaggatgccgcccccagggcagctggcactgtgaaggagctccccaagggcccggagcaggtgcccgtgccagaccccgccagggaagccgggggcccagaggagcgcctcgcagaggaattccctgggcaaagtcaggacgttactggcggttcccaagacaggaaaaaacctgggaaggaggtggcagccactggcaccagcattctgaaggaagccaactggctcgtggcagggccaggagcagagacgggggaccctcgcatgaagcccaagcaagtgagccgagacctgggccttgcagcggacctgcccggtggggcggaaggagcagctgcacagccccaggctgtgttacgccagccggaactgcgggtcatctctgatggcgagcagggtggacagcagggccaccggctggaccatggcggtcacctggagatgagaaaggcccgcgggggggaccatgtgcctgtgtcccacgagcagccgagaggcggggaggacgctgctgtccaggagcccaggcagaggccagagccagagctggggctcaaacgagctgtcccggggggccagaggccggacaatgccaagcccaaccgggacctgaaactgcaggctggctccgacctccggaggcgacggcgggaccttggccctcatgcagagggtcagctggccccgagggatggggtcatcattggccttaaccccctgcctgatgtccaggtgaacgacctccgtggcgccctggatgcccagctccgccaggctgcggggggagctctgcaggtggtccacagccggcagcttagacaggcgcctgggcctccagaggagtcctagcacctgctggccatgagggccacgccagccactgccctcctcggccagcagcaggtctgtctcagccgcatcccagccaaactctggaggtcacactcgcctctccccagggtttcatgtctgaggccctcaccaagtgtgagtgacagtataaaagattcactgtggcatcgtttccagaatgttcttgctgtcgttctgttgcagctcttagtctgaggtcctctgacctctagactctgagctcactccagcctgtgaggagaaacggcctccgctgcgagctggctggtgcactcccaggctcaggctggggagctgctgcgtctgtggtcaggcctcctgctcctgccagggagcacgcgtggtcttcgggttgagctcggccgtgcgtggaggtgcgcatggctgctcatggtcccaacacaggctactgtgagagccagcatccaaccccacgcttgcagtgactcagaatgataattattatgactgtttatcgatgcttcccacagtgtggtagaaagtcttgaataaacacttttgccttcaccca

SEQ ID NO: 294971 - DNA, 2813 bp, Homo sapiens
tgtttttgtggagatgggggtcttgctatgtttcccaggctggtctctaactcctgggctcaagcgatctgcctgcctccgcctcccaaattgctgggattacaggcgtgagccgccgtgcccaggcttattttcttacgtgcttgtcctagaacaactgaatgtgtaaagtggaaaaaacaaaaacaaaaccccacccagcccagataaccatctctgacattctggcacattccttttgactgttgctctggacactcacttccatgggcaacgagcaggcttgctggggtcctgccgggtgcgcctggggcacagccagtgggagaactgatgcggcacagtggctggctgtgcgggagaggccatcccgggtgggcttccaggggcagtcagggcgcagcctctcccgggccctcaggcctgcgtgcatcactgagctgtccgggcttcacggtcacagtcatgatgggtgtcaccagtggccagtgttcgggcacactccctgcaggtgacctgtgcgttgccttgctgtgggccgcgccgtccctggcccagcacggtgcatgagcagcccgggcactctgactgtgtgctttccaaacccagaagctggcagggcggagatgctggaccacgccgtcctgcttcaggtgatcaaagaacagcaggtgcagcaaaagcgcttgctggaccagcaggagaagctgctggcggtgatcgaggagcagcacaaggagatccaccagcagaggcaggaggacgaggaggataaacccaggcagggtaggccgggctggcggatggagtggggtggggccaggcagggggtctcctgctgtcctcatgcggctgggtctgaggctcggtggcctctagacctgagcgtgagtctggttttggttcccaatgctgttgttgctggttcttctgagcccctccactggcagcctgtgtacagtgctgtggctaaattgatgatcgacttcatttgcagtggaggtgcatcaagagcccggggcagcggtgcccagaggccaggaggcccctgaaggcaaggccagggagacggtggagaatctgcctcccctgcctttggaccctgtcctcagagctcctgggggccgccctgctccatcccaggaccttaaccagcgctccctggagcactctgaggggcctgtgggcagagaccctgctggccctcctgacggcggccctgacacagagcctcgggcagcccagggcaagctgagagatggccagaaggatgccgcccccagggcagctggcactgtgaaggagctccccaagggcccggagcaggtgcccgtgccagaccccgccagggaagccgggggcccagaggagcgcctcgcagaggaattccctgggcaaagtcaggacgttactggcggttcccaagacaggaaaaaacctgggaaggaggtggcagccactggcaccagcattctgaaggaagccaactggctcgtggcagggccaggagcagagacgggggaccctcgcatgaagcccaagcaagtgagccgagacctgggccttgcagcggacctgcccggtggggcggaaggagcagctgcacagccccaggctgtgttacgccagccggaactgcgggtcatctctgatggcgagcagggtggacagcagggccaccggctggaccatggcggtcacctggagatgagaaaggcccgcgggggggaccatgtgcctgtgtcccacgagcagccgagaggcggggaggacgctgctgtccaggagcccaggcagaggccagagccagagctggggctcaaacgagctgtcccggggggccagaggccggacaatgccaagcccaaccgggacctgaaactgcaggctggctccgacctccggaggcgacggcgggaccttggccctcatgcagagggtcagctggccccgagggatggggtcatcattggccttaaccccctgcctgatgtccaggtgaacgacctccgtggcgccctggatgcccagctccgccaggctgcggggggagctctgcaggtggtccacagccggcagcttagacaggcgcctgggcctccagaggagtcctagcacctgctggccatgagggccacgccagccactgccctcctcggccagcagcaggtctgtctcagccgcatcccagccaaactctggaggtcacactcgcctctccccagggtttcatgtctgaggccctcaccaagtgtgagtgacagtataaaagattcactgtggcatcgtttccagaatgttcttgctgtcgttctgttgcagctcttagtctgaggtcctctgacctctagactctgagctcactccagcctgtgaggagaaacggcctccgctgcgagctggctggtgcactcccaggctcaggctggggagctgctgcgtctgtggtcaggcctcctgctcctgccagggagcacgcgtggtcttcgggttgagctcggccgtgcgtggaggtgcgcatggctgctcatggtcccaacacaggctactgtgagagccagcatccaaccccacgcttgcagtgactcagaatgataattattatgactgtttatcgatgcttcccacagtgtggtagaaagtcttgaataaacacttttgccttcacccaaaaaaaaaaaaaaaaatgacaaaaaaaagggggggtcttattgtgggggggaaaaaaaggaataagggcgggtgaagttcggcacccttttgaagggggagaatgggggccaaaaaggggggaaatgaaaacggccgaaaag

SEQ ID NO: 294972 - DNA, 3645 bp, Homo sapiens
tgtttttgtggagatgggggtcttgctatgtttcccaggctggtctctaactcctgggctcaagcgatctgcctgcctccgcctcccaaattgctgggattacaggcgtgagccgccgtgcccaggcttattttcttacgtgcttgtcctagaacaactgaatgtgtaaagtggaaaaaacaaaaacaaaaccccacccagcccagataaccatctctgacattctggcacattccttttgactgttgctctggacactcacttccatgggcaacgagcaggcttgctggggtcctgccgggtgcgcctggggcacagccagtgggagaactgatgcggcacagtggctggctgtgcgggagaggccatcccgggtgggcttccaggggcagtcagggcgcagcctctcccgggccctcaggcctgcgtgcatcactgagctgtccgggcttcacggtcacagtcatgatgggtgtcaccagtggccagtgttcgggcacactccctgcaggtgacctgtgcgttgccttgctgtgggccgcgccgtccctggcccagcacggtgcatgagcagcccgggcactctgactgtgtgctttccaaacccagaagctggcagggcggagatgctggaccacgccgtcctgcttcaggtgatcaaagaacagcaggtgcagcaaaagcgcttgctggaccagcaggagaagctgctggcggtgatcgaggagcagcacaaggagatccaccagcagaggcaggaggacgaggaggataaacccaggcagggtaggccgggctggcggatggagtggggtggggccaggcagggggtctcctgctgtcctcatgcggctgggtctgaggctcggtggcctctagacctgagcgtgagtctggttttggttcccaatgctgttgttgctggttcttctgagcccctccactggcagcctgtgtacagtgctgtggctaaattgatgatcgacttcatttgcagtggaggtgcatcaagagcccggggcagcggtgcccagaggccaggaggcccctgaaggcaaggccagggagacggtggagaatctgcctcccctgcctttggaccctgtcctcagagctcctgggggccgccctgctccatcccaggaccttaaccagcgctccctggagcactctgaggggcctgtgggcagagaccctgctggccctcctgacggcggccctgacacagagcctcgggcagcccagggcaagctgagagatggccagaaggatgccgcccccagggcagctggcactgtgaaggagctccccaagggcccggagcaggtgcccgtgccagaccccgccagggaagccgggggcccagaggagcgcctcgcagaggaattccctgggcaaagtcaggacgttactggcggttcccaagacaggaaaaaacctgggaaggaggtggcagccactggcaccagcattctgaaggaagccaactggctcgtggcagggccaggagcagagacgggggaccctcgcatgaagcccaagcaagtgagccgagacctgggccttgcagcggacctgcccggtggggcggaaggagcagctgcacagccccaggctgtgttacgccagccggaactgcgggtcatctctgatggcgagcagggtggacagcagggccaccggctggaccatggcggtcacctggagatgagaaaggcccgcgggggggaccatgtgcctgtgtcccacgagcagccgagaggcggggaggacgctgctgtccaggagcccaggcagaggccagagccagagctggggctcaaacgagctgtcccggggggccagaggccggacaatgccaagcccaaccgggacctgaaactgcaggctggctccgacctccggaggcgacggcgggaccttggccctcatgcagagggtcagctggccccgagggatggggtcatcattggccttaaccccctgcctgatgtccaggtgaacgacctccgtggcgccctggatgcccagctccgccaggctgcggggggagctctgcaggtggtccacagccggcagcttagacaggcgcctgggcctccagaggagtcctagcacctgctggccatgagggccacgccagccactgccctcctcggccagcagcaggtctgtctcagccgcatcccagccaaactctggaggtcacactcgcctctccccagggtttcatgtctgaggccctcaccaagtgtgagtgacagtataaaagattcactgtggcatcgtttccagaatgttcttgctgtcgttctgttgcagctcttagtctgaggtcctctgacctctagactctgagctcactccagcctgtgaggagaaacggcctccgctgcgagctggctggtgcactcccaggctcaggctggggagctgctgcgtctgtggtcaggcctcctgctcctgccagggagcacgcgtggtcttcgggttgagctcggccgtgcgtggaggtgcgcatggctgctcatggtcccaacacaggctactgtgagagccagcatccaaccccacgcttgcagtgactcagaatgataattattatgactgtttatcgatgcttcccacagtgtggtagaaagtcttgaataaacacttttgccttcacccagcctcggtggatgctgtttggtgtccaggaagcacagggagcaggggccagacaagccgggtgtccaggggcactggccggtgccaccctttgcactcctcatggttggcccagccctccattgtctgtgtttttcaaaatccaattgtggctttttttaaaaagtaaaaaacaccactgataacctgattagtgaagttggtcctgggggagtgactgaaaggaaagcctgaggccggctcaggattccagatgtgtaaagcagaggccagaggtcatgagggaacggcgccatgacctgagcgtcgcagtgactggacactagacgcagcacagccccagagagaccctgtgagcaggcagagccgcctggtgccaggaggtggtccagcccccagggccaggctgacgggcgtgctgcctcgtgaccaggacacgctccacagccctctcacctggcgggagagaggaggtgctgctgtgtccacagcatccgagtctgctttggctcgtcctctggggagcttgcgccccaaccctgccacgaaaccctgccacgaagggcagaggaccagggcctgggtctgggggaggcccgtgttggcgaagggtccctgcatggagggccggcctcagcctctggtggtgtcttcctgcaccttttgatatccttttggctctttattatagtttcttcccttgaaggatgtcactgggcagcctgaagactggaaattttttttcttttgagacggagtctcgctctgtcacccaggctggagtgcagtggtgtgatctcggctcactgcaagctccgcctcccgggttcacgccattctcctgcctcagcctcccgagtagctgggactacaggcgcccgccaccacgcccggctaatttttttttccgtatttttagtagagactgggtttcaccatgttggtcaggctggtctcgaactcctgaccttgtga

SEQ ID NO: 294973 - DNA, 2657 bp, Homo sapiens
tgtttttgtggagatgggggtcttgctatgtttcccaggctggtctctaactcctgggctcaagcgatctgcctgcctccgcctcccaaattgctgggattacaggcgtgagccgccgtgcccaggcttattttcttacgtgcttgtcctagaacaactgaatgtgtaaagtggaaaaaacaaaaacaaaaccccacccagcccagataaccatctctgacattctggcacattccttttgactgttgctctggacactcacttccatgggcaacgagcaggcttgctggggtcctgccgggtgcgcctggggcacagccagtgggagaactgatgcggcacagtggctggctgtgcgggagaggccatcccgggtgggcttccaggggcagtcagggcgcagcctctcccgggccctcaggcctgcgtgcatcactgagctgtccgggcttcacggtcacagtcatgatgggtgtcaccagtggccagtgttcgggcacactccctgcaggtgacctgtgcgttgccttgctgtgggccgcgccgtccctggcccagcacggtgcatgagcagcccgggcactctgactgtgtgctttccaaacccagaagctggcagggcggagatgctggaccacgccgtcctgcttcaggtgatcaaagaacagcaggtgcagcaaaagcgcttgctggaccagcaggagaagctgctggcggtgatcgaggagcagcacaaggagatccaccagcagaggcaggaggacgaggaggataaacccaggcagggtaggccgggctggcggatggagtggggtggggccaggcagggggtctcctgctgtcctcatgcggctgggtctgaggctcggtggcctctagacctgagcgtgagtctggttttggttcccaatgctgttgttgctggttcttctgagcccctccactggcagcctgtgtacagtgctgtggctaaattgatgatcgacttcatttgcagtggaggtgcatcaagagcccggggcagcggtgcccagaggccaggaggcccctgaaggcaaggccagggagacggtggagaatctgcctcccctgcctttggaccctgtcctcagagctcctgggggccgccctgctccatcccaggaccttaaccagcgctccctggagcactctgaggggcctgtgggcagagaccctgctggccctcctgacggcggccctgacacagagcctcgggcagcccagggcaagctgagagatggccagaaggatgccgcccccagggcagctggcactgtgaaggagctccccaagggcccggagcaggtgcccgtgccagaccccgccagggaagccgggggcccagaggagcgcctcgcagaggaattccctgggcaaagtcaggacgttactggcggttcccaagacaggaaaaaacctgggaaggaggtggcagccactggcaccagcattctgaaggaagccaactggctcgtggcagggccaggagcagagacgggggaccctcgcatgaagcccaagcaagtgagccgagacctgggccttgcagcggacctgcccggtggggcggaaggagcagctgcacagccccaggctgtgttacgccagccggaactgcgggtcatctctgatggcgagcagggtggacagcagggccaccggctggaccatggcggtcacctggagatgagaaaggcccgcgggggggaccatgtgcctgtgtcccacgagcagccgagaggcggggaggacgctgctgtccaggagcccaggcagaggccagagccagagctggggctcaaacgagctgtcccggggggccagaggccggacaatgccaagcccaaccgggacctgaaactgcaggctggctccgacctccggaggcgacggcgggaccttggccctcatgcagagggtcagctggccccgagggatggggtcatcattggccttaaccccctgcctgatgtccaggtgaacgacctccgtggcgccctggatgcccagctccgccaggctgcggggggagctctgcaggtggtccacagccggcagcttagacaggcgcctgggcctccagaggagtcctagcacctgctggccatgagggccacgccagccactgccctcctcggccagcagcaggtctgtctcagccgcatcccagccaaactctggaggtcacactcgcctctccccagggtttcatgtctgaggccctcaccaagtgtgagtgacagtataaaagattcactgtggcatcgtttccagaatgttcttgctgtcgttctgttgcagctcttagtctgaggtcctctgacctctagactctgagctcactccagcctgtgaggagaaacggcctccgctgcgagctggctggtgcactcccaggctcaggctggggagctgctgcgtctgtggtagggccctgtccggcaggaccccggtttcgcgtgagccgcagcttagggcccaggtcttgtcacgcctttggacactccgcctgtggttgctcatatttatggttactcccgcgcgatacataatgtgtcaccaaagagggggcggccaactatatgatgagtagaggagtacccagtgagccatatttatattatttcgcgcgccgc

SEQ ID NO: 294974 - DNA, 1127 bp, Homo sapiens
gctgggattctgggagaagagacctatattctaacgactgggggcggaaggagcagctgcacagccccaggctgtgttacgccagccggaactgcgggtcatctctgatggcgagcagggtggacagcagggccaccggctggaccatggcggtcacctggagatgagaaaggcccgcgggggggaccatgtgcctgtgtcccacgagcagccgagaggcggggaggacgctgctgtccaggagcccaggcagaggccagagccagagctggggctcaaacgagctgtcccggggggccagaggccggacaatgccaagcccaaccgggacctgaaactgcaggctggctccgacctccggaggcgacggcgggaccttggccctcatgcagagggtcagctggccccgagggatggggtcatcattggccttaaccccctgcctgatgtccaggtgaacgacctccgtggcgccctggatgcccagctccgccaggctgcggggggagctctgcaggtggtccacagccggcagcttagacaggcgcctgggcctccagaggagtcctagcacctgctggccatgagggccacgccagccactgccctcctcggccagcagcaggtctgtctcagccgcatcccagccaaactctggaggtcacactcgcctctccccagggtttcatgtctgaggccctcaccaagtgtgagtgacagtataaaagattcactgtggcatcgtttccagaatgttcttgctgtcgttctgttgcagctcttagtctgaggtcctctgacctctagactctgagctcactccagcctgtgaggagaaacggcctccgctgcgagctggctggtgcactcccaggctcaggctggggagctgctgcgtctgtggtcaggcctcctgctcctgccagggagcacgcgtggtcttcgggttgagctcggccgtgcgtggaggtgcgcatggctgctcatggtcccaacacaggctactgtgagagccagcatccaaccccacgcttgcagtgactcagaatgataattattatgactgtttatcgatgcttcccacagtgtggtagaaagtcttgaataaacacttttgccttcaccca

SEQ ID NO: 294975 - DNA, 582 bp, Homo sapiens
ggatttgctggtgcagtacaactaggcttaatagggacatgagggccacgccagccactgccctcctcggccagcagcaggtctgtctcagccgcatcccagccaaactctggaggtcacactcgcctctccccagggtttcatgtctgaggccctcaccaagtgtgagtgacagtataaaagattcactgtggcatcgtttccagaatgttcttgctgtcgttctgttgcagctcttagtctgaggtcctctgacctctagactctgagctcactccagcctgtgaggagaaacggcctccgctgcgagctggctggtgcactcccaggctcaggctggggagctgctgcgtctgtggtcaggcctcctgctcctgccagggagcacgcgtggtcttcgggttgagctcggccgtgcgtggaggtgcgcatggctgctcatggtcccaacacaggctactgtgagagccagcatccaaccccacgcttgcagtgactcagaatgataattattatgactgtttatcgatgcttcccacagtgtggtagaaagtcttgaataaacacttttgccttcaccca

SEQ ID NO: 294976 - DNA, 650 bp, Homo sapiens
cgggctgcaggaattcggcacgttgtgaggattaagtgaaatgtgttaaatgcctactacagtaggtgctcagatatttatttttatttttttattatgcacattgtttttcctgcctttttatggctgtctaaagtctagggaaaagggaagactggttaatgatgagtagaaaaaacttgtaagctaatcattcactgacttattttccttccattttctggtttttaaaattagccacaccacaggaaacccacatttttagatggaaagagcaagaaaattgtgtcagtgctcttagttattttcatcttaatggtatagtgaaaagacattgacttgagatgatactaaggaagctttggctcactctcacttgaagaggggatcttggtgttgtagtacttggactgtacaaatgttttactgacttttcttactgctgtaaaggaatcaggcagttgggtattgatatgttatttggtgctctcattcatggcaaaggatttgataaataaaagttctttaaacactaaagcaaaatcaaatgagcaaaactaaggatgaaatgtaatattcatcagaacaaggatcactgagaaaaaatattcagaaacaactttaataaaacctgaattgaaataactgca

SEQ ID NO: 294977 - DNA, 992 bp, Homo sapiens
agcgttcctgtccggaagtcctgagagggaaacgcccgcaaaggctggtttttaagcgggagcatctcttcactcgcagcaagtgcgcgtgcgctgcctctcagcccaaattggaaacatggccgtacggtcgctgtgggcgggccggctgcgggtgcagcgcctactggcctggagtgccgcgtgggagagcaagggatggccgcttccattcagcactgccacccagagaactgctggtgaggactgccgttctgaggaccctcctgatgagcttgggccccctcttgctgaacgagccttaagggtaaaagctgttaaactggagaaagaagtccaagatttaacagtgagataccagagagctatagctgattgtgaaaacataaggaggcgaacccagagatgtgtggaagacgccaagatatttggaatccagagtttctgtaaggacttggtggaggtggctgacattttggagaagactacagagtgcatttctgaagaatcggagcctgaggaccaaaagctcactctggagaaggtcttccgagggttgttgcttttagaagcaaagctgaaaagtgtgtttgccaagcatggcctggagaaactgacacccattggtgacaaatatgacccccatgagcatgaactcatctgtcatgtgccagctggtgttggggtgcagcctggcaccgtggcattagtaagacaagatggctacaaacttcatggccgcaccattaggcttgcccgagtggaagtggcagtggagtctcagagaagactgtgaagaggccatcaggaactggatgttctcccagagcgcagtcacctatgtttcttttatttattaaactaggttggatggacatggagggtactcagggaactggtgcgggctacaccacacggggtcaaccaagacatcaaatggtacacgttgactggtgggctctcgaagctacacaggttgggccgggaccggt

SEQ ID NO: 294978 - DNA, 491 bp, Homo sapiens
aaaaataaaaataaatatctgagcacctactgtagtaggcatttaacacatttcacttaatcctcacaacgctgtgaaagaattattataatcattttacgaataaagaaacaggctcagaagggtgaaatcactggtgcctaaagtcctgcaggtgactgagctgagatttaagttcaagcctatgctctaatatgctgctttggctcactctcacttgaagaggggatcttggtgttgtagtacttggactgtacaaatgttttactgacttttcttactgctgtaaaggaatcaggcagttgggtattgatatgttatttggtgctctcattcatggcaaaggatttgataaataaaagttctttaaacactaaagcaaaatcaaatgagcaaaactaaggatgaaatgtaatattcatcagaacaaggatcactgagaaaaaatattcagaaacaactttaataaaacctgaattgaaataactgca

SEQ ID NO: 294979 - DNA, 624 bp, Homo sapiens
agagacggggtctcagagtctcattatgttgcccaggctggtctcaaactcctggcctaagcgatcctcccgcctgaccttccaaaatgctgggattacaggcttgagccacccccagcctccggattttctttattctgaaactcatccctaactttattttctgccagaggaagtctgtttttcacagcgtgataaactagcaagtctgagctgctgctcttgtcttcttagaggatgaaaatgggagtttatccctccttttctcctttctgaaaagagagtagatgaaaccttcccccgccttttggtttttaggaagcagaaagcagagatattaactatataaaaactgcaaacacataaataacagcagtatagaaagcatagggcttgtgtcagcatatgaatgaggtagcgtcttaccaccctggccgcatgcttggtcagcaatttccagcacttgcagacactgcaaaaggcttcccttatctcataagatggttacaaccacctagaaaggtggagcaggattcttcgtctgtgttataatagaggaaacagacacagagaagatacagagctaataacgcagaggctggacataaccgaggtcttcaaagc

SEQ ID NO: 294980 - DNA, 483 bp, Homo sapiens
gtacatggtaaggacttcgtaagtgttcatttgttactataactgaaaacactttctccagagattccatctgggaagatctctggtctctaaacttggttgtaattttggcttatgatggcatttcttcattatgtgccacctccttcctgttttaggggatggccgcttccattcagcactgccacccagagaactgctggtgaggactgccgttctgaggaccctcctgatgagcttgggccccctcttgctgaacgagccttaagggtaaaagctgttaaacaccctggccgcatgcttggtcagcaatttccagcacttgcagacactgcaaaaggcttcccttatctcataagatggttacaaccacctagaaaggtggagcaggattcttcgtctgtgttataatagaggaaacagacacagagaagatacagagctaataacgcagaggctggacataaccgaggtcttcaaagc

SEQ ID NO: 294981 - DNA, 4095 bp, Homo sapiens
agcgttcctgtccggaagtcctgagagggaaacgcccgcaaaggctggtttttaagcgggagcatctcttcactcgcagcaagtgcgcgtgcgctgcctctcagcccaaattggaaacatggccgtacggtcgctgtgggcgggccggctgcgggtgcagcgcctactggcctggagtgccgcgtgggagagcaagggatggccgcttccattcagcactgccacccagagaactgctggtgaggactgccgttctgaggaccctcctgatgagcttgggccccctcttgctgaacgagccttaagggtaaaagctgttaaactggagaaagaagtccaagatttaacagtgagataccagagagctatagctgattgtgaaaacataaggaggcgaacccagagatgtgtggaagacgccaagatatttggaatccagagtttctgtaaggacttggtggaggtggctgacattttggagaagactacagagtgcatttctgaagaatcggagcctgaggaccaaaagctcactctggagaaggtcttccgagggttgttgcttttagaagcaaagctgaaaagtgtgtttgccaagcatggcctggagaaactgacacccattggtgacaaatatgacccccatgagcatgaactcatctgtcatgtgccagctggtgttggggtgcagcctggcaccgtggcattagtaagacaagatggctacaaacttcatggccgcaccattaggcttgcccgagtggaagtggcagtggagtctcagagaagactgtgaagaggccatcaggaactggatgttctcccagagcgcagtcacctatgtttcttttatttattaaactaggtttgtattgtacatgaggtacttcatgtgatatgttttggatttagtcatattggctttatttctaagatattctattgatttaatgtgacctgtttggtctcatcagaagtcttaccattgggcatttgaacagtgtgacaggtgttccaatggcctttatcaaaacatgtttaggaaaattggtactgtgataaatttgaatccaaaatccttttaactatgggttttcaactacatgtttcttcctagcggtctctataacaggaattgtgtagtatcttgtattttgtggaaaaaggagatggtagggattggttcaacatttgggtacttagaggataaagcttcgtggtcgtataaatttagatcatttggattgatttttatacacatagattttcaggactttaccttttgttttgtttttttccttttagccatcttatgttcttgtaatcccaactagataggctttatgctcacatcattgtcccatacccacccctttctcatccccatttgcaggggctaaaggtctagatgagacttggaaggcaaggagcatcgaaatttgagatacccaggaccctttcaagcaagaatggccaaaaagccttgtgctgtctttgctcttcaaattattttcagcctccttgtcatataatcatttcaggcaaactgaggcaacactaacagctaatgacccagatggctctatttgggtaatttacctacaacttattccaccagcctttactcctctgcccttttgtcaattttaccttataatcctttattaaatgatgggaggtggtgatcaggacaaaagtgttaggttcccatgatttctcatttcatttattaatagttaatgctgaatttttttttaagtttcctctggctctatttatgttactttttgcgataagaacacttaacataagtattctctcctcttggcaatttttttttttttcctgtgttgcccaggctgacctccaactcctgggcccaagcaatcctgcctcagcctgccaagtagctaggactacaggcgttcaccactgcgcccgcaaagttttttggttgtttttttttttaagttggtactcacaaatcactacctctgttatattgacaagctctatttcctattctttgtatctgttaagtcacatctgtgtaaacattgagctcaccttttatatattaacctctagaattaatgggcctatgtggttttttttcagtcttatagctggtgttctgtaaaagatttgtccaataaacgacttaatgaatgatacatcagtcagattttaggaaggcagtcaattatggatattttaatgttggaagaggccttaatgatcaaatctcaccctttctgcttctgaagtatgaaaatctagtctttttaggactggacacaaggaaaataatctctaaactattgactaaattccagtgagagtatgaatgaagaacaactagatattaatgtcaatcatttaagattaatgggcatgcaattaagtctccatttaagattaatgggcatgcaatgaagtctccagcagacaatcagatgttgttggatgtctagattatataggtttaggttgaagttataaaataaaataaaattcattttccactggaactctatgacattcagtggagtggtggaaagttaacctcttatacattatagataattctaagacagcacacaaacttatcaataaagccatctccttgtgggccttaccatcttcatcagatttagacccttaaaaaacaagtaaatatgcacttttaaaatgcaatcaaaagactggtggttaagcttgtaaaaccagaacatcttttggcattccactaagtatatattgtaaatttaatgaacaatcaaggttcacaataggaagttgtctttttttgccttccattctgtgagatttgacagatggtgacaataagaaaatgagctgattgtaattactctctgtgtgtttttttattgctagctatcattaccagttagaattaacattaattacaattaacaataattttaggtatggaatgttatgattacctaaagagatgtctctacctaatgagctcaagtgatcctcccacctcagcctaccaagtagccaggaccacaggcaagtgcaccaccatgactggctagttttgttttttggttttggtttttggtttttggtttttttttttgggttggttggttgttttttacaggcggggtctcactatatggtccaggctagaagaattttctaatggtctattacacctcccgtttgggcaagtaaattcagaataattttaggttcttttgttattcagtagttttgcagacttaaaagtgtaaatttagaattagaagatgaagctatagtagtaagaatctcaagttgaagggcttgggggagccaaagcagcatattagagcataggcttgaacttaaatctcagctcagtcacctgcaggactttaggcaccagtgatttcacccttctgagcctgtttctttattcgtaaaatgattataataattctttcacagcgttgtgaggattaagtgaaatgtgttaaatgcctactacagtaggtgctcagatatttatttttatttttttattatgcacattgtttttcctgcctttttatggctgtctaaagtctagggaaaagggaagactggttaatgatgagtagaaaaaacttgtaagctaatcattcactgacttattttccttccattttctggtttttaaaattagccacaccacaggaaacccacatttttagatggaaagagcaagaaaattgtgtcagtgctcttagttattttcatcttaatggtatagtgaaaagacattgacttgagatgatactaaggaagctttggctcactctcacttgaagaggggatcttggtgttgtagtacttggactgtacaaatgttttactgacttttcttactgctgtaaaggaatcaggcagttgggtattgatatgttatttggtgctctcattcatggcaaaggatttgataaataaaagttctttaaacactaaagcaaaatcaaatgagcaaaactaaggatgaaatgtaatattcatcagaacaaggatcactgagaaaaaatattcagaaacaactttaataaaacctgaattgaaataactgca

SEQ ID NO: 294982 - DNA, 4015 bp, Homo sapiens
gagcgtaggccaggggaccaagcttctcggcctctacgaccgtgcactcacggccccattttacagacggggaaactgaggccatcagccgtgcctctttcttaggccgaggaaggggatggccgcttccattcagcactgccacccagagaactgctggtgaggactgccgttctgaggaccctcctgatgagcttgggccccctcttgctgaacgagccttaagggtaaaagctgttaaactggagaaagaagtccaagatttaacagtgagataccagagagctatagctgattgtgaaaacataaggaggcgaacccagagatgtgtggaagacgccaagatatttggaatccagagtttctgtaaggacttggtggaggtggctgacattttggagaagactacagagtgcatttctgaagaatcggagcctgaggaccaaaagctcactctggagaaggtcttccgagggttgttgcttttagaagcaaagctgaaaagtgtgtttgccaagcatggcctggagaaactgacacccattggtgacaaatatgacccccatgagcatgaactcatctgtcatgtgccagctggtgttggggtgcagcctggcaccgtggcattagtaagacaagatggctacaaacttcatggccgcaccattaggcttgcccgagtggaagtggcagtggagtctcagagaagactgtgaagaggccatcaggaactggatgttctcccagagcgcagtcacctatgtttcttttatttattaaactaggtttgtattgtacatgaggtacttcatgtgatatgttttggatttagtcatattggctttatttctaagatattctattgatttaatgtgacctgtttggtctcatcagaagtcttaccattgggcatttgaacagtgtgacaggtgttccaatggcctttatcaaaacatgtttaggaaaattggtactgtgataaatttgaatccaaaatccttttaactatgggttttcaactacatgtttcttcctagcggtctctataacaggaattgtgtagtatcttgtattttgtggaaaaaggagatggtagggattggttcaacatttgggtacttagaggataaagcttcgtggtcgtataaatttagatcatttggattgatttttatacacatagattttcaggactttaccttttgttttgtttttttccttttagccatcttatgttcttgtaatcccaactagataggctttatgctcacatcattgtcccatacccacccctttctcatccccatttgcaggggctaaaggtctagatgagacttggaaggcaaggagcatcgaaatttgagatacccaggaccctttcaagcaagaatggccaaaaagccttgtgctgtctttgctcttcaaattattttcagcctccttgtcatataatcatttcaggcaaactgaggcaacactaacagctaatgacccagatggctctatttgggtaatttacctacaacttattccaccagcctttactcctctgcccttttgtcaattttaccttataatcctttattaaatgatgggaggtggtgatcaggacaaaagtgttaggttcccatgatttctcatttcatttattaatagttaatgctgaatttttttttaagtttcctctggctctatttatgttactttttgcgataagaacacttaacataagtattctctcctcttggcaatttttttttttttcctgtgttgcccaggctgacctccaactcctgggcccaagcaatcctgcctcagcctgccaagtagctaggactacaggcgttcaccactgcgcccgcaaagttttttggttgtttttttttttaagttggtactcacaaatcactacctctgttatattgacaagctctatttcctattctttgtatctgttaagtcacatctgtgtaaacattgagctcaccttttatatattaacctctagaattaatgggcctatgtggttttttttcagtcttatagctggtgttctgtaaaagatttgtccaataaacgacttaatgaatgatacatcagtcagattttaggaaggcagtcaattatggatattttaatgttggaagaggccttaatgatcaaatctcaccctttctgcttctgaagtatgaaaatctagtctttttaggactggacacaaggaaaataatctctaaactattgactaaattccagtgagagtatgaatgaagaacaactagatattaatgtcaatcatttaagattaatgggcatgcaattaagtctccatttaagattaatgggcatgcaatgaagtctccagcagacaatcagatgttgttggatgtctagattatataggtttaggttgaagttataaaataaaataaaattcattttccactggaactctatgacattcagtggagtggtggaaagttaacctcttatacattatagataattctaagacagcacacaaacttatcaataaagccatctccttgtgggccttaccatcttcatcagatttagacccttaaaaaacaagtaaatatgcacttttaaaatgcaatcaaaagactggtggttaagcttgtaaaaccagaacatcttttggcattccactaagtatatattgtaaatttaatgaacaatcaaggttcacaataggaagttgtctttttttgccttccattctgtgagatttgacagatggtgacaataagaaaatgagctgattgtaattactctctgtgtgtttttttattgctagctatcattaccagttagaattaacattaattacaattaacaataattttaggtatggaatgttatgattacctaaagagatgtctctacctaatgagctcaagtgatcctcccacctcagcctaccaagtagccaggaccacaggcaagtgcaccaccatgactggctagttttgttttttggttttggtttttggtttttggtttttttttttgggttggttggttgttttttacaggcggggtctcactatatggtccaggctagaagaattttctaatggtctattacacctcccgtttgggcaagtaaattcagaataattttaggttcttttgttattcagtagttttgcagacttaaaagtgtaaatttagaattagaagatgaagctatagtagtaagaatctcaagttgaagggcttgggggagccaaagcagcatattagagcataggcttgaacttaaatctcagctcagtcacctgcaggactttaggcaccagtgatttcacccttctgagcctgtttctttattcgtaaaatgattataataattctttcacagcgttgtgaggattaagtgaaatgtgttaaatgcctactacagtaggtgctcagatatttatttttatttttttattatgcacattgtttttcctgcctttttatggctgtctaaagtctagggaaaagggaagactggttaatgatgagtagaaaaaacttgtaagctaatcattcactgacttattttccttccattttctggtttttaaaattagccacaccacaggaaacccacatttttagatggaaagagcaagaaaattgtgtcagtgctcttagttattttcatcttaatggtatagtgaaaagacattgacttgagatgatactaaggaagctttggctcactctcacttgaagaggggatcttggtgttgtagtacttggactgtacaaatgttttactgacttttcttactgctgtaaaggaatcaggcagttgggtattgatatgttatttggtgctctcattcatggcaaaggatttgataaataaaagttctttaaacactaaagcaaaatcaaatgagcaaaactaaggatgaaatgtaatattcatcagaacaaggatcactgagaaaaaatattcagaaacaactttaataaaacctgaattgaaataactgca

SEQ ID NO: 294983 - DNA, 3687 bp, Homo sapiens
aaaaataactggcttctctgcaggaatccagagtttctgtaaggacttggtggaggtggctgacattttggagaagactacagagtgcatttctgaagaatcggagcctgaggaccaaaagctcactctggagaaggtcttccgagggttgttgcttttagaagcaaagctgaaaagtgtgtttgccaagcatggcctggagaaactgacacccattggtgacaaatatgacccccatgagcatgaactcatctgtcatgtgccagctggtgttggggtgcagcctggcaccgtggcattagtaagacaagatggctacaaacttcatggccgcaccattaggcttgcccgagtggaagtggcagtggagtctcagagaagactgtgaagaggccatcaggaactggatgttctcccagagcgcagtcacctatgtttcttttatttattaaactaggtttgtattgtacatgaggtacttcatgtgatatgttttggatttagtcatattggctttatttctaagatattctattgatttaatgtgacctgtttggtctcatcagaagtcttaccattgggcatttgaacagtgtgacaggtgttccaatggcctttatcaaaacatgtttaggaaaattggtactgtgataaatttgaatccaaaatccttttaactatgggttttcaactacatgtttcttcctagcggtctctataacaggaattgtgtagtatcttgtattttgtggaaaaaggagatggtagggattggttcaacatttgggtacttagaggataaagcttcgtggtcgtataaatttagatcatttggattgatttttatacacatagattttcaggactttaccttttgttttgtttttttccttttagccatcttatgttcttgtaatcccaactagataggctttatgctcacatcattgtcccatacccacccctttctcatccccatttgcaggggctaaaggtctagatgagacttggaaggcaaggagcatcgaaatttgagatacccaggaccctttcaagcaagaatggccaaaaagccttgtgctgtctttgctcttcaaattattttcagcctccttgtcatataatcatttcaggcaaactgaggcaacactaacagctaatgacccagatggctctatttgggtaatttacctacaacttattccaccagcctttactcctctgcccttttgtcaattttaccttataatcctttattaaatgatgggaggtggtgatcaggacaaaagtgttaggttcccatgatttctcatttcatttattaatagttaatgctgaatttttttttaagtttcctctggctctatttatgttactttttgcgataagaacacttaacataagtattctctcctcttggcaatttttttttttttcctgtgttgcccaggctgacctccaactcctgggcccaagcaatcctgcctcagcctgccaagtagctaggactacaggcgttcaccactgcgcccgcaaagttttttggttgtttttttttttaagttggtactcacaaatcactacctctgttatattgacaagctctatttcctattctttgtatctgttaagtcacatctgtgtaaacattgagctcaccttttatatattaacctctagaattaatgggcctatgtggttttttttcagtcttatagctggtgttctgtaaaagatttgtccaataaacgacttaatgaatgatacatcagtcagattttaggaaggcagtcaattatggatattttaatgttggaagaggccttaatgatcaaatctcaccctttctgcttctgaagtatgaaaatctagtctttttaggactggacacaaggaaaataatctctaaactattgactaaattccagtgagagtatgaatgaagaacaactagatattaatgtcaatcatttaagattaatgggcatgcaattaagtctccatttaagattaatgggcatgcaatgaagtctccagcagacaatcagatgttgttggatgtctagattatataggtttaggttgaagttataaaataaaataaaattcattttccactggaactctatgacattcagtggagtggtggaaagttaacctcttatacattatagataattctaagacagcacacaaacttatcaataaagccatctccttgtgggccttaccatcttcatcagatttagacccttaaaaaacaagtaaatatgcacttttaaaatgcaatcaaaagactggtggttaagcttgtaaaaccagaacatcttttggcattccactaagtatatattgtaaatttaatgaacaatcaaggttcacaataggaagttgtctttttttgccttccattctgtgagatttgacagatggtgacaataagaaaatgagctgattgtaattactctctgtgtgtttttttattgctagctatcattaccagttagaattaacattaattacaattaacaataattttaggtatggaatgttatgattacctaaagagatgtctctacctaatgagctcaagtgatcctcccacctcagcctaccaagtagccaggaccacaggcaagtgcaccaccatgactggctagttttgttttttggttttggtttttggtttttggtttttttttttgggttggttggttgttttttacaggcggggtctcactatatggtccaggctagaagaattttctaatggtctattacacctcccgtttgggcaagtaaattcagaataattttaggttcttttgttattcagtagttttgcagacttaaaagtgtaaatttagaattagaagatgaagctatagtagtaagaatctcaagttgaagggcttgggggagccaaagcagcatattagagcataggcttgaacttaaatctcagctcagtcacctgcaggactttaggcaccagtgatttcacccttctgagcctgtttctttattcgtaaaatgattataataattctttcacagcgttgtgaggattaagtgaaatgtgttaaatgcctactacagtaggtgctcagatatttatttttatttttttattatgcacattgtttttcctgcctttttatggctgtctaaagtctagggaaaagggaagactggttaatgatgagtagaaaaaacttgtaagctaatcattcactgacttattttccttccattttctggtttttaaaattagccacaccacaggaaacccacatttttagatggaaagagcaagaaaattgtgtcagtgctcttagttattttcatcttaatggtatagtgaaaagacattgacttgagatgatactaaggaagctttggctcactctcacttgaagaggggatcttggtgttgtagtacttggactgtacaaatgttttactgacttttcttactgctgtaaaggaatcaggcagttgggtattgatatgttatttggtgctctcattcatggcaaaggatttgataaataaaagttctttaaacactaaagcaaaatcaaatgagcaaaactaaggatgaaatgtaatattcatcagaacaaggatcactgagaaaaaatattcagaaacaactttaataaaacctgaattgaaataactgca

SEQ ID NO: 294984 - DNA, 4543 bp, Homo sapiens
  misc_feature (4543)..(4543): n is a, c, g, or t
agcgttcctgtccggaagtcctgagagggaaacgcccgcaaaggctggtttttaagcgggagcatctcttcactcgcagcaagtgcgcgtgcgctgcctctcagcccaaattggaaacatggccgtacggtcgctgtgggcgggccggctgcgggtgcagcgcctactggcctggagtgccgcgtgggagagcaagggatggccgcttccattcagcactgccacccagagaactgctggtgaggactgccgttctgaggaccctcctgatgagcttgggccccctcttgctgaacgagccttaagggtaaaagctgttaaactggagaaagaagtccaagatttaacagtgagataccagagagctatagctgattgtgaaaacataaggaggcgaacccagagatgtgtggaagacgccaagatatttggaatccagagtttctgtaaggacttggtggaggtggctgacattttggagaagactacagagtgcatttctgaagaatcggagcctgaggaccaaaagctcactctggagaaggtcttccgagggttgttgcttttagaagcaaagctgaaaagtgtgtttgccaagcatggcctggagaaactgacacccattggtgacaaatatgacccccatgagcatgaactcatctgtcatgtgccagctggtgttggggtgcagcctggcaccgtggcattagtaagacaagatggctacaaacttcatggccgcaccattaggcttgcccgagtggaagtggcagtggagtctcagagaagactgtgaagaggccatcaggaactggatgttctcccagagcgcagtcacctatgtttcttttatttattaaactaggtttgtattgtacatgaggtacttcatgtgatatgttttggatttagtcatattggctttatttctaagatattctattgatttaatgtgacctgtttggtctcatcagaagtcttaccattgggcatttgaacagtgtgacaggtgttccaatggcctttatcaaaacatgtttaggaaaattggtactgtgataaatttgaatccaaaatccttttaactatgggttttcaactacatgtttcttcctagcggtctctataacaggaattgtgtagtatcttgtattttgtggaaaaaggagatggtagggattggttcaacatttgggtacttagaggataaagcttcgtggtcgtataaatttagatcatttggattgatttttatacacatagattttcaggactttaccttttgttttgtttttttccttttagccatcttatgttcttgtaatcccaactagataggctttatgctcacatcattgtcccatacccacccctttctcatccccatttgcaggggctaaaggtctagatgagacttggaaggcaaggagcatcgaaatttgagatacccaggaccctttcaagcaagaatggccaaaaagccttgtgctgtctttgctcttcaaattattttcagcctccttgtcatataatcatttcaggcaaactgaggcaacactaacagctaatgacccagatggctctatttgggtaatttacctacaacttattccaccagcctttactcctctgcccttttgtcaattttaccttataatcctttattaaatgatgggaggtggtgatcaggacaaaagtgttaggttcccatgatttctcatttcatttattaatagttaatgctgaatttttttttaagtttcctctggctctatttatgttactttttgcgataagaacacttaacataagtattctctcctcttggcaatttttttttttttcctgtgttgcccaggctgacctccaactcctgggcccaagcaatcctgcctcagcctgccaagtagctaggactacaggcgttcaccactgcgcccgcaaagttttttggttgtttttttttttaagttggtactcacaaatcactacctctgttatattgacaagctctatttcctattctttgtatctgttaagtcacatctgtgtaaacattgagctcaccttttatatattaacctctagaattaatgggcctatgtggttttttttcagtcttatagctggtgttctgtaaaagatttgtccaataaacgacttaatgaatgatacatcagtcagattttaggaaggcagtcaattatggatattttaatgttggaagaggccttaatgatcaaatctcaccctttctgcttctgaagtatgaaaatctagtctttttaggactggacacaaggaaaataatctctaaactattgactaaattccagtgagagtatgaatgaagaacaactagatattaatgtcaatcatttaagattaatgggcatgcaattaagtctccatttaagattaatgggcatgcaatgaagtctccagcagacaatcagatgttgttggatgtctagattatataggtttaggttgaagttataaaataaaataaaattcattttccactggaactctatgacattcagtggagtggtggaaagttaacctcttatacattatagataattctaagacagcacacaaacttatcaataaagccatctccttgtgggccttaccatcttcatcagatttagacccttaaaaaacaagtaaatatgcacttttaaaatgcaatcaaaagactggtggttaagcttgtaaaaccagaacatcttttggcattccactaagtatatattgtaaatttaatgaacaatcaaggttcacaataggaagttgtctttttttgccttccattctgtgagatttgacagatggtgacaataagaaaatgagctgattgtaattactctctgtgtgtttttttattgctagctatcattaccagttagaattaacattaattacaattaacaataattttaggtatggaatgttatgattacctaaagagatgtctctacctaatgagctcaagtgatcctcccacctcagcctaccaagtagccaggaccacaggcaagtgcaccaccatgactggctagttttgttttttggttttggtttttggtttttggtttttttttttgggttggttggttgttttttacaggcggggtctcactatatggtccaggctagaagaattttctaatggtctattacacctcccgtttgggcaagtaaattcagaataattttaggttcttttgttattcagtagttttgcagacttaaaagtgtaaatttagaattagaagatgaagctatagtagtaagaatctcaagttgaagggcttgggggagccaaagcagcatattagagcataggcttgaacttaaatctcagctcagtcacctgcaggactttaggcaccagtgatttcacccttctgagcctgtttctttattcgtaaaatgattataataattctttcacagcgttgtgaggattaagtgaaatgtgttaaatgcctactacagtaggtgctcagatatttatttttatttttttattatgcacattgtttttcctgcctttttatggctgtctaaagtctagggaaaagggaagactggttaatgatgagtagaaaaaacttgtaagctaatcattcactgacttattttccttccattttctggtttttaaaattagccacaccacaggaaacccacatttttagatggaaagagcaagaaaattgtgtcagtgctcttagttattttcatcttaatggtatagtgaaaagacattgacttgagatgatactaaggaagctttggctcactctcacttgaagaggggatcttggtgttgtagtacttggactgtacaaatgttttactgacttttcttactgctgtaaaggaatcaggcagttgggtattgatatgttatttggtgctctcattcatggcaaaggatttgataaataaaagttctttaaacactaaagcaaaatcaaatgagcaaaactaaggatgaaatgtaatattcatcagaacaaggatcactgagaaaaaatattcagaaacaactttaataaaacctgaattgaaataactgcacaaaaaaaaaaaaaaaaaaaaaaaaaaaaaccgtgtggggggcggccgcgggccccggaaaagagtttccgagaaacccatcgcgtggggggcgcgggggccccaggagggtaagggagaaaacggggcccaaaagcggtgttccccgagagggaaaccgcgggaccaggaaccagaggggcggggattctccccccaataaaaaaagcgcccggggggacaaccggaagggttctcggaaccaaattccgcaagagggaaaaccggagggcacaaaacgcgggaggcttatacacacacggggagcgcccaaaaggagggcccgaatatttaaaatttacgcccggggacgcggcgggaggaacacgcacacagagagagagagaaacaaacggacgaaaaagagcacgagacaaacaaccaaaacaaccacccaacacaaaggggn

SEQ ID NO: 294985 - DNA, 906 bp, Homo sapiens
  misc_feature (5)..(5): n is a, c, g, or t
tcctntgccatgaatgagagcaccaaataacatatcaatacccaactgcctgattcctttacagcagtaagaaaagtcagtaaaacatttgtacagtccaagtactacaacaccaagatcccctcttcaagtgagagtgagccaaagcagcatattagagcataggcttgaacttaaatctcagctcagtcacctgcaggactttaggcaccagtgatttcacccttctgagcctgtttctttattcgtaaaatgattataataattctttcacagcgttgtgaggattaagtgaaatgtgttaaatgcctactacagtaggtgctcagatatttatttttatttttttattatgcacattgtttttcctgcctttttatggctgtctaaagtctagggaaaagggaagactggttaatgatgagtagaaaaaacttgtaagctaatcattcactgacttattttccttccattttctggtttttaaaattagccacaccacaggaaacccacatttttagatggaaagagcaagaaaattgtgtcagtgctcttagttattttcatcttaatggtatagtgaaaagacattgacttgagatgatactaaggaagctttggctcactctcacttgaagaggggatcttggtgttgtagtacttggactgtacaaatgttttactgacttttcttactgctgtaaaggaatcaggcagttgggtattgatatgttatttggtgctctcattcatggcaaaggatttgataaataaaagttctttaaacactaaagcaaaatcaaatgagcaaaactaaggatgaaatgtaatattcatcagaacaaggatcactgagaaaaaatattcagaaacaactttaataaaacctgaattgaaataactgca

SEQ ID NO: 294986 - DNA, 455 bp, Homo sapiens
agcgttcctgtccggaagtcctgagagggaaacgcccgcaaaggctggtttttaagcgggagcatctcttcactcgcagcaagtgcgcgtgcgctgcctctcagcccaaattggaaacatggccgtacggtcgctgtgggcgggccggctgcgggtgcagcgcctactggcctggagtgccgcgtgggagagcaagggatggccgcttccattcagcactgccacccagagaactgctggtgaggactgccgttctgaggaccctcctgatgagcttgggccccctcttgctgaacgagccttaagggtaaaagctgttaaactggagaaagaagtccaagatttaacagtgagataccagagagctatagctgattgtgaaaacataaggaggcgaacccagagatgtgtggaagacgccaagatatttggtgagagatttatttacaataaaa

SEQ ID NO: 294987 - DNA, 510 bp, Homo sapiens
aactccaccttccgggctcaagtgatcctcccgcctcagcctcccaagtggctgggattacaggcgcctgccacgacgcccggctaacttttgtacttttagtagagacggggtttcaccacgttggccaagcaggtctcgaactcctgatctcaggtgatcccccacctcggcctccgaaagtgctgggattacaggtgtgagccaccgcgtccggccaacatgcttctttagttacttatagaacctgccacatcattagttcaactacaaactgctgcttacatgaccgaagttgtgcaaagggtccaaagttgtgcaagagtaaccactgaaatcagactctggtatattaatagttgcaacatctaaacaatctttatgtttattattagattcaaagtaatgccaaatcacaggtattaaaaatatctacgaagagtctgtttacttttctgtgaaatatactaggacgtcattttaagtgagaataactgaatttctttcagc

SEQ ID NO: 294988 - DNA, 209 bp, Homo sapiens
gcccatattcacccaggaaattcataccacacatgagagtttttcagtgggtgcattaaataccatccccctgcacacacctcccggaatcacctagtccagacctaccgaatcaggacctgtgagagtcagcacattttctaagctctttgggtaattctgatatgatttttaaaaatttgagagtcactggtttgtgctcaggcccc

SEQ ID NO: 294989 - DNA, 891 bp, Homo sapiens
acgcctgcgcagtaagtaagcctgccagacacgctgtggcggctgcctgaagctagtgagtcgcggcgccgcgcacttgtggttgggtcagtgccgcgcgccgctcggtcgttaccgcgaggcgctggtggccttcaggctggacggcgcgggtcagccctggtttgccggcttctgggtctttgaacagccgcgatgtcgatcttcacccccaccaaccagatccgcctaaccaatgtggccgtggtacggatgaagcgcgccaggaagcgcttcgaaatcgcctgctacagaaacaaggtcgtcggctggcggagcggcttggaaaaagaccttgatgaagttctgcagacccactcagtgtttgtaaatgtttcctaaggtcaggttgccaagaaggaagatctcatcagtgcgtttggaacagatgaccaaactgaaatctattttgactaaaggagaagttcaagtatcagataaagacacacacaactggagcagatgtttagggacattgcaattattgtggcagacaaatgtgtgactcctgaaacaaagagaccatacaccgtgatccttattgagagagccatgaaggacatccactatttggtgaaaaccaacaggagtacaaaacagcaggctttggaagtgataaagcagttaaaagagaaaatgaagatagaacgtgctcacatgaggcttcagttcatccttccagtgaatgaaggcaagaagctgaaagaaaagctcaagccactgatcaaggcatagaaagtaaagattatggccaacagttagaaatcgtaagagtcaaatattttctttgcttcatgttacctaaatattgtattctctagtaataaatttgtagcaaacattcagacattg

SEQ ID NO: 294990 - DNA, 1628 bp, Homo sapiens
acgcctgcgcagtaagtaagcctgccagacacgctgtggcggctgcctgaagctagtgagtcgcggcgccgcgcacttgtggttgggtcagtgccgcgcgccgctcggtcgttaccgcgaggcgctggtggccttcaggctggacggcgcgggtcagccctggtttgccggcttctgggtctttgaacagccgcgatgtcgatcttcacccccaccaaccagatccgcctaaccaatgtggccgtggtacggatgaagcgcgccaggaagcgcttcgaaatcgcctgctacagaaacaaggtcgtcggctggcggagcggcttggaaaaagaccttgatgaagttctgcagacccactcagtgtttgtaaatgtttcctaaggtcaggttgccaagaaggaagatctcatcagtgcgtttggaacagatgaccaaactgaaatctattttgactaaaggagaagttcaagtatcagataaagacacacacaactggagcagatgtttagggacattgcaattattgtggcagacaaatgtgtgactcctgaaacaaagagaccatacaccgtgatccttattgagagagccatgaaggacatccactatttggtgaaaaccaacaggagtacaaaacagcaggctttggaagtgataaagcagttaaaagagaaaatgaagatagaacgtgctcacatgaggcttcagttcatccttccagtgaatgaaggcaagaagctgaaagaaaagctcaagccactgatcaaggcatagaaagtaaagattatggccaacagttagaaatcgtatgtctgattgacctgggctgcttccgagaaattgatgagctaataaaaaaggaaaccaaaggcaaaggttctttggaagtactcaatctgaaagatttgaagaaggagatgagaaatttgaatgacacccatcagtctcttcacctctaaaacactaaagtgttttcgtttccaacagcactgtttcatgtctgtggtctgccaaatacttgctcaaactatttgacattttctatctttgtgttaacagtggacacagcaaggctttcctacataagtataataatgtgggaatgatttggttttaattataaactggggtctaaatcctaaagcaaaattgaaactccaggatgcaaaatccagagtggcattttgctactttgtctcatgccttgatagctttccaaaatgaaagttacttgaggcagctcttgtgggtgaaaagttttttgtacagtagagtaagattattaggggtatgtctatacgacaaaaggggggtctttcctaaaaaagaaaacatgatgcttcatttctacttaatggaacttgtgttctgagggtcattatggtatcgtaatataaagcttggatgatgttcctgattatctgagaaacagatatagaaaaattgtgtcggacttaaataattttcgttgaacatgctgccataacttagattattcttggttaaaaaataaaagtcacttatttctaattcttaaagtttataatatatattaatatagctaaaattgtatgtaatcaataaaaccactcttatgtttattaaactatggcttgtgtttctagaca

SEQ ID NO: 294991 - DNA, 1506 bp, Homo sapiens
acgcctgcgcagtaagtaagcctgccagacacgctgtggcggctgcctgaagctagtgagtcgcggcgccgcgcacttgtggttgggtcagtgccgcgcgccgctcggtcgttaccgcgaggcgctggtggccttcaggctggacggcgcgggtcagccctggtttgccggcttctgggtctttgaacagccgcgatgtcgatcttcacccccaccaaccagatccgcctaaccaatgtggccgtggtacggatgaagcgcgccaggaagcgcttcgaaatcgcctgctacagaaacaaggtcgtcggctggcggagcggcttattttgactaaaggagaagttcaagtatcagataaagacacacacaactggagcagatgtttagggacattgcaattattgtggcagacaaatgtgtgactcctgaaacaaagagaccatacaccgtgatccttattgagagagccatgaaggacatccactatttggtgaaaaccaacaggagtacaaaacagcaggctttggaagtgataaagcagttaaaagagaaaatgaagatagaacgtgctcacatgaggcttcagttcatccttccagtgaatgaaggcaagaagctgaaagaaaagctcaagccactgatcaaggcatagaaagtaaagattatggccaacagttagaaatcgtatgtctgattgacctgggctgcttccgagaaattgatgagctaataaaaaaggaaaccaaaggcaaaggttctttggaagtactcaatctgaaagatttgaagaaggagatgagaaatttgaatgacacccatcagtctcttcacctctaaaacactaaagtgttttcgtttccaacagcactgtttcatgtctgtggtctgccaaatacttgctcaaactatttgacattttctatctttgtgttaacagtggacacagcaaggctttcctacataagtataataatgtgggaatgatttggttttaattataaactggggtctaaatcctaaagcaaaattgaaactccaggatgcaaaatccagagtggcattttgctactttgtctcatgccttgatagctttccaaaatgaaagttacttgaggcagctcttgtgggtgaaaagttttttgtacagtagagtaagattattaggggtatgtctatacgacaaaaggggggtctttcctaaaaaagaaaacatgatgcttcatttctacttaatggaacttgtgttctgagggtcattatggtatcgtaatataaagcttggatgatgttcctgattatctgagaaacagatatagaaaaattgtgtcggacttaaataattttcgttgaacatgctgccataacttagattattcttggttaaaaaataaaagtcacttatttctaattcttaaagtttataatatatattaatatagctaaaattgtatgtaatcaataaaaccactcttatgtttattaaactatggcttgtgtttctagaca

SEQ ID NO: 294992 - DNA, 1821 bp, Homo sapiens
acgcctgcgcagtaagtaagcctgccagacacgctgtggcggctgcctgaagctagtgagtcgcggcgccgcgcacttgtggttgggtcagtgccgcgcgccgctcggtcgttaccgcgaggcgctggtggccttcaggctggacggcgcgggtcagccctggtttgccggcttctgggtctttgaacagccgcgatgtcgatcttcacccccaccaaccagatccgcctaaccaatgtggccgtggtacggatgaagcgcgccaggaagcgcttcgaaatcgcctgctacagaaacaaggtcgtcggctggcggagcggcttgtgagtagccccctccctcgggcctgggcctgggcctgagccgtcacctccgaggcggcctgtctctgcccaagtcgagtgaatgggccaggctggggtgtttgttggcccgggaggaaatggaacattcctgctgtgagcatgagacgtcgctgtccgagcttggcgcctaagccaagggtttctttatttgggaaaaagaccttgatgaagttctgcagacccactcagtgtttgtaaatgtttcctaaggtcaggttgccaagaaggaagatctcatcagtgcgtttggaacagatgaccaaactgaaatctattttgactaaaggagaagttcaagtatcagataaagacacacacaactggagcagatgtttagggacattgcaattattgtggcagacaaatgtgtgactcctgaaacaaagagaccatacaccgtgatccttattgagagagccatgaaggacatccactatttggtgaaaaccaacaggagtacaaaacagcaggctttggaagtgataaagcagttaaaagagaaaatgaagatagaacgtgctcacatgaggcttcagttcatccttccagtgaatgaaggcaagaagctgaaagaaaagctcaagccactgatcaaggcatagaaagtaaagattatggccaacagttagaaatcgtatgtctgattgacctgggctgcttccgagaaattgatgagctaataaaaaaggaaaccaaaggcaaaggttctttggaagtactcaatctgaaagatttgaagaaggagatgagaaatttgaatgacacccatcagtctcttcacctctaaaacactaaagtgttttcgtttccaacagcactgtttcatgtctgtggtctgccaaatacttgctcaaactatttgacattttctatctttgtgttaacagtggacacagcaaggctttcctacataagtataataatgtgggaatgatttggttttaattataaactggggtctaaatcctaaagcaaaattgaaactccaggatgcaaaatccagagtggcattttgctactttgtctcatgccttgatagctttccaaaatgaaagttacttgaggcagctcttgtgggtgaaaagttttttgtacagtagagtaagattattaggggtatgtctatacgacaaaaggggggtctttcctaaaaaagaaaacatgatgcttcatttctacttaatggaacttgtgttctgagggtcattatggtatcgtaatataaagcttggatgatgttcctgattatctgagaaacagatatagaaaaattgtgtcggacttaaataattttcgttgaacatgctgccataacttagattattcttggttaaaaaataaaagtcacttatttctaattcttaaagtttataatatatattaatatagctaaaattgtatgtaatcaataaaaccactcttatgtttattaaactatggcttgtgtttctagaca

SEQ ID NO: 294993 - DNA, 1330 bp, Homo sapiens
ggactttctctcctgccctcacaagggaaaaagaccttgatgaagttctgcagacccactcagtgtttgtaaatgtttcctaaggtcaggttgccaagaaggaagatctcatcagtgcgtttggaacagatgaccaaactgaaatctattttgactaaaggagaagttcaagtatcagataaagacacacacaactggagcagatgtttagggacattgcaattattgtggcagacaaatgtgtgactcctgaaacaaagagaccatacaccgtgatccttattgagagagccatgaaggacatccactatttggtgaaaaccaacaggagtacaaaacagcaggctttggaagtgataaagcagttaaaagagaaaatgaagatagaacgtgctcacatgaggcttcagttcatccttccagtgaatgaaggcaagaagctgaaagaaaagctcaagccactgatcaaggcatagaaagtaaagattatggccaacagttagaaatcgtatgtctgattgacctgggctgcttccgagaaattgatgagctaataaaaaaggaaaccaaaggcaaaggttctttggaagtactcaatctgaaagatttgaagaaggagatgagaaatttgaatgacacccatcagtctcttcacctctaaaacactaaagtgttttcgtttccaacagcactgtttcatgtctgtggtctgccaaatacttgctcaaactatttgacattttctatctttgtgttaacagtggacacagcaaggctttcctacataagtataataatgtgggaatgatttggttttaattataaactggggtctaaatcctaaagcaaaattgaaactccaggatgcaaaatccagagtggcattttgctactttgtctcatgccttgatagctttccaaaatgaaagttacttgaggcagctcttgtgggtgaaaagttttttgtacagtagagtaagattattaggggtatgtctatacgacaaaaggggggtctttcctaaaaaagaaaacatgatgcttcatttctacttaatggaacttgtgttctgagggtcattatggtatcgtaatataaagcttggatgatgttcctgattatctgagaaacagatatagaaaaattgtgtcggacttaaataattttcgttgaacatgctgccataacttagattattcttggttaaaaaataaaagtcacttatttctaattcttaaagtttataatatatattaatatagctaaaattgtatgtaatcaataaaaccactcttatgtttattaaactatggcttgtgtttctagaca

SEQ ID NO: 294994 - DNA, 1973 bp, Homo sapiens
tggaaagcgacgtagtcccagcacttggaaggctgaggcaggaggatggcttgagcttgggaggtggaggttacagtgagccgagatcacgccactgcactccagcctacacgacagagccaaaccccgactaaaaaaaagatttgaacagacacatcaccaaagaagacctacagagggaaaataagcacaaaaaaagatgctcaacatcataagtccttcgggaagtgcaaattaaaactacaatgagatatcattacatatctatcaggattgacaaagttttgtaggctggacggcgcgggtcagccctggtttgccggcttctgggtctttgaacagccgcgatgtcgatcttcacccccaccaaccagatccgcctaaccaatgtggccgtggtacggatgaagcgcgccaggaagcgcttcgaaatcgcctgctacagaaacaaggtcgtcggctggcggagcggcttgtgagtagccccctccctcgggcctgggcctgggcctgagccgtcacctccgaggcggcctgtctctgcccaagtcgagtgaatgggccaggctggggtgtttgttggcccgggaggaaatggaacattcctgctgtgagcatgagacgtcgctgtccgagcttggcgcctaagccaagggtttctttatttgggaaaaagaccttgatgaagttctgcagacccactcagtgtttgtaaatgtttcctaaggtcaggttgccaagaaggaagatctcatcagtgcgtttggaacagatgaccaaactgaaatctattttgactaaaggagaagttcaagtatcagataaagacacacacaactggagcagatgtttagggacattgcaattattgtggcagacaaatgtgtgactcctgaaacaaagagaccatacaccgtgatccttattgagagagccatgaaggacatccactatttggtgaaaaccaacaggagtacaaaacagcaggctttggaagtgataaagcagttaaaagagaaaatgaagatagaacgtgctcacatgaggcttcagttcatccttccagtgaatgaaggcaagaagctgaaagaaaagctcaagccactgatcaaggcatagaaagtaaagattatggccaacagttagaaatcgtatgtctgattgacctgggctgcttccgagaaattgatgagctaataaaaaaggaaaccaaaggcaaaggttctttggaagtactcaatctgaaagatttgaagaaggagatgagaaatttgaatgacacccatcagtctcttcacctctaaaacactaaagtgttttcgtttccaacagcactgtttcatgtctgtggtctgccaaatacttgctcaaactatttgacattttctatctttgtgttaacagtggacacagcaaggctttcctacataagtataataatgtgggaatgatttggttttaattataaactggggtctaaatcctaaagcaaaattgaaactccaggatgcaaaatccagagtggcattttgctactttgtctcatgccttgatagctttccaaaatgaaagttacttgaggcagctcttgtgggtgaaaagttttttgtacagtagagtaagattattaggggtatgtctatacgacaaaaggggggtctttcctaaaaaagaaaacatgatgcttcatttctacttaatggaacttgtgttctgagggtcattatggtatcgtaatataaagcttggatgatgttcctgattatctgagaaacagatatagaaaaattgtgtcggacttaaataattttcgttgaacatgctgccataacttagattattcttggttaaaaaataaaagtcacttatttctaattcttaaagtttataatatatattaatatagctaaaattgtatgtaatcaataaaaccactcttatgtttattaaactatggcttgtgtttctagaca

SEQ ID NO: 294995 - DNA, 1564 bp, Homo sapiens
acgcctgcgcagtaagtaagcctgccagacacgctgtggcggctgcctgaagctagtgagtcgcggcgccgcgcacttgtggttgggtcagtgccgcgcgccgctcggtcgttaccgcgaggcgctggtggccttcaggctggacggcgcgggtcagccctggtttgccggcttctgggtctttgaacagccgcgatgtcgatcttcacccccaccaaccagatccgcctaaccaatgtggccgtggtacggatgaagcgcgccaggaagcgcttcgaaatcgcctgctacagaaacaaggtcgtcggctggcggagcggcttgttgccaagaaggaagatctcatcagtgcgtttggaacagatgaccaaactgaaatctattttgactaaaggagaagttcaagtatcagataaagacacacacaactggagcagatgtttagggacattgcaattattgtggcagacaaatgtgtgactcctgaaacaaagagaccatacaccgtgatccttattgagagagccatgaaggacatccactatttggtgaaaaccaacaggagtacaaaacagcaggctttggaagtgataaagcagttaaaagagaaaatgaagatagaacgtgctcacatgaggcttcagttcatccttccagtgaatgaaggcaagaagctgaaagaaaagctcaagccactgatcaaggcatagaaagtaaagattatggccaacagttagaaatcgtatgtctgattgacctgggctgcttccgagaaattgatgagctaataaaaaaggaaaccaaaggcaaaggttctttggaagtactcaatctgaaagatttgaagaaggagatgagaaatttgaatgacacccatcagtctcttcacctctaaaacactaaagtgttttcgtttccaacagcactgtttcatgtctgtggtctgccaaatacttgctcaaactatttgacattttctatctttgtgttaacagtggacacagcaaggctttcctacataagtataataatgtgggaatgatttggttttaattataaactggggtctaaatcctaaagcaaaattgaaactccaggatgcaaaatccagagtggcattttgctactttgtctcatgccttgatagctttccaaaatgaaagttacttgaggcagctcttgtgggtgaaaagttttttgtacagtagagtaagattattaggggtatgtctatacgacaaaaggggggtctttcctaaaaaagaaaacatgatgcttcatttctacttaatggaacttgtgttctgagggtcattatggtatcgtaatataaagcttggatgatgttcctgattatctgagaaacagatatagaaaaattgtgtcggacttaaataattttcgttgaacatgctgccataacttagattattcttggttaaaaaataaaagtcacttatttctaattcttaaagtttataatatatattaatatagctaaaattgtatgtaatcaataaaaccactcttatgtttattaaactatggcttgtgtttctagaca

SEQ ID NO: 294996 - DNA, 921 bp, Homo sapiens
tggaaagcgacgtagtcccagcacttggaaggctgaggcaggaggatggcttgagcttgggaggtggaggttacagtgagccgagatcacgccactgcactccagcctacacgacagagccaaaccccgactaaaaaaaagatttgaacagacacatcaccaaagaagacctacagagggaaaataagcacaaaaaaagatgctcaacatcataagtccttcgggaagtgcaaattaaaactacaatgagatatcattacatatctatcaggattgacaaagttttgtaggctggacggcgcgggtcagccctggtttgccggcttctgggtctttgaacagccgcgatgtcgatcttcacccccaccaaccagatccgcctaaccaatgtggccgtggtacggatgaagcgcgccaggaagcgcttcgaaatcgcctgctacagaaacaaggtcgtcggctggcggagcggcttattttgactaaaggagaagttcaagtatcagataaagacacacacaactggagcagatgtttagggacattgcaattattgtggcagacaaatgtgtgactcctgaaacaaagagaccatacaccgtgatccttattgagagagccatgaaggacatccactatttggtgaaaaccaacaggagtacaaaacagcaggctttggaagtgataaagcagttaaaagagaaaatgaagatagaacgtgctcacatgaggcttcagttcatccttccagtgaatgaaggcaagaagctgaaagaaaagctcaagccactgatcaaggcatagaaagtaaagattatggccaacagttagaaatcgtaagagtcaaatattttctttgcttcatgttacctaaatattgtattctctagtaataaatttgtagcaaacattcagacattg

SEQ ID NO: 294997 - DNA, 329 bp, Homo sapiens
cctaatccaactacatggaaactactttgtttttgaaaaccttatgaaataatatagtagaagaaattgcattctcgattttgtcttggtaggctttggaagtgataaagcagttaaaagagaaaatgaagatagaacgtgctcacatgaggcttcagttcatccttccagtgaatgaaggcaagaagctgaaagaaaagctcaagccactgatcaaggcatagaaagtaaagattatggccaacagttagaaatcgtaagagtcaaatattttctttgcttcatgttacctaaatattgtattctctagtaataaatttgtagcaaac

SEQ ID NO: 294998 - DNA, 2107 bp, Homo sapiens
ggtgggggcggggtatggcgcgctgtgcggcgcagggcggctggcacaaacggcggcgccggggccggaggaaaaagctcgccaccctgaagggtcccttcccaagcccttagggaccgcagaggacttggggaccagcaagcaacccccagggcacgagaagagctcttgctgtctgccctgcctcaccctgccccacgccaggcccggtggcccccagctgcatcaagtggaggcggaggaggaggcggaggagggtggcaccatgggcccgggcggtgccctccatgcccgggggatgaagacactgctgccatggacagcccgtgccagccgcagcccctaagtcaggctctccctcagttaccagggtcttcgtcagagcccttggagcctgagcctggccgggccaggatgggagtggagagttacctgccctgtcccctgctcccctcctaccactgtccaggagtgcctagtgaggcctcggcagggagtgggacccccagagccacagccacctctaccactgccagccctcttcgggacggttttggcgggcaggatggtggtgagctgcggccgctgcagagtgaaggcgctgcagcgctggtcaccaaggggtgccagcgattggcagcccagggcgcacggcctgaggcccccaaacggaaatgggccgaggatggtggggatgccccttcacccagcaaacggccctgggccaggcaagagaaccaggaggcagagcgggagggtggcatgagctgcagctgcagcagtggcagtggtgaggccagtgctgggctgatggaggaggcgctgccctctgcgcccgagcgcctggccctggactatatcgtgccctgcatgcggtactacggcatctgcgtcaaggacagcttcctgggggcagcactgggcggtcgcgtgctggccgaggtggaggccctcaaacggggtgggcgcctgcgagacgggcagctagtgagccagagggcgatcccgccgcgcagcatccgtggggaccagattgcctgggtggaaggccatgaaccaggctgtcgaagcattggtgccctcatggcccatgtggacgccgtcatccgccactgcgcagggcggctgggcagctatgtcatcaacgggcgcaccaaggccatggtggcgtgttacccaggcaacgggctcgggtacgtaaggcacgttgacaatccccacggcgatgggcgctgcatcacctgtatctattacctgaatcagaactgggacgttaaggtgcatggcggcctgctgcagatcttccctgagggccggcccgtggtagccaacatcgagccactctttgaccggttgctcattttctggtctgaccggcggaacccccacgaggtgaagccagcctatgccaccaggtacgccatcactgtctggtattttgatgccaaggagcgggcagcagccaaagacaagtatcagctagcatcaggacagaaaggtgtccaagtacctgtatcacagccgcctacgcccacctagtggccagtcccagagccgcatggcagacagcttaaatgacttcaggagagccctgggcctgtgctggctgctccttccctgccaccgctgctgcttctgactttgcctctgtcctgcctggtgtggagggctctgtctgttgctgaggaccaaggaggagaagagacctttgctgccccatcatgggggctggggttgtcacctggacagggggcagccgtggaggccaccgttaccaactgaagctgggggcctgggtcctaccctgtctggtcatgaccccattaggtatggagagctgggaggaggcattgtcacttcccaccaggatgcaggacttggggttgaggtgagtcatggcctcttgctggcaatggggtgggaggagtacccccaagtcctctcactcctccagcctggaatgtgaagtgactccccaacccctttggccatggcaggcaccttttggactgggctgccactgcttgggcagagtaaaaggtgccaggaggagcatgggtgtggaagtcctgtcagccaagaaataaaagtttacctcagagctgca

SEQ ID NO: 294999 - DNA, 2089 bp, Homo sapiens
gctttcccctgcctgcctgtctctagtttctctcacatccctttttttttttcctttctctagccaccctgaagggtcccttcccaagcccttagggaccgcagaggacttggggaccagcaagcaacccccagggcacgagaagagctcttgctgtctgccctgcctcaccctgccccacgccaggcccggtggcccccagctgcatcaagtggaggcggaggaggaggcggaggagggtggcaccatgggcccgggcggtgccctccatgcccgggggatgaagacactgctgccatggacagcccgtgccagccgcagcccctaagtcaggctctccctcagttaccagggtcttcgtcagagcccttggagcctgagcctggccgggccaggatgggagtggagagttacctgccctgtcccctgctcccctcctaccactgtccaggagtgcctagtgaggcctcggcagggagtgggacccccagagccacagccacctctaccactgccagccctcttcgggacggttttggcgggcaggatggtggtgagctgcggccgctgcagagtgaaggcgctgcagcgctggtcaccaaggggtgccagcgattggcagcccagggcgcacggcctgaggcccccaaacggaaatgggccgaggatggtggggatgccccttcacccagcaaacggccctgggccaggcaagagaaccaggaggcagagcgggagggtggcatgagctgcagctgcagcagtggcagtggtgaggccagtgctgggctgatggaggaggcgctgccctctgcgcccgagcgcctggccctggactatatcgtgccctgcatgcggtactacggcatctgcgtcaaggacagcttcctgggggcagcactgggcggtcgcgtgctggccgaggtggaggccctcaaacggggtgggcgcctgcgagacgggcagctagtgagccagagggcgatcccgccgcgcagcatccgtggggaccagattgcctgggtggaaggccatgaaccaggctgtcgaagcattggtgccctcatggcccatgtggacgccgtcatccgccactgcgcagggcggctgggcagctatgtcatcaacgggcgcaccaaggccatggtggcgtgttacccaggcaacgggctcgggtacgtaaggcacgttgacaatccccacggcgatgggcgctgcatcacctgtatctattacctgaatcagaactgggacgttaaggtgcatggcggcctgctgcagatcttccctgagggccggcccgtggtagccaacatcgagccactctttgaccggttgctcattttctggtctgaccggcggaacccccacgaggtgaagccagcctatgccaccaggtacgccatcactgtctggtattttgatgccaaggagcgggcagcagccaaagacaagtatcagctagcatcaggacagaaaggtgtccaagtacctgtatcacagccgcctacgcccacctagtggccagtcccagagccgcatggcagacagcttaaatgacttcaggagagccctgggcctgtgctggctgctccttccctgccaccgctgctgcttctgactttgcctctgtcctgcctggtgtggagggctctgtctgttgctgaggaccaaggaggagaagagacctttgctgccccatcatgggggctggggttgtcacctggacagggggcagccgtggaggccaccgttaccaactgaagctgggggcctgggtcctaccctgtctggtcatgaccccattaggtatggagagctgggaggaggcattgtcacttcccaccaggatgcaggacttggggttgaggtgagtcatggcctcttgctggcaatggggtgggaggagtacccccaagtcctctcactcctccagcctggaatgtgaagtgactccccaacccctttggccatggcaggcaccttttggactgggctgccactgcttgggcagagtaaaaggtgccaggaggagcatgggtgtggaagtcctgtcagccaagaaataaaagtttacctcagagctgca

SEQ ID NO: 295000 - DNA, 3917 bp, Homo sapiens
gtgggacagtcacaggcttctgactggggtgtgtgtgtagtgggggtggggctcttggcaggcagattgtcaccaatagcctttaagtctttggtctcctggccctggtcccacctgtccctcccctaggtgggaggggtggagagcaagtttcctgaggccttcccctgtgagggcaggaagtagatactttccttggggccagaggatgctttcacccccaaggtgtgtatatgtgggggaagggtggggccctaaagagcaggttcctgtttctgtgtgagtcccatgtgcttggtgggaggcgctgtgtgagaatgtacagggcaggaggaaacatagcagggctggggtgcagaggaggcccagagcagtgcactccagtctgcaggtactgcactgggcactggggagaccaacctggccccaggggcttccctgtggctgccttccagggcagtactaggtaaacaggtgcctgtgctgatgccatgttgctaggagtggaacggacaatcagccggagtactcaaggtgacccttggtctctgaatcctgaataacaaagagggtcagaaggaagagtgtcccaggccagtgctgaggccttgtggtggcgatgagctcagcctgttgaggcatggagcagagtgatgggagaggcacatgaggttgggggcctttgaggctgtggttgggaatttgtattttctcaggatggagtgaagacctggagaggaggggctctggctgctgtgtggggatgaattgtgggaagagggtgcagcactggaccccttccctgccacccatccacgtgcatcatcagtgtaatctctgattggattcctaattggggaggtcttgcccatctctagtcagtaactcactgtttctaagcctcctggaccatggcccaattcttctcccagtgaggtggttgctcagagtgccgacccttccatagggagtgagcagtgcaaagaaggtgccccctcctgaaccttgaagtgtagccattagggttttccctggggggccttctcactaattgtactctggtgctgccagagagaaggttgtcagcttcccactgctaggtggcagtagatggtggcagccctctctttccagggcaaggtctggtggatgaggtgcacatggttaatgcagagcagcttaacatccaccacagagggtgagccctgggataatgtgttgggaggcgtcctggggagggtgaggattgaagcagcccagtctgctgtggcgtgcgtgcttggcaagcatcctgttgtggcagtggccactgatgtttgatcgtgaatgtttatcttgggactgtcttgctgggccgggcccataggtgtagctgagcattcgtggggaatggacgccagcagagttgtaccagggcagagaggtcagggcagagaggtcaagacagatggtccgggctggggagaagttgaagggtccttgtgccagtcctcccctttttgtgtgctacctcatcttgccactgcagtgactttgggcagagggtgggacagggaccttttaaaatttttaaatggcatttcagcctgtgctccagttctccatgtggcaggcactgtgctggctgtcttcccagacacttgttatcttgttcacttgttccacaacaacctgtgaaatagctgtgagctccattggatccatggatgaggaacctgagaccaggaagtcacctgcctgatgccacagctcatgtggcagcactgagacttgaaccagggaattgtgtctgcagaagtggctgggccatttcctttacctctcagccacctttctgccagctccctgatgacaaacatcccggggccctggccacagcattgtagggctgggtcaggggagtggcaactgtcaggcagaggaaagaaccctgtagacagagaaaccaagccctgcaatgagtcctgttagatctccaggagttggggctccagaacctcccaagttatgttctcagagagattaattgctaccgctgtaaacagcagtgtttattacccctgctgtacacatcaggcagttgaggcccattcaggtgttggaactggctagggttacccagcaaattatccttggagttggaattaggtctttctattcagactgtagcttttggctcctgttcggaggtctatgggacagataatttagtggggattctttgtagtccagggcagcagttcttaacattgctgcatggtagaattacctgggaagctttaccaatttcaggcccttccttaggccaggtacttcagaacctcagagctccccagggggctccactccacagccaagggtaagaattcctggtctagggctgtgaggccacctccttgcacacctgaaaatgtttaaattggtattattctactgaaatggctgaggtggggtttggggtatcttgaaacaaatcaaactctgttactaattgagccctagctgggtgccaggccccaggtatgtgtgttgggagggagtgggctcttgaggcccaggagctgaggtttctgatagacttggggatgggattttggctgaaaaagaaagtcttttggggcaggagcttggaacccttgacccaaggagtcatggggaagatggggcaaggaggggtgggaaaataggtaattcatggctgcttctctaagatgtgcctgcctagccccagtaaacctacctccctccatccctgccaggccatggtggcgtgttacccaggcaacgggctcgggtacgtaaggcacgttgacaatccccacggcgatgggcgctgcatcacctgtatctattacctgaatcagaactgggacgttaaggtgcatggcggcctgctgcagatcttccctgagggccggcccgtggtagccaacatcgagccactctttgaccggttgctcattttctggtctgaccggcggaacccccacgaggtgaagccagcctatgccaccaggtatgacctgtacttctggagacgcacccaggtgctccccctgtgacaatgtcctgtcagagcctcagagtgactagggagcgacgaagtattgagagggggcctaggtgggagcagaaccgggtggctcaaaaggatggccgcctagtgtgtgtggatatggtagctggaattgcagaaaactaatgtccaaccaccctggtctccaggtacgccatcactgtctggtattttgatgccaaggagcgggcagcagccaaagacaagtatcagctagcatcaggacagaaaggtgtccaagtacctgtatcacagccgcctacgcccacctagtggccagtcccagagccgcatggcagacagcttaaatgacttcaggagagccctgggcctgtgctggctgctccttccctgccaccgctgctgcttctgactttgcctctgtcctgcctggtgtggagggctctgtctgttgctgaggaccaaggaggagaagagacctttgctgccccatcatgggggctggggttgtcacctggacagggggcagccgtggaggccaccgttaccaactgaagctgggggcctgggtcctaccctgtctggtcatgaccccattaggtatggagagctgggaggaggcattgtcacttcccaccaggatgcaggacttggggttgaggtgagtcatggcctcttgctggcaatggggtgggaggagtacccccaagtcctctcactcctccagcctggaatgtgaagtgactccccaacccctttggccatggcaggcaccttttggactgggctgccactgcttgggcagagtaaaaggtgccaggaggagcatgggtgtggaagtcctgtcagccaagaaataaaagtttacctcagagctgca

SEQ ID NO: 295001 - DNA, 537 bp, Homo sapiens
gcggaccccacaccctgcccctgctggactcagttggctgacctcgcccaggggctgctcatgatttgaaagttgtcattgataaggcggataatggtgagcagacgctcatcatcatagtcgaagcggctgccgaagagcacggaacagataatgttggaccgtgagcgactcagcacaaacgtggggtcaaagggctcgcctgagggtgaagaatggaatgggtcaggaagacgcgatgtgcagcacaccagacctcatgcagcaacaccattaatttgcacaacatccgactcaaccatggcaacgtgtcttacggtgcaaacacgggcacatggtcacaacatgctgcttaacaacaccccaaaagcatctgtcaatgccagatccttaacctgctgtgtcacaagagaattaatgtgtagtttaaggctggtgcttccatattaattttctgtctgtacgatctatccagtgatgtaagtaggatgtttaagtctactgctataattgtactgagccagccacctgtggggg

SEQ ID NO: 295002 - DNA, 2396 bp, Homo sapiens
ggtgggggcggggtatggcgcgctgtgcggcgcagggcggctggcacaaacggcggcgccggggccggaggaaaaagctcgccaccctgaagggtcccttcccaagcccttagggaccgcagaggacttggggaccagcaagcaacccccagggcacgagaagagctcttgctgtctgccctgcctcaccctgccccacgccaggcccggtggcccccagctgcatcaagtggaggcggaggaggaggcggaggagggtggcaccatgggcccgggcggtgccctccatgcccgggggatgaagacactgctgccatggacagcccgtgccagccgcagcccctaagtcaggctctccctcagttaccagggtcttcgtcagagcccttggagcctgagcctggccgggccaggatgggagtggagagttacctgccctgtcccctgctcccctcctaccactgtccaggagtgcctagtgaggcctcggcagggagtgggacccccagagccacagccacctctaccactgccagccctcttcgggacggttttggcgggcaggatggtggtgagctgcggccgctgcagagtgaaggcgctgcagcgctggtcaccaaggggtgccagcgattggcagcccagggcgcacggcctgaggcccccaaacggaaatgggccgaggatggtggggatgccccttcacccagcaaacggccctgggccaggcaagagaaccaggaggcagagcgggagggtggcatgagctgcagctgcagcagtggcagtggtgaggccagtgctgggctgatggaggaggcgctgccctctgcgcccgagcgcctggccctggactatatcgtgccctgcatgcggtactacggcatctgcgtcaaggacagcttcctgggggcagcactgggcggtcgcgtgctggccgaggtggaggccctcaaacggggtgggcgcctgcgagacgggcagctagtgagccagagggcgatcccgccgcgcagcatccgtggggaccagattgcctgggtggaaggccatgaaccaggctgtcgaagcattggtgccctcatggcccatgtggacgccgtcatccgccactgcgcagggcggctgggcagctatgtcatcaacgggcgcaccaaggccatggtggcgtgttacccaggcaacgggctcgggtacgtaaggcacgttgacaatccccacggcgatgggcgctgcatcacctgtatctattacctgaatcagaactgggacgttaaggtgcatggcggcctgctgcagatcttccctgagggccggcccgtggtagccaacatcgagccactctttgaccggttgctcattttctggtctgaccggcggaacccccacgaggtgaagccagcctatgccaccaggtacgccatcactgtctggtattttgatgccaaggagcgggcagcagccaaagacaagtatcagctagcatcaggacagaaaggtgtccaagtacctgtatcacagccgcctacgcccacctagtggccagtcccagagccgcatggcagacagcttaaatgacttcaggagagccctgggcctgtgctggctgctccttccctgccaccgctgctgcttctgactttgcctctgtcctgcctggtgtggagggctctgtctgttgctgaggaccaaggaggagaagagacctttgctgccccatcatgggggctggggttgtcacctggacagggggcagccgtggaggccaccgttaccaactgaagctgggggcctgggtcctaccctgtctggtcatgaccccattaggtatggagagctgggaggaggcattgtcacttcccaccaggatgcaggacttggggttgaggtgagtcatggcctcttgctggcaatggggtgggaggagtacccccaagtcctctcactcctccagcctggaatgtgaagtgactccccaacccctttggccatggcaggcaccttttggactgggctgccactgcttgggcagagtaaaaggtgccaggaggagcatgggtgtggaagtcctgtcagccaagaaataaaagtttacctcagagctgcaaaaaaaaaaaaaaacaacaaaaaaaaaaaaaaaaaaaaaaaaaagcgaagggagagaaacaaaaagaaagttaaaacaagggacgaaaagagagaaagagaagcgaggaggcgcgaccggccagaggcggtttttaggacccaccgggggtatacttctctcggcggaccccactatgggtttgtgcacattagcactattataatgcgccaggagctacacggtgtattacgtctcagactacagcagagtcacacgcgtaaatgcagaaacgcggacagagagtgga

SEQ ID NO: 295003 - DNA, 2240 bp, Homo sapiens
acgttgggtgccggccgttgtgggggttggggtgggggcggggagcgcgcgccgggcggaggccgagtggagggggaggggagggggtccgagcggcccttaggccctgcccctgtcgcctactgcgctcagaaggggcctcagggcctgccccgggttgggggcgttggggtgccctggatgggggcacctttatctctcgtcctgtctccggccaccctgaagggtcccttcccaagcccttagggaccgcagaggacttggggaccagcaagcaacccccagggcacgagaagagctcttgctgtctgccctgcctcaccctgccccacgccaggcccggtggcccccagctgcatcaagtggaggcggaggaggaggcggaggagggtggcaccatgggcccgggcggtgccctccatgcccgggggatgaagacactgctgccatggacagcccgtgccagccgcagcccctaagtcaggctctccctcagttaccagggtcttcgtcagagcccttggagcctgagcctggccgggccaggatgggagtggagagttacctgccctgtcccctgctcccctcctaccactgtccaggagtgcctagtgaggcctcggcagggagtgggacccccagagccacagccacctctaccactgccagccctcttcgggacggttttggcgggcaggatggtggtgagctgcggccgctgcagagtgaaggcgctgcagcgctggtcaccaaggggtgccagcgattggcagcccagggcgcacggcctgaggcccccaaacggaaatgggccgaggatggtggggatgccccttcacccagcaaacggccctgggccaggcaagagaaccaggaggcagagcgggagggtggcatgagctgcagctgcagcagtggcagtggtgaggccagtgctgggctgatggaggaggcgctgccctctgcgcccgagcgcctggccctggactatatcgtgccctgcatgcggtactacggcatctgcgtcaaggacagcttcctgggggcagcactgggcggtcgcgtgctggccgaggtggaggccctcaaacggggtgggcgcctgcgagacgggcagctagtgagccagagggcgatcccgccgcgcagcatccgtggggaccagattgcctgggtggaaggccatgaaccaggctgtcgaagcattggtgccctcatggcccatgtggacgccgtcatccgccactgcgcagggcggctgggcagctatgtcatcaacgggcgcaccaaggccatggtggcgtgttacccaggcaacgggctcgggtacgtaaggcacgttgacaatccccacggcgatgggcgctgcatcacctgtatctattacctgaatcagaactgggacgttaaggtgcatggcggcctgctgcagatcttccctgagggccggcccgtggtagccaacatcgagccactctttgaccggttgctcattttctggtctgaccggcggaacccccacgaggtgaagccagcctatgccaccaggtacgccatcactgtctggtattttgatgccaaggagcgggcagcagccaaagacaagtatcagctagcatcaggacagaaaggtgtccaagtacctgtatcacagccgcctacgcccacctagtggccagtcccagagccgcatggcagacagcttaaatgacttcaggagagccctgggcctgtgctggctgctccttccctgccaccgctgctgcttctgactttgcctctgtcctgcctggtgtggagggctctgtctgttgctgaggaccaaggaggagaagagacctttgctgccccatcatgggggctggggttgtcacctggacagggggcagccgtggaggccaccgttaccaactgaagctgggggcctgggtcctaccctgtctggtcatgaccccattaggtatggagagctgggaggaggcattgtcacttcccaccaggatgcaggacttggggttgaggtgagtcatggcctcttgctggcaatggggtgggaggagtacccccaagtcctctcactcctccagcctggaatgtgaagtgactccccaacccctttggccatggcaggcaccttttggactgggctgccactgcttgggcagagtaaaaggtgccaggaggagcatgggtgtggaagtcctgtcagccaagaaataaaagtttacctcagagctgca

SEQ ID NO: 295004 - DNA, 2308 bp, Homo sapiens
acgttgggtgccggccgttgtgggggttggggtgggggcggggagcgcgcgccgggcggaggccgagtggagggggaggggagggggtccgagcggcccttaggccctgcccctgtcgcctactgcgctcagaaggggcctcagggcctgccccgggttgggggcgttggggtgccctggatgggggcacctttatctctcgtcctgtctccgggtgcgtgcaccctcctccgtcctttcctctgtcgccgcggaccctctccccgagggcccctcccgtcgccaccctgaagggtcccttcccaagcccttagggaccgcagaggacttggggaccagcaagcaacccccagggcacgagaagagctcttgctgtctgccctgcctcaccctgccccacgccaggcccggtggcccccagctgcatcaagtggaggcggaggaggaggcggaggagggtggcaccatgggcccgggcggtgccctccatgcccgggggatgaagacactgctgccatggacagcccgtgccagccgcagcccctaagtcaggctctccctcagttaccagggtcttcgtcagagcccttggagcctgagcctggccgggccaggatgggagtggagagttacctgccctgtcccctgctcccctcctaccactgtccaggagtgcctagtgaggcctcggcagggagtgggacccccagagccacagccacctctaccactgccagccctcttcgggacggttttggcgggcaggatggtggtgagctgcggccgctgcagagtgaaggcgctgcagcgctggtcaccaaggggtgccagcgattggcagcccagggcgcacggcctgaggcccccaaacggaaatgggccgaggatggtggggatgccccttcacccagcaaacggccctgggccaggcaagagaaccaggaggcagagcgggagggtggcatgagctgcagctgcagcagtggcagtggtgaggccagtgctgggctgatggaggaggcgctgccctctgcgcccgagcgcctggccctggactatatcgtgccctgcatgcggtactacggcatctgcgtcaaggacagcttcctgggggcagcactgggcggtcgcgtgctggccgaggtggaggccctcaaacggggtgggcgcctgcgagacgggcagctagtgagccagagggcgatcccgccgcgcagcatccgtggggaccagattgcctgggtggaaggccatgaaccaggctgtcgaagcattggtgccctcatggcccatgtggacgccgtcatccgccactgcgcagggcggctgggcagctatgtcatcaacgggcgcaccaaggccatggtggcgtgttacccaggcaacgggctcgggtacgtaaggcacgttgacaatccccacggcgatgggcgctgcatcacctgtatctattacctgaatcagaactgggacgttaaggtgcatggcggcctgctgcagatcttccctgagggccggcccgtggtagccaacatcgagccactctttgaccggttgctcattttctggtctgaccggcggaacccccacgaggtgaagccagcctatgccaccaggtacgccatcactgtctggtattttgatgccaaggagcgggcagcagccaaagacaagtatcagctagcatcaggacagaaaggtgtccaagtacctgtatcacagccgcctacgcccacctagtggccagtcccagagccgcatggcagacagcttaaatgacttcaggagagccctgggcctgtgctggctgctccttccctgccaccgctgctgcttctgactttgcctctgtcctgcctggtgtggagggctctgtctgttgctgaggaccaaggaggagaagagacctttgctgccccatcatgggggctggggttgtcacctggacagggggcagccgtggaggccaccgttaccaactgaagctgggggcctgggtcctaccctgtctggtcatgaccccattaggtatggagagctgggaggaggcattgtcacttcccaccaggatgcaggacttggggttgaggtgagtcatggcctcttgctggcaatggggtgggaggagtacccccaagtcctctcactcctccagcctggaatgtgaagtgactccccaacccctttggccatggcaggcaccttttggactgggctgccactgcttgggcagagtaaaaggtgccaggaggagcatgggtgtggaagtcctgtcagccaagaaataaaagtttacctcagagctgca

SEQ ID NO: 295005 - DNA, 2570 bp, Homo sapiens
ggtgggggcggggtatggcgcgctgtgcggcgcagggcggctggcacaaacggcggcgccggggccggaggaaaaagctcgccaccctgaagggtcccttcccaagcccttagggaccgcagaggacttggggaccagcaagcaacccccagggcacgagaagagctcttgctgtctgccctgcctcaccctgccccacgccaggcccggtggcccccagctgcatcaagtggaggcggaggaggaggcggaggagggtggcaccatgggcccgggcggtgccctccatgcccgggggatgaagacactgctgccatggacagcccgtgccagccgcagcccctaagtcaggctctccctcagttaccagggtcttcgtcagagcccttggagcctgagcctggccgggccaggatgggagtggagagttacctgccctgtcccctgctcccctcctaccactgtccaggagtgcctagtgaggcctcggcagggagtgggacccccagagccacagccacctctaccactgccagccctcttcgggacggttttggcgggcaggatggtggtgagctgcggccgctgcagagtgaaggcgctgcagcgctggtcaccaaggggtgccagcgattggcagcccagggcgcacggcctgaggcccccaaacggaaatgggccgaggatggtggggatgccccttcacccagcaaacggccctgggccaggcaagagaaccaggaggcagagcgggagggtggcatgagctgcagctgcagcagtggcagtggtgaggccagtgctgggctgatggaggaggcgctgccctctgcgcccgagcgcctggccctggactatatcgtgccctgcatgcggtactacggcatctgcgtcaaggacagcttcctgggggcagcactgggcggtcgcgtgctggccgaggtggaggccctcaaacggggtgggcgcctgcgagacgggcagctagtgagccagagggcgatcccgccgcgcagcatccgtggggaccagattgcctgggtggaaggccatgaaccaggctgtcgaagcattggtgccctcatggcccatgtggacgccgtcatccgccactgcgcagggcggctgggcagctatgtcatcaacgggcgcaccaaggccatggtggcgtgttacccaggcaacgggctcgggtacgtaaggcacgttgacaatccccacggcgatgggcgctgcatcacctgtatctattacctgaatcagaactgggacgttaaggtaggggtgagggtgagggtgagggtggcgctggggctagggctggggcgggggtggcgtgcgtccactccattttccactctcagcccagattctggcattctcctgtttctcttctcaacacacagcgggcagtgcgatctgccggctcttcctgggaaatggcacctcctcctctctagcggactgtgtggtgggaactcccctctttccgggaatggtgctgtctgcccagccccacccggccttgtaatgaacactttcccccttttcctgtctttagtagcttcctgcccatctccatggtgatgcagtctctgggttgtcattcactttgagagcccgaggggtgggagggagtgatgcaggcagacgctgcgcctcctagtgggctcccggggcaccgtgggaggcagcggctcctggccgtaccagctagcctcatcctttggcctgcccccaggtgcatggcggcctgctgcagatcttccctgagggccggcccgtggtagccaacatcgagccactctttgaccggttgctcattttctggtctgaccggcggaacccccacgaggtgaagccagcctatgccaccaggtacgccatcactgtctggtattttgatgccaaggagcgggcagcagccaaagacaagtatcagctagcatcaggacagaaaggtgtccaagtacctgtatcacagccgcctacgcccacctagtggccagtcccagagccgcatggcagacagcttaaatgacttcaggagagccctgggcctgtgctggctgctccttccctgccaccgctgctgcttctgactttgcctctgtcctgcctggtgtggagggctctgtctgttgctgaggaccaaggaggagaagagacctttgctgccccatcatgggggctggggttgtcacctggacagggggcagccgtggaggccaccgttaccaactgaagctgggggcctgggtcctaccctgtctggtcatgaccccattaggtatggagagctgggaggaggcattgtcacttcccaccaggatgcaggacttggggttgaggtgagtcatggcctcttgctggcaatggggtgggaggagtacccccaagtcctctcactcctccagcctggaatgtgaagtgactccccaacccctttggccatggcaggcaccttttggactgggctgccactgcttgggcagagtaaaaggtgccaggaggagcatgggtgtggaagtcctgtcagccaagaaataaaagtttacctcagagctgca

SEQ ID NO: 295006 - DNA, 2039 bp, Homo sapiens
ggtgggggcggggtatggcgcgctgtgcggcgcagggcggctggcacaaacggcggcgccggggccggaggaaaaagctcgccaccctgaagggtcccttcccaagcccttagggaccgcagaggacttggggaccagcaagcaacccccagggcacgagaagagctcttgctgtctgccctgcctcaccctgccccacgccaggcccggtggcccccagctgcatcaagtggaggcggaggaggaggcggaggagggtggcaccatgggcccgggcggtgccctccatgcccgggggatgaagacactgctgccatggacagcccgtgccagccgcagcccctaagtcaggctctccctcagttaccagggtcttcgtcagagcccttggagcctgagcctggccgggccaggatgggagtggagagttacctgccctgtcccctgctcccctcctaccactgtccaggagtgcctagtgaggcctcggcagggagtgggacccccagagccacagccacctctaccactgccagccctcttcgggacggttttggcgggcaggatggtggtgagctgcggccgctgcagagtgaaggcgctgcagcgctggtcaccaaggggtgccagcgattggcagcccagggcgcacggcctgaggcccccaaacggaaatgggccgaggatggtggggatgccccttcacccagcaaacggccctgggccaggcaagagaaccaggaggcagagcgggagggtggcatgagctgcagctgcagcagtggcagtggtgaggccagtgctgggctgatggaggaggcgctgccctctgcgcccgagcgcctggccctggactatatcgtgccctgcatgcggtactacggcatctgcgtcaaggacagcttcctgggggcagcactgggcggtcgcgtgctggccgaggtggaggccctcaaacggggtgggcgcctgcgagacgggcagctagtgagccagagggcgatcccgccgcgcagcatccgtggggaccagattgcctgggtggaaggccatgaaccaggctgtcgaagcattggtgccctcatggcccatgtggacgccgtcatccgccactgcgcagggcggctgggcagctatgtcatcaacgggcgcaccaaggccatggtggcgtgttacccaggcaacgggctcgggtacgtaaggcacgttgacaatccccacggcgatgggcgctgcatcacctgtatctattacctgaatcagaactgggacgttaaggtgcatggcggcctgctgcagatcttccctgagggccggcccgtggtagccaacatcgagccactctttgaccggttgctcattttctggtctgaccggcggaacccccacgaggtgaagccagcctatgccaccagcatcaggacagaaaggtgtccaagtacctgtatcacagccgcctacgcccacctagtggccagtcccagagccgcatggcagacagcttaaatgacttcaggagagccctgggcctgtgctggctgctccttccctgccaccgctgctgcttctgactttgcctctgtcctgcctggtgtggagggctctgtctgttgctgaggaccaaggaggagaagagacctttgctgccccatcatgggggctggggttgtcacctggacagggggcagccgtggaggccaccgttaccaactgaagctgggggcctgggtcctaccctgtctggtcatgaccccattaggtatggagagctgggaggaggcattgtcacttcccaccaggatgcaggacttggggttgaggtgagtcatggcctcttgctggcaatggggtgggaggagtacccccaagtcctctcactcctccagcctggaatgtgaagtgactccccaacccctttggccatggcaggcaccttttggactgggctgccactgcttgggcagagtaaaaggtgccaggaggagcatgggtgtggaagtcctgtcagccaagaaataaaagtttacctcagagctgca

SEQ ID NO: 295007 - DNA, 2043 bp, Homo sapiens
ggtgggggcggggtatggcgcgctgtgcggcgcagggcggctggcacaaacggcggcgccggggccggaggaaaaagctcgccaccctgaagggtcccttcccaagcccttagggaccgcagaggacttggggaccagcaagcaacccccagggcacgagaagagctcttgctgtctgccctgcctcaccctgccccacgccaggcccggtggcccccagctgcatcaagtggaggcggaggaggaggcggaggagggtggcaccatgggcccgggcggtgccctccatgcccgggggatgaagacactgctgccatggacagcccgtgccagccgcagcccctaagtcaggctctccctcagttaccagggtcttcgtcagagcccttggagcctgagcctggccgggccaggatgggagtggagagttacctgccctgtcccctgctcccctcctaccactgtccaggagtgcctagtgaggcctcggcagggagtgggacccccagagccacagccacctctaccactgccagccctcttcgggacggttttggcgggcaggatggtggtgagctgcggccgctgcagagtgaaggcgctgcagcgctggtcaccaaggggtgccagcgattggcagcccagggcgcacggcctgaggcccccaaacggaaatgggccgaggatggtggggatgccccttcacccagcaaacggccctgggccaggcaagagaaccaggaggcagagcgggagggtggcatgagctgcagctgcagcagtggcagtggtgaggccagtgctgggctgatggaggaggcgctgccctctgcgcccgagcgcctggccctggactatatcgtgccctgcatgcggtactacggcatctgcgtcaaggacagcttcctgggggcagcactgggcggtcgcgtgctggccgaggtggaggccctcaaacggggtgggcgcctgcgagacgggcagctagtgagccagagggcgatcccgccgcgcagcatccgtggggaccagattgcctgggtggaaggccatgaaccaggctgtcgaagcattggtgccctcatggcccatgtggacgccgtcatccgccactgcgcagggcggctgggcagctatgtcatcaacgggcgcaccaaggcgatgggcgctgcatcacctgtatctattacctgaatcagaactgggacgttaaggtgcatggcggcctgctgcagatcttccctgagggccggcccgtggtagccaacatcgagccactctttgaccggttgctcattttctggtctgaccggcggaacccccacgaggtgaagccagcctatgccaccaggtacgccatcactgtctggtattttgatgccaaggagcgggcagcagccaaagacaagtatcagctagcatcaggacagaaaggtgtccaagtacctgtatcacagccgcctacgcccacctagtggccagtcccagagccgcatggcagacagcttaaatgacttcaggagagccctgggcctgtgctggctgctccttccctgccaccgctgctgcttctgactttgcctctgtcctgcctggtgtggagggctctgtctgttgctgaggaccaaggaggagaagagacctttgctgccccatcatgggggctggggttgtcacctggacagggggcagccgtggaggccaccgttaccaactgaagctgggggcctgggtcctaccctgtctggtcatgaccccattaggtatggagagctgggaggaggcattgtcacttcccaccaggatgcaggacttggggttgaggtgagtcatggcctcttgctggcaatggggtgggaggagtacccccaagtcctctcactcctccagcctggaatgtgaagtgactccccaacccctttggccatggcaggcaccttttggactgggctgccactgcttgggcagagtaaaaggtgccaggaggagcatgggtgtggaagtcctgtcagccaagaaataaaagtttacctcagagctgca

SEQ ID NO: 295008 - DNA, 2129 bp, Homo sapiens
ggtgggggcggggtatggcgcgctgtgcggcgcagggcggctggcacaaacggcggcgccggggccggaggaaaaagctcgccaccctgaagggtcccttcccaagcccttagggaccgcagaggacttggggaccagcaagcaacccccagggcacgagaagagctcttgctgtctgccctgcctcaccctgccccacgccaggcccggtggcccccagctgcatcaagtggaggcggaggaggaggcggaggagggtggcaccatgggcccgggcggtgccctccatgcccgggggatgaagacactgctgccatggacagcccgtgccagccgcagcccctaagtcaggctctccctcagttaccagggtcttcgtcagagcccttggagcctgagcctggccgggccaggatgggagtggagagttacctgccctgtcccctgctcccctcctaccactgtccaggagtgcctagtgaggcctcggcagggagtgggacccccagagccacagccacctctaccactgccagccctcttcgggacggttttggcgggcaggatggtggtgagctgcggccgctgcagagtgaaggcgctgcagcgctggtcaccaaggggtgccagcgattggcagcccagggcgcacggcctgaggcccccaaacggaaatgggccgaggatggtggggatgccccttcacccagcaaacggccctgggccaggcaagagaaccaggaggcagagcgggagggtggcatgagctgcagctgcagcagtggcagtggtgaggccagtgctgggctgatggaggaggcgctgccctctgcgcccgagcgcctggccctggactatatcgtgccctgcatgcggtactacggcatctgcgtcaaggacagcttcctgggggcagcactgggcggtcgcgtgctggccgaggtggaggccctcaaacggggtgggcgcctgcgagacgggcagctagtgagccagagggcgatcccgccgcgcagcatccgtggggaccagattgcctgggtggaaggccatgaaccaggctgtcgaagcattggtgccctcatggcccatgtggacgccgtcatccgccactgcgcagggcggctgggcagctatgtcatcaacgggcgcaccaaggccatggtggcgtgttacccaggcaacgggctcgggtacgtaaggcacgttgacaatccccacggcgatgggcgctgcatcacctgtatctattacctgaatcagaactgggacgttaaggtgcatggcggcctgctgcagatcttccctgagggccggcccgtggtagccaacatcgagccactctttgaccggttgctcattttctggtctgaccggcggaacccccacgaggtgaagccagcctatgccaccaggtacgccatcactgtctggtattttgatgccaaggagcgggcagcagccaaagacaagtatcagctagcatcaggacagaaaggtgtccaagtacctgtatcacagccgcctacgcccacctagtggccagtcccagagccgcatggcagacagcttaaatgacttcaggagagccctgggcctgtgctggctgctccttccctgccaccgctgctgcttctgactttgcctctgtcctgcctggtgtggagggctctgtctgttgctgaggaccaaggaggagaagagacctttgctgccccatcatgggggctggggttgtcacctggacagggggcagccgtggaggccaccgttaccaactgaagctgggggcctgggtcctaccctgtctggtcatgaccccattaggtatggagagctgggaggaggcattgtcacttcccaccaggatgcaggacttggggttgaggtgagtcatggcctcttgctggcaatggggtgggaggagtacccccaagtcctctcactcctccagcctggaatgtgaagtgactccccaacccctttggccatggcaggcaccttttggactgggctgccactgcttgggcagagtaaaaggtgccaggaggagcatgggtgtggaagtcctgtcagccaagaaataaaagtttacctcagagctgcaacaaaaaacctcatgctgcaat

SEQ ID NO: 295009 - DNA, 1839 bp, Homo sapiens
ggtgggggcggggtatggcgcgctgtgcggcgcagggcggctggcacaaacggcggcgccggggccggaggaaaaagctcgccaccctgaagggtcccttcccaagcccttagggaccgcagaggacttggggaccagcaagcaacccccagggcacgagaagagctcttgctgtctgccctgcctcaccctgccccacgccaggcccggtggcccccagctgcatcaatgggacccccagagccacagccacctctaccactgccagccctcttcgggacggttttggcgggcaggatggtggtgagctgcggccgctgcagagtgaaggcgctgcagcgctggtcaccaaggggtgccagcgattggcagcccagggcgcacggcctgaggcccccaaacggaaatgggccgaggatggtggggatgccccttcacccagcaaacggccctgggccaggcaagagaaccaggaggcagagcgggagggtggcatgagctgcagctgcagcagtggcagtggtgaggccagtgctgggctgatggaggaggcgctgccctctgcgcccgagcgcctggccctggactatatcgtgccctgcatgcggtactacggcatctgcgtcaaggacagcttcctgggggcagcactgggcggtcgcgtgctggccgaggtggaggccctcaaacggggtgggcgcctgcgagacgggcagctagtgagccagagggcgatcccgccgcgcagcatccgtggggaccagattgcctgggtggaaggccatgaaccaggctgtcgaagcattggtgccctcatggcccatgtggacgccgtcatccgccactgcgcagggcggctgggcagctatgtcatcaacgggcgcaccaaggccatggtggcgtgttacccaggcaacgggctcgggtacgtaaggcacgttgacaatccccacggcgatgggcgctgcatcacctgtatctattacctgaatcagaactgggacgttaaggtgcatggcggcctgctgcagatcttccctgagggccggcccgtggtagccaacatcgagccactctttgaccggttgctcattttctggtctgaccggcggaacccccacgaggtgaagccagcctatgccaccaggtacgccatcactgtctggtattttgatgccaaggagcgggcagcagccaaagacaagtatcagctagcatcaggacagaaaggtgtccaagtacctgtatcacagccgcctacgcccacctagtggccagtcccagagccgcatggcagacagcttaaatgacttcaggagagccctgggcctgtgctggctgctccttccctgccaccgctgctgcttctgactttgcctctgtcctgcctggtgtggagggctctgtctgttgctgaggaccaaggaggagaagagacctttgctgccccatcatgggggctggggttgtcacctggacagggggcagccgtggaggccaccgttaccaactgaagctgggggcctgggtcctaccctgtctggtcatgaccccattaggtatggagagctgggaggaggcattgtcacttcccaccaggatgcaggacttggggttgaggtgagtcatggcctcttgctggcaatggggtgggaggagtacccccaagtcctctcactcctccagcctggaatgtgaagtgactccccaacccctttggccatggcaggcaccttttggactgggctgccactgcttgggcagagtaaaaggtgccaggaggagcatgggtgtggaagtcctgtcagccaagaaataaaagtttacctcagagctgca

SEQ ID NO: 295010 - DNA, 1860 bp, Homo sapiens
ggtgggggcggggtatggcgcgctgtgcggcgcagggcggctggcacaaacggcggcgccggggccggaggaaaaagctcgccaccctgaagggtcccttcccaagcccttagggaccgcagaggacttggggaccagcaagcaacccccagggcacgagaagagctcttgctgtctgccctgcctcaccctgccccacgccaggcccggtggcccccagctgcatcaagtggaggcggaggaggaggcggaggagggtggcaccatgggcccgggcggtgccctccatgcccgggggatgaagacactgctgccatggacagcccgtgccagccgcagcccctaagtcaggctctccctcagttaccagggtcttcgtcagagcccttggagcctgagcctggccgggccaggatgggagtggagagttacctgccctgtcccctgctcccctcctaccactgtccaggagtgcctagtgaggcctcggcagggagtgggacccccagagccacagccacctctaccactgccagccctcttcgggacggttttggcgggcaggatggtggtgagctgcggccgctgcagagtgaaggcgctgcagcgctggtcaccaaggggtgccagcgattggcagcccagggcgcacggcctgaggcccccaaacggaaatgggccgaggatggtggggatgccccttcacccagcaaacggccctgggccaggcaagagaaccaggaggcagagcgggagggtggcatgagctgcagctgcagcagtggcagtggtgaggccagtgctgggctgatggaggaggcgctgccctctgcgcccgagcgcctggccctggactatatcgtgccctgcatgcggtactacggcatctgcgtcaaggacagcttcctgggggcagcactgggcggtcgcgtgctggccgaggtggaggccctcaaacggggtgggcgcctgcgagacgggcagctagtgagccagagggcgatcccgccgcgcagcatccgtggggaccagattgcctgggtggaaggccatgaaccaggctgtcgaagcattggtgccctcatggcccatgtggacgccgtcatccgccactgcgcagggcggctgggcagctatgtcatcaacgggcgcaccaaggccatggtggcgtgttacccaggcaacgggctcgggtacgtaaggcacgttgacaatccccacggcgatgggcgctgcatcacctgtatctattacctgaatcagaactgggacgttaaggtgcatggcggcctgctgcagatcttccctgagggccggcccgtggtagccaacatcgagccactctttgaccggttgctcattttctggtctgaccggcggaacccccacgaggtgaagccagcctatgccaccaggtacgccatcactgtctggtattttgatgccaaggagcgggcagcagccaaagacaagtatcagctagcatcaggacagaaaggtgtccaagtacctgtatcacagccgcctacgcccacctagtggccagtcccagagccgcatggcagacagcttaaatgacttcaggagaagctgggaggaggcattgtcacttcccaccaggatgcaggacttggggttgaggtgagtcatggcctcttgctggcaatggggtgggaggagtacccccaagtcctctcactcctccagcctggaatgtgaagtgactccccaacccctttggccatggcaggcaccttttggactgggctgccactgcttgggcagagtaaaaggtgccaggaggagcatgggtgtggaagtcctgtcagccaagaaataaaagtttacctcagagctgca

SEQ ID NO: 295011 - DNA, 1631 bp, Homo sapiens
ggtgggggcggggtatggcgcgctgtgcggcgcagggcggctggcacaaacggcggcgccggggccggaggaaaaagctcgccaccctgaagggtcccttcccaagcccttagggaccgcagaggacttggggaccagcaagcaacccccagggcacgagaagagctcttgctgtctgccctgcctcaccctgccccacgccaggcccggtggcccccagctgcatcaagtggaggcggaggaggaggcggaggagggtggcaccatgggcccgggcggtgccctccatgcccgggggatgaagacactgctgccatggacagcccgtgccagccgcagcccctaagtcaggctctccctcagttaccagggtcttcgtcagagcccttggagcctgagcctggccgggccaggatgggagtggagagttacctgccctgtcccctgctcccctcctaccactgtccaggagtgcctagtgaggcctcggcagggagtgggacccccagagccacagccacctctaccactgccagccctcttcgggacggttttggcgggcaggatggtggtgagctgcggccgctgcagagtgaaggcgctgcagcgctggtcaccaaggggtgccagcgattggcagcccagggcgcacggcctgaggcccccaaacggaaatgggccgaggatggtggggatgccccttcacccagcaaacggccctgggccaggcaagagaaccaggaggcagagcgggagggtggcatgagctgcagctgcagcagtggcagtggtgaggccagtgctgggctgatggaggaggcgctgccctctgcgcccgagcgcctggccctggactatatcgtgccctgcatgcggtactacggcatctgcgtcaaggacagcttcctgggggcagcactgggcggtcgcgtgctggccgaggtggaggccctcaaacggggtgggcgcctgcgagacgggcagctagtgagccagagggcgatcccgccgcgcagcatccgtggggaccagattgcctgggtggaaggccatgaaccaggctgtcgaagcattggtgccctcatggcccatgtggacgccgtcatccgccactgcgcagggcggctgggcagctatgtcatcaacgggcgcaccaaggccatggtggcgtgttacccaggcaacgggctcgggtacgtaaggcacgttgacaatccccacggcgatgggcgctgcatcacctgtatctattacctgaatcagaactgggacgttaaggtgcatggcggcctgctgcagatcttccctgagggccggcccgtggtagccaacatcgagccactctttgaccggttgctcattttctggtctgaccggcggaacccccacgaggtgaagccagcctatgccaccaggtacgccatcactgtctggtattttgatgccaaggagcgggcagcagccaaagacaagtatcagctagcatcaggacagaaaggtgtccaagtacctgtatcacagccgccttttggactgggctgccactgcttgggcagagtaaaaggtgccaggaggagcatgggtgtggaagtcctgtcagccaagaaataaaagtttacctcagagctgca

SEQ ID NO: 295012 - DNA, 1357 bp, Homo sapiens
ggtgggggcggggtatggcgcgctgtgcggcgcagggcggctggcacaaacggcggcgccggggccggaggaaaaagctcgccaccctgaagggtcccttcccaagcccttagggaccgcagaggacttggggaccagcaagcaacccccagggcacgagaagagctcttgctgtctgccctgcctcaccctgccccacgccaggcccggtggcccccagctgcatcaagtggaggcggaggaggaggcggaggagggtggcaccatgggcccgggcggtgccctccatgcccgggggatgaagacactgctgccatggacagcccgtgccagccgcagcccctaagtcaggctctccctcagttaccagggtcttcgtcagagcccttggagcctgagcctggccgggccaggatgggagtggagagttacctgccctgtcccctgctcccctcctaccactgtccaggagtgcctagtgaggcctcggcagggagtgggacccccagagccacagccacctctaccactgccagccctcttcgggacggttttggcgggcaggatggtggtgagctgcggccgctgcagagtgaaggcgctgcagcgctggtcaccaaggggtgccagcgattggcagcccagggcgcacggcctgaggcccccaaacggaaatgggccgaggatggtggggatgccccttcacccagcaaacggccctgggccaggcaagagaaccaggaggcagagcgggagggtggcatgagctgcagctgcagcagtggcagtggtgaggccagtgctgggctgatggaggaggcgctgccctctgcgcccgagcgcctggccctggactatatcgtgccctgcatgcggtactacggcatctgcgtcaaggacagcttcctgggggcagcactgggcggtcgcgtgctggccgaggtggaggccctcaaacggggtgggcgcctgcgagacgggcagctagtgagccagagggcgatcccgccgcgcagcatccgtggggaccagattgcctgggtggaaggccatgaaccaggctgtcgaagcattggtgccctcatggcccatgtggacgccgtcatccgccactgcgcagggcggctgggcagctatgtcatcaacgggcgcaccaaggccatggtggcgtgttacccaggcaacgggctcgggtacgtaaggcacgttgacaatccccacgtccccaacccctttggccatggcaggcaccttttggactgggctgccactgcttgggcagagtaaaaggtgccaggaggagcatgggtgtggaagtcctgtcagccaagaaataaaagtttacctcagagctgca

SEQ ID NO: 295013 - DNA, 3708 bp, Homo sapiens
gtgggacagtcacaggcttctgactggggtgtgtgtgtagtgggggtggggctcttggcaggcagattgtcaccaatagcctttaagtctttggtctcctggccctggtcccacctgtccctcccctaggtgggaggggtggagagcaagtttcctgaggccttcccctgtgagggcaggaagtagatactttccttggggccagaggatgctttcacccccaaggtgtgtatatgtgggggaagggtggggccctaaagagcaggttcctgtttctgtgtgagtcccatgtgcttggtgggaggcgctgtgtgagaatgtacagggcaggaggaaacatagcagggctggggtgcagaggaggcccagagcagtgcactccagtctgcaggtactgcactgggcactggggagaccaacctggccccaggggcttccctgtggctgccttccagggcagtactaggtaaacaggtgcctgtgctgatgccatgttgctaggagtggaacggacaatcagccggagtactcaaggtgacccttggtctctgaatcctgaataacaaagagggtcagaaggaagagtgtcccaggccagtgctgaggccttgtggtggcgatgagctcagcctgttgaggcatggagcagagtgatgggagaggcacatgaggttgggggcctttgaggctgtggttgggaatttgtattttctcaggatggagtgaagacctggagaggaggggctctggctgctgtgtggggatgaattgtgggaagagggtgcagcactggaccccttccctgccacccatccacgtgcatcatcagtgtaatctctgattggattcctaattggggaggtcttgcccatctctagtcagtaactcactgtttctaagcctcctggaccatggcccaattcttctcccagtgaggtggttgctcagagtgccgacccttccatagggagtgagcagtgcaaagaaggtgccccctcctgaaccttgaagtgtagccattagggttttccctggggggccttctcactaattgtactctggtgctgccagagagaaggttgtcagcttcccactgctaggtggcagtagatggtggcagccctctctttccagggcaaggtctggtggatgaggtgcacatggttaatgcagagcagcttaacatccaccacagagggtgagccctgggataatgtgttgggaggcgtcctggggagggtgaggattgaagcagcccagtctgctgtggcgtgcgtgcttggcaagcatcctgttgtggcagtggccactgatgtttgatcgtgaatgtttatcttgggactgtcttgctgggccgggcccataggtgtagctgagcattcgtggggaatggacgccagcagagttgtaccagggcagagaggtcagggcagagaggtcaagacagatggtccgggctggggagaagttgaagggtccttgtgccagtcctcccctttttgtgtgctacctcatcttgccactgcagtgactttgggcagagggtgggacagggaccttttaaaatttttaaatggcatttcagcctgtgctccagttctccatgtggcaggcactgtgctggctgtcttcccagacacttgttatcttgttcacttgttccacaacaacctgtgaaatagctgtgagctccattggatccatggatgaggaacctgagaccaggaagtcacctgcctgatgccacagctcatgtggcagcactgagacttgaaccagggaattgtgtctgcagaagtggctgggccatttcctttacctctcagccacctttctgccagctccctgatgacaaacatcccggggccctggccacagcattgtagggctgggtcaggggagtggcaactgtcaggcagaggaaagaaccctgtagacagagaaaccaagccctgcaatgagtcctgttagatctccaggagttggggctccagaacctcccaagttatgttctcagagagattaattgctaccgctgtaaacagcagtgtttattacccctgctgtacacatcaggcagttgaggcccattcaggtgttggaactggctagggttacccagcaaattatccttggagttggaattaggtctttctattcagactgtagcttttggctcctgttcggaggtctatgggacagataatttagtggggattctttgtagtccagggcagcagttcttaacattgctgcatggtagaattacctgggaagctttaccaatttcaggcccttccttaggccaggtacttcagaacctcagagctccccagggggctccactccacagccaagggtaagaattcctggtctagggctgtgaggccacctccttgcacacctgaaaatgtttaaattggtattattctactgaaatggctgaggtggggtttggggtatcttgaaacaaatcaaactctgttactaattgagccctagctgggtgccaggccccaggtatgtgtgttgggagggagtgggctcttgaggcccaggagctgaggtttctgatagacttggggatgggattttggctgaaaaagaaagtcttttggggcaggagcttggaacccttgacccaaggagtcatggggaagatggggcaaggaggggtgggaaaataggtaattcatggctgcttctctaagatgtgcctgcctagccccagtaaacctacctccctccatccctgccaggccatggtggcgtgttacccaggcaacgggctcgggtacgtaaggcacgttgacaatccccacggcgatgggcgctgcatcacctgtatctattacctgaatcagaactgggacgttaaggtgcatggcggcctgctgcagatcttccctgagggccggcccgtggtagccaacatcgagccactctttgaccggttgctcattttctggtctgaccggcggaacccccacgaggtgaagccagcctatgccaccaggtacgccatcactgtctggtattttgatgccaaggagcgggcagcagccaaagacaagtatcagctagcatcaggacagaaaggtgtccaagtacctgtatcacagccgcctacgcccacctagtggccagtcccagagccgcatggcagacagcttaaatgacttcaggagagccctgggcctgtgctggctgctccttccctgccaccgctgctgcttctgactttgcctctgtcctgcctggtgtggagggctctgtctgttgctgaggaccaaggaggagaagagacctttgctgccccatcatgggggctggggttgtcacctggacagggggcagccgtggaggccaccgttaccaactgaagctgggggcctgggtcctaccctgtctggtcatgaccccattaggtatggagagctgggaggaggcattgtcacttcccaccaggatgcaggacttggggttgaggtgagtcatggcctcttgctggcaatggggtgggaggagtacccccaagtcctctcactcctccagcctggaatgtgaagtgactccccaacccctttggccatggcaggcaccttttggactgggctgccactgcttgggcagagtaaaaggtgccaggaggagcatgggtgtggaagtcctgtcagccaagaaataaaagtttacctcagagctgca

SEQ ID NO: 295014 - DNA, 1020 bp, Homo sapiens
gcccagatgggacactgctctgagcctcaatttgctgatccacggaatacgaaaaccaggttacatccccagccatggtggcgtgttacccaggcaacgggctcgggtacgtaaggcacgttgacaatccccacggcgatgggcgctgcatcacctgtatctattacctgaatcagaactgggacgttaaggtgcatggcggcctgctgcagatcttccctgagggccggcccgtggtagccaacatcgagccactctttgaccggttgctcattttctggtctgaccggcggaacccccacgaggtgaagccagcctatgccaccaggtacgccatcactgtctggtattttgatgccaaggagcgggcagcagccaaagacaagtatcagctagcatcaggacagaaaggtgtccaagtacctgtatcacagccgcctacgcccacctagtggccagtcccagagccgcatggcagacagcttaaatgacttcaggagagccctgggcctgtgctggctgctccttccctgccaccgctgctgcttctgactttgcctctgtcctgcctggtgtggagggctctgtctgttgctgaggaccaaggaggagaagagacctttgctgccccatcatgggggctggggttgtcacctggacagggggcagccgtggaggccaccgttaccaactgaagctgggggcctgggtcctaccctgtctggtcatgaccccattaggtatggagagctgggaggaggcattgtcacttcccaccaggatgcaggacttggggttgaggtgagtcatggcctcttgctggcaatggggtgggaggagtacccccaagtcctctcactcctccagcctggaatgtgaagtgactccccaacccctttggccatggcaggcaccttttggactgggctgccactgcttgggcagagtaaaaggtgccaggaggagcatgggtgtggaagtcctgtcagccaagaaataaaagtttacctcagagctgca

SEQ ID NO: 295015 - DNA, 1193 bp, Homo sapiens
ggtgggggcggggtatggcgcgctgtgcggcgcagggcggctggcacaaacggcggcgccggggccggaggaaaaagctcgccaccctgaagggtcccttcccaagcccttagggaccgcagaggacttggggaccagcaagcaacccccagggcacgagaagagctcttgctgtctgccctgcctcaccctgccccacgccaggcccggtggcccccagctgcatcaagtggaggcggaggaggaggcggaggagggtggcaccatgggcccgggcggtgccctccatgcccgggggatgaagacactgctgccatggacagcccgtgccagccgcagcccctaagtcaggctctccctcagttaccagggtcttcgtcagagcccttggagcctgagcctggccgggccaggatgggagtggagagttacctgccctgtcccctgctcccctcctaccactgtccaggagtgcctagtgaggcctcggcagggagtgggacccccagagccacagccacctctaccactgccagccctcttcgggacggttttggcgggcaggatggtggtgagctgcggccgctgcagagtgaaggcgctgcagcgctggtcaccaaggggtgccagcgattggcagcccagggcgcacggcctgaggcccccaaacggaaatgggccgaggatggtggggatgccccttcacccagcaaacggccttctgactttgcctctgtcctgcctggtgtggagggctctgtctgttgctgaggaccaaggaggagaagagacctttgctgccccatcatgggggctggggttgtcacctggacagggggcagccgtggaggccaccgttaccaactgaagctgggggcctgggtcctaccctgtctggtcatgaccccattaggtatggagagctgggaggaggcattgtcacttcccaccaggatgcaggacttggggttgaggtgagtcatggcctcttgctggcaatggggtgggaggagtacccccaagtcctctcactcctccagcctggaatgtgaagtgactccccaacccctttggccatggcaggcaccttttggactgggctgccactgcttgggcagagtaaaaggtgccaggaggagcatgggtgtggaagtcctgtcagccaagaaataaaagtttacctcagagctgca

SEQ ID NO: 295016 - DNA, 1045 bp, Homo sapiens
ggtgggggcggggtatggcgcgctgtgcggcgcagggcggctggcacaaacggcggcgccggggccggaggaaaaagctcgccaccctgaagggtcccttcccaagcccttagggaccgcagaggacttggggaccagcaagcaacccccagggcacgagaagagctcttgctgtctgccctgcctcaccctgccccacgccaggcccggtggcccccagctgcatcaagtggaggcggaggaggaggcggaggagggtggcaccatgggcccgggcggtgccctccatgcccgggggatgaagacactgctgccatggacagcccgtgccagccgcagcccctaagtcaggctctccctcagttaccagggtcttcgtcagagcccttggagcctgagcctggccgggccaggatgggagtggagagttacctgccctgtcccctgctcccctcctaccactgtccaggagtgcctagtgaggcctcggcagggagtgggacccccagagccacagccacctctaccactgccagccctcttcgggacggttttggcgggcaggatggtggtgagctgcggccgctgcagagtgaaggcgctgcagcgctggtcaccaaggggtgccagcgattggcagcccagggcgcacggcctgaggcccccaaacggaaatgggccgaggatggtgcagccgtggaggccaccgttaccaactgaagctgggggcctgggtcctaccctgtctggtcatgaccccattaggtatggagagctgggaggaggcattgtcacttcccaccaggatgcaggacttggggttgaggtgagtcatggcctcttgctggcaatggggtgggaggagtacccccaagtcctctcactcctccagcctggaatgtgaagtgactccccaacccctttggccatggcaggcaccttttggactgggctgccactgcttgggcagagtaaaaggtgccaggaggagcatgggtgtggaagtcctgtcagccaagaaataaaagtttacctcagagctgca

SEQ ID NO: 295017 - DNA, 995 bp, Homo sapiens
ggtgggggcggggtatggcgcgctgtgcggcgcagggcggctggcacaaacggcggcgccggggccggaggaaaaagctcgccaccctgaagggtcccttcccaagcccttagggaccgcagaggacttggggaccagcaagcaacccccagggcacgagaagagctcttgctgtctgccctgcctcaccctgccccacgccaggcccggtggcccccagctgcatcaagtggaggcggaggaggaggcggaggagggtggcaccatgggcccgggcggtgccctccatgcccgggggatgaagacactgctgccatggacagcccgtgccagccgcagcccctaagtcaggctctccctcagttaccagggtcttcgtcagagcccttggagcctgagcctggccgggccaggatgggagtggagagttacctgccctgtcccctgctcccctcctaccactgtccaggagtgcctagtgaggcctcggcagggagtgggacccccagagccacagccacctctaccactgccagccctcttcgggacggttttggcgggcaggatggtggtgagctgcggccgctgcagagtgaaggcgctgcagcgctggtcaccaaggggtgccagcgattggcaggcagccgtggaggccaccgttaccaactgaagctgggggcctgggtcctaccctgtctggtcatgaccccattaggtatggagagctgggaggaggcattgtcacttcccaccaggatgcaggacttggggttgaggtgagtcatggcctcttgctggcaatggggtgggaggagtacccccaagtcctctcactcctccagcctggaatgtgaagtgactccccaacccctttggccatggcaggcaccttttggactgggctgccactgcttgggcagagtaaaaggtgccaggaggagcatgggtgtggaagtcctgtcagccaagaaataaaagtttacctcagagctgca

SEQ ID NO: 295018 - DNA, 1178 bp, Homo sapiens
acgttgggtgccggccgttgtgggggttggggtgggggcggggagcgcgcgccgggcggaggccgagtggagggggaggggagggggtccgagcggcccttaggccctgcccctgtcgcctactgcgctcagaaggggcctcagggcctgccccgggttgggggcgttggggtgccctggatgggggcacctttatctctcgtcctgtctccggccaccctgaagggtcccttcccaagcccttagggaccgcagaggacttggggaccagcaagcaacccccagggcacgagaagagctcttgctgtctgccctgcctcaccctgccccacgccaggcccggtggcccccagctgcatcaagtggaggcggaggaggaggcggaggagggtggcaccatgggcccgggcggtgccctccatgcccgggggatgaagacactgctgccatggacagcccgtgccagccgcagcccctaagtcaggctctccctcagttaccagggtcttcgtcagagcccttggagcctgagcctggccgggccaggatgggagtggagagttacctgccctgtcccctgctcccctcctaccactgtccaggagtgcctagtgaggcctcggcagggagtgggacccccagagccacagccacctctaccactgccagccctcttcgggacggttttggcgggcaggatggtggtgagctgcggccgctgcagagtgaaggcgctgcagcgctggtcaccaaggggtgccagcgattggcagcccagggcgcacggcctgaggcccccaaacggaaatgggccgaggatggtgcagccgtggaggccaccgttaccaactgaagctgggggcctgggtcctaccctgtctggtcatgaccccattaggtatggagagctgggaggaggcattgtcacttcccaccaggatgcaggacttggggttgaggtgagtcatggcctcttgctggcaatggggtgggaggagtacccccaagtcctctcactcctccagcctggaatgtgaagtgactccccaacccctttggccatggcaggcaccttttggactgggctgccactgcttgggcagagtaaaaggtgccaggaggagcatgggtgtggaagtcctgtcagccaagaaataaaagtttacctcagagctgca

SEQ ID NO: 295019 - DNA, 1196 bp, Homo sapiens
acgttgggtgccggccgttgtgggggttggggtgggggcggggagcgcgcgccgggcggaggccgagtggagggggaggggagggggtccgagcggcccttaggccctgcccctgtcgcctactgcgctcagaaggggcctcagggcctgccccgggttgggggcgttggggtgccctggatgggggcacctttatctctcgtcctgtctccgggtgcgtgcaccctcctccgtcctttcctctgtcgccgcggaccctctccccgagggcccctcccgtcgccaccctgaagggtcccttcccaagcccttagggaccgcagaggacttggggaccagcaagcaacccccagggcacgagaagagctcttgctgtctgccctgcctcaccctgccccacgccaggcccggtggcccccagctgcatcaagtggaggcggaggaggaggcggaggagggtggcaccatgggcccgggcggtgccctccatgcccgggggatgaagacactgctgccatggacagcccgtgccagccgcagcccctaagtcaggctctccctcagttaccagggtcttcgtcagagcccttggagcctgagcctggccgggccaggatgggagtggagagttacctgccctgtcccctgctcccctcctaccactgtccaggagtgcctagtgaggcctcggcagggagtgggacccccagagccacagccacctctaccactgccagccctcttcgggacggttttggcgggcaggatggtggtgagctgcggccgctgcagagtgaaggcgctgcagcgctggtcaccaaggggtgccagcgattggcaggcagccgtggaggccaccgttaccaactgaagctgggggcctgggtcctaccctgtctggtcatgaccccattaggtatggagagctgggaggaggcattgtcacttcccaccaggatgcaggacttggggttgaggtgagtcatggcctcttgctggcaatggggtgggaggagtacccccaagtcctctcactcctccagcctggaatgtgaagtgactccccaacccctttggccatggcaggcaccttttggactgggctgccactgcttgggcagagtaaaaggtgccaggaggagcatgggtgtggaagtcctgtcagccaagaaataaaagtttacctcagagctgca

SEQ ID NO: 295020 - DNA, 1118 bp, Homo sapiens
gcggaccccacaccctgcccctgctggactcagttggctgacctcgcccaggggctgctcatgatttgaaagttgtcattgataaggcggataatggtgagcagacgctcatcatcatagtcgaagcggctgccgaagagcacggaacagataatgttggaccgtgagcgactcagcacaaacgtggggtcaaagggctcgcctgagggtgaagaatggaatgggtcaggaagacgcgatgtgcagcacaccagacctcatgcagcaacaccattaatttgcacaacatccgactcaaccatggcaacgtgtcttacggtgcaaacacgggcacatggtcacaacatgctgcttaacaacaccccaaaagcatctgtcaatgccacagacagcaccgaacccacagcttcctgcagcacatcgacagcaacaacgcccaaccacagaacaggttggcaacacacacacagcacgcgacatagcacaaggcaatcatcaggcatcacggaacacaacaacacagggcaacagaacacccagcaaatacgatcacagtacatgccaacacacgacacgcagtgacctaatagccagcccggaaacatcccaagacacggtaaccacacaccaacacgtaatgccagcataccgctacataatcctgccacacaacacacgctagtacacagcaacccagcagacagcacagaacacacgatgtggcatcacaacacatacagtcaaggcagcagaacaaaggacacactatgcagcaacgcaacaacgttggcagccagcagatgacacaatgcaaaatcacatgcagtgcctgacaactctacaatctcacccagaaatatctcaacacaacacgtagcatctggccgtccaacagctgaacagaccatagtaaatactgaacaacacatttctttctttccttttttcgagatgaaatctcgctccgtcgcccatgctggagtgcggtggcacgatctcagttcactgcaacgtctgcctcccaggagaatcgcttgaacctgggaggcggaggttgcagtgatccatgatccggccattgcgctccagcctgggtgacgaaagtgaaattccatctc

SEQ ID NO: 295021 - DNA, 1017 bp, Homo sapiens
tttatagcgagcagacgctatatcataggggagttttgaagagagacgaacacccaatgtaggccgaagcactaacacaaacgtggggtcaaagggctcgcctgagggtgaagaatggaatgggtcaggaagacgcgatgtgcagcacaccagacctcatgcagcaacaccattaatttgcacaacatccgactcaaccatggcaacgtgtcttacggtgcaaacacgggcacatggtcacaacatgctgcttaacaacaccccaaaagcatctgtcaatgccacagacagcaccgaacccacagcttcctgcagcacatcgacagcaacaacgcccaaccacagaacaggttggcaacacacacacagcacgcgacatagcacaaggcaatcatcaggcatcacggaacacaacaacacagggcaacagaacacccagcaaatacgatcacagtacatgccaacacacgacacgcagtgacctaatagccagcccggaaacatcccaagacacggtaaccacacaccaacacgtaatgccagcataccgctacataatcctgccacacaacacacgctagtacacagcaacccagcagacagcacagaacacacgatgtggcatcacaacacatacagtcaaggcagcagaacaaaggacacactatgcagcaacgcaacaacgttggcagccagcagatgacacaatgcaaaatcacatgcagtgcctgacaactctacaatctcacccagaaatatctcaacacaacacgtagcatctggccgtccaacagctgaacagaccatagtaaatactgaacaacacatttctttctttccttttttcgagatgaaatctcgctccgtcgcccatgctggagtgcggtggcacgatctcagttcactgcaacgtctgcctcccaggagaatcgcttgaacctgggaggcggaggttgcagtgatccatgatccggccattgcgctccagcctgggtgacgaaagtgaaattccatctc

SEQ ID NO: 295022 - DNA, 822 bp, Homo sapiens
tagcggatcccttttgattattgctaggcagcgggcacatggtcacaacatgctgcttaacaacaccccaaaagcatctgtcaatgccacagacagcaccgaacccacagcttcctgcagcacatcgacagcaacaacgcccaaccacagaacaggttggcaacacacacacagcacgcgacatagcacaaggcaatcatcaggcatcacggaacacaacaacacagggcaacagaacacccagcaaatacgatcacagtacatgccaacacacgacacgcagtgacctaatagccagcccggaaacatcccaagacacggtaaccacacaccaacacgtaatgccagcataccgctacataatcctgccacacaacacacgctagtacacagcaacccagcagacagcacagaacacacgatgtggcatcacaacacatacagtcaaggcagcagaacaaaggacacactatgcagcaacgcaacaacgttggcagccagcagatgacacaatgcaaaatcacatgcagtgcctgacaactctacaatctcacccagaaatatctcaacacaacacgtagcatctggccgtccaacagctgaacagaccatagtaaatactgaacaacacatttctttctttccttttttcgagatgaaatctcgctccgtcgcccatgctggagtgcggtggcacgatctcagttcactgcaacgtctgcctcccaggagaatcgcttgaacctgggaggcggaggttgcagtgatccatgatccggccattgcgctccagcctgggtgacgaaagtgaaattccatctc

SEQ ID NO: 295023 - DNA, 759 bp, Homo sapiens
gcggaccccacaccctgcccctgctggactcagttggctgacctcgcccaggggctgctcatgatttgaaagttgtcattgataaggcggataatggtgagcagacgctcatcatcatagtcgaagcggctgccgaagagcacggaacagataatgttggaccgtgagcgactcagcacaaacgtggggtcaaagggctcgcctgagggtgaagaatggaatgggtcaggaagacgcgatgtgcagcacaccagacctcatgcagcaacaccattaatttgcacaacatccgactcaaccatggcaacgtgtcttacggtgcaaacacgggcacatggtcacaacatgctgcttaacaacaccccaaaagcatctgtcaatgccacagacagcaccgaacccacagcttcctgcagcacatcgacagcaacaacgcccaaccacagaacaggttggcaacacacacacagcacgcgacatagcacaaggcaatcatcaggcatcacggaacacaacaacacagggcaacagaacacccagcaaatacgatcacagtacatgccaacacacgacacgcagtgacctaatagccagcccggaaacatcccaagacacggtaaccacacaccaacacgtaatgccagcataccgctacataatcctgccaagcactagtgtcctgccaagcactagtgtcctgccaagcactagtgtcctgccaagcactagtgtcctgccacagcactagtgtcctgccaa

SEQ ID NO: 295024 - DNA, 391 bp, Homo sapiens
tccacatgcacagtttacagcaagaagtatggagccattcttactttctgttccttttttgtttttgagagacggagttttgctcgtttcccaggctgtcgaagcattggtgccctcatggcccatgtggacgccgtcatccgccactgcgcagggcggctgggcagctatgtcatcaacgggcgcaccaaggccatggtggcgtgttacccaggcaacgggctcgggtacgtaaggcacgttgacaatccccacgtccccaacccctttggccatggcaggcaccttttggactgggctgccactgcttgggcagagtaaaaggtgccaggaggagcatgggtgtggaagtcctgtcagccaagaaataaaagtttacctcagagctgca

SEQ ID NO: 295025 - DNA, 356 bp, Homo sapiens
agaggggaccccagggagagtccagcttgcttggtttgctccttgaagagcagcttggaggtgggacagtcacaggcttctgactggggtgtgtgtgtagtgggggtggggctcttggcaggcagattgtcaccaatagcctttaagtctttggtctcctggccctggtcccacctgtccctcccctaggtgggaggggtggagagcaagtttcctgaggccttcccctgtgagggcaggaagtagatactttccttggggccagaggatgctttcacccccaaggtgtgtatatgtgggggaagggtggggccctaaagagcaggttcctgtttctgtgtgagtcccatgtgctt

SEQ ID NO: 295026 - DNA, 4171 bp, Homo sapiens
gtgggacagtcacaggcttctgactggggtgtgtgtgtagtgggggtggggctcttggcaggcagattgtcaccaatagcctttaagtctttggtctcctggccctggtcccacctgtccctcccctaggtgggaggggtggagagcaagtttcctgaggccttcccctgtgagggcaggaagtagatactttccttggggccagaggatgctttcacccccaaggtgtgtatatgtgggggaagggtggggccctaaagagcaggttcctgtttctgtgtgagtcccatgtgcttggtgggaggcgctgtgtgagaatgtacagggcaggaggaaacatagcagggctggggtgcagaggaggcccagagcagtgcactccagtctgcaggtactgcactgggcactggggagaccaacctggccccaggggcttccctgtggctgccttccagggcagtactaggtaaacaggtgcctgtgctgatgccatgttgctaggagtggaacggacaatcagccggagtactcaaggtgacccttggtctctgaatcctgaataacaaagagggtcagaaggaagagtgtcccaggccagtgctgaggccttgtggtggcgatgagctcagcctgttgaggcatggagcagagtgatgggagaggcacatgaggttgggggcctttgaggctgtggttgggaatttgtattttctcaggatggagtgaagacctggagaggaggggctctggctgctgtgtggggatgaattgtgggaagagggtgcagcactggaccccttccctgccacccatccacgtgcatcatcagtgtaatctctgattggattcctaattggggaggtcttgcccatctctagtcagtaactcactgtttctaagcctcctggaccatggcccaattcttctcccagtgaggtggttgctcagagtgccgacccttccatagggagtgagcagtgcaaagaaggtgccccctcctgaaccttgaagtgtagccattagggttttccctggggggccttctcactaattgtactctggtgctgccagagagaaggttgtcagcttcccactgctaggtggcagtagatggtggcagccctctctttccagggcaaggtctggtggatgaggtgcacatggttaatgcagagcagcttaacatccaccacagagggtgagccctgggataatgtgttgggaggcgtcctggggagggtgaggattgaagcagcccagtctgctgtggcgtgcgtgcttggcaagcatcctgttgtggcagtggccactgatgtttgatcgtgaatgtttatcttgggactgtcttgctgggccgggcccataggtgtagctgagcattcgtggggaatggacgccagcagagttgtaccagggcagagaggtcagggcagagaggtcaagacagatggtccgggctggggagaagttgaagggtccttgtgccagtcctcccctttttgtgtgctacctcatcttgccactgcagtgactttgggcagagggtgggacagggaccttttaaaatttttaaatggcatttcagcctgtgctccagttctccatgtggcaggcactgtgctggctgtcttcccagacacttgttatcttgttcacttgttccacaacaacctgtgaaatagctgtgagctccattggatccatggatgaggaacctgagaccaggaagtcacctgcctgatgccacagctcatgtggcagcactgagacttgaaccagggaattgtgtctgcagaagtggctgggccatttcctttacctctcagccacctttctgccagctccctgatgacaaacatcccggggccctggccacagcattgtagggctgggtcaggggagtggcaactgtcaggcagaggaaagaaccctgtagacagagaaaccaagccctgcaatgagtcctgttagatctccaggagttggggctccagaacctcccaagttatgttctcagagagattaattgctaccgctgtaaacagcagtgtttattacccctgctgtacacatcaggcagttgaggcccattcaggtgttggaactggctagggttacccagcaaattatccttggagttggaattaggtctttctattcagactgtagcttttggctcctgttcggaggtctatgggacagataatttagtggggattctttgtagtccagggcagcagttcttaacattgctgcatggtagaattacctgggaagctttaccaatttcaggcccttccttaggccaggtacttcagaacctcagagctccccagggggctccactccacagccaagggtaagaattcctggtctagggctgtgaggccacctccttgcacacctgaaaatgtttaaattggtattattctactgaaatggctgaggtggggtttggggtatcttgaaacaaatcaaactctgttactaattgagccctagctgggtgccaggccccaggtatgtgtgttgggagggagtgggctcttgaggcccaggagctgaggtttctgatagacttggggatgggattttggctgaaaaagaaagtcttttggggcaggagcttggaacccttgacccaaggagtcatggggaagatggggcaaggaggggtgggaaaataggtaattcatggctgcttctctaagatgtgcctgcctagccccagtaaacctacctccctccatccctgccaggccatggtggcgtgttacccaggcaacgggctcgggtacgtaaggcacgttgacaatccccacggcgatgggcgctgcatcacctgtatctattacctgaatcagaactgggacgttaaggtaggggtgagggtgagggtgagggtggcgctggggctagggctggggcgggggtggcgtgcgtccactccattttccactctcagcccagattctggcattctcctgtttctcttctcaacacacagcgggcagtgcgatctgccggctcttcctgggaaatggcacctcctcctctctagcggactgtgtggtgggaactcccctctttccgggaatggtgctgtctgcccagccccacccggccttgtaatgaacactttcccccttttcctgtctttagtagcttcctgcccatctccatggtgatgcagtctctgggttgtcattcactttgagagcccgaggggtgggagggagtgatgcaggcagacgctgcgcctcctagtgggctcccggggcaccgtgggaggcagcggctcctggccgtaccagctagcctcatcctttggcctgcccccaggtgcatggcggcctgctgcagatcttccctgagggccggcccgtggtagccaacatcgagccactctttgaccggttgctcattttctggtctgaccggcggaacccccacgaggtgaagccagcctatgccaccaggtacgccatcactgtctggtattttgatgccaaggagcgggcagcagccaaagacaagtatcagctagcatcaggacagaaaggtgtccaagtacctgtatcacagccgcctacgcccacctagtggccagtcccagagccgcatggcagacagcttaaatgacttcaggagagccctgggcctgtgctggctgctccttccctgccaccgctgctgcttctgactttgcctctgtcctgcctggtgtggagggctctgtctgttgctgaggaccaaggaggagaagagacctttgctgccccatcatgggggctggggttgtcacctggacagggggcagccgtggaggccaccgttaccaactgaagctgggggcctgggtcctaccctgtctggtcatgaccccattaggtatggagagctgggaggaggcattgtcacttcccaccaggatgcaggacttggggttgaggtgagtcatggcctcttgctggcaatggggtgggaggagtacccccaagtcctctcactcctccagcctggaatgtgaagtgactccccaacccctttggccatggcaggcaccttttggactgggctgccactgcttgggcagagtaaaaggtgccaggaggagcatgggtgtggaagtcctgtcagccaagaaataaaagtttacctcagagctgca

SEQ ID NO: 295027 - DNA, 593 bp, Homo sapiens
gactgagaccacagccttaacaaacaaggaggggcacttatctttttgctttgaaagccagcatcctggagctggtccggccctatgaatgccttggtggcccgggtactgagcacagagagccaccatttccaaaggtttgaatgagttaacacttggcagcaattgcattcccgtgcacttagagtcgagacacatggagaagggttctggggtaggcttcttctttcccttttttctttttcctttttggttgttttatgtttaaaaaccacatgtctgtacggaggagcttggttagctgacattgttttacagtgctgaaaaagaagcgtggcattgaacggcatgcaccagctaaagggctgcaagcagtgagtcatgcagtctcagactgcagcgtccctaggcctgcagaattaacaaaatatatgtgtgtatatatgtagcattggttccaaaaggaatcagaacagcccagaagtgtccaaattaagcacccatgttccaccaaccccaagggggggagaacctaagtcttcccctttggtggggaactggacccctatcttccttccccggattaaagcctt

SEQ ID NO: 295028 - DNA, 1293 bp, Homo sapiens
ggttttttttttttaccccccttttttatttattatttttttgcacattgagcggatccttgggaacgagagaaaaaagaaacccaaactcacgcgtgcagaagatctccccccccttcccctcccctcctccctcttttcccctccccaggagaaaaagacccccaagcagaaaaaagttcaccttggactcgtctttttcttgcaatattttttgggggggcaaaactttttgggggtgattttttttggcttttcttcctccttcatttttcttccaaaattgctgctggtgggtgaaaaaaaaatgccgcagctgaacggcggtggaggggatgacctaggcgccaacgacgaactgatttccttcaaagacgagggcgaacaggaggagaagagctccgaaaactcctcggcagagagggatttagctgatgtcaaatcgtctctagtcaatgaatcagaaacgaatcaaaacagctcctccgattccgaggcggaaagacggcctccgcctcgctccgaaagtttccgagacaaatcccgggaaagtttggaagaagcggccaagaggcaagatggagggctctttaaggggccaccgtatcccggctaccccttcatcatgatccccgacctgacgagcccctacctccccaacggatcgctctcgcccaccgcccgaaccctccattttcagtccggcagcacacattactctgcgtacaaaacgattgaacaccagattgcagttcagtatctccagatgaaatggccactgcttgatgtccaggcagggagcctccagagtagacaagccctcaaggatgcccggtccccatcaccggcacacattgtcagccccctcccttgctgcactcagggacatgactgtcagcacttctaccccccctcagacttcactgtcagcactcaagtcttcagggacatgaaaaggagccactccttacaaaaagttggggagccctggtgtattgagtctaacaaagtgccagtggtgcagcaccctcaccatgtccaccccctcacgcctcttatcacgtacagcaatgaacacttcacgccgggaaacccacctccacacttaccagccgacgtagaccccaaaacagaatccacggctcgacctccagatatattcccgtattaccactattgctggggcggaggaaaatccccatccgtagatggttgtcccagcgcgggtaccgggttcctccgcaaggggtgtaaaccttcccagttgtcgcagtccagtggggcccccatggc

SEQ ID NO: 295029 - DNA, 3812 bp, Homo sapiens
  misc_feature (1612)..(1612): n is a, c, g, or t
ggttttttttttttaccccccttttttatttattatttttttgcacattgagcggatccttgggaacgagagaaaaaagaaacccaaactcacgcgtgcagaagatctccccccccttcccctcccctcctccctcttttcccctccccaggagaaaaagacccccaagcagaaaaaagttcaccttggactcgtctttttcttgcaatattttttgggggggcaaaactttttgggggtgattttttttggcttttcttcctccttcatttttcttccaaaattgctgctggtgggtgaaaaaaaaatgccgcagctgaacggcggtggaggggatgacctaggcgccaacgacgaactgatttccttcaaagacgagggcgaacaggaggagaagagctccgaaaactcctcggcagagagggatttagctgatgtcaaatcgtctctagtcaatgaatcagaaacgaatcaaaacagctcctccgattccgaggcggaaagacggcctccgcctcgctccgaaagtttccgagacaaatcccgggaaagtttggaagaagcggccaagaggcaagatggagggctctttaaggggccaccgtatcccggctaccccttcatcatgatccccgacctgacgagcccctacctccccaacggatcgctctcgcccaccgcccgaacctatctccagatgaaatggccactgcttgatgtccaggcagggagcctccagagtagacaagccctcaaggatgcccggtccccatcaccggcacacattgtctctaacaaagtgccagtggtgcagcaccctcaccatgtccaccccctcacgcctcttatcacgtacagcaatgaacacttcacgccgggaaacccacctccacacttaccagccgacgtagaccccaaaacaggaatcccacggcctccgcaccctccagatatatccccgtattacccactatcgcctggcaccgtaggacaaatcccccatccgctaggatggttagtaccacagcaaggtcaaccagtgtacccaatcacgacaggaggattcagacacccctaccccacagctctgaccgtcaatgcttccatgtccaggttccctccccatatggtcccaccacatcatacgctacacacgacgggcattccgcatccggccatagtcacaccaacagtcaaacaggaatcgtcccagagtgatgtcggctcactccatagttcaaagcatcaggactccaaaaaggaagaagaaaagaagaagccccacataaagaaacctcttaatgcattcatgttgtatatgaaggaaatgagagcaaaggtcgtagctgagtgcacgttgaaagaaagcgcggccatcaaccagatccttgggcggaggtggcatgcactgtccagagaagagcaagcgaaatactacgagctggcccggaaggagcgacagcttcatatgcaactgtaccccggctggtccgcgcgggataactatggaaagaagaagaagaggaaaagggacaagcagccgggagagaccaatgaacacagcgaatgtttcctaaatccttgcctttcacttcctccgattacagacctnagcgctcctaagaaatgccgagcgcgctttggccttgatcaacagaataactggtgcggcccttgcaggagaaaaaaaaagtgcgttcgctacatacaaggtgaaggcagctgcctcagcccaccctcttcagatggaagcttactagattcgcctcccccctccccgaacctgctaggctcccctccccgagacgccaagtcacagactgagcagacccagcctctgtcgctgtccctgaagcccgaccccctggcccacctgtccatgatgcctccgccacccgccctcctgctcgctgaggccacccacaaggcctccgccctctgtcccaacggggccctggacctgcccccagccgctttgcagcctgccgccccctcctcatcaattgcacagccgtcgacttcttccttacattcccacagctccctggccgggacccagccccagccgctgtcgctcgtcaccaagtctttagaatagctttagcgtcgtgaaccccgctgctttgtttatggttttgtttcacttttcttaatttgccccccacccccaccttgaaaggttttgttttgtactctcttaattttgtgccatgtggctacattagttgatgtttatcgagttcattggtcaatatttgacccattcttatttcaatttctccttttaaatatgtagatgagagaagaacctcatgattctaccaaaatttttatcaacagctgtttaaagtctttgtagcgtttaaaaaatatatatatatacataactgttatgtagttcggatagcttagttttaaaagactgattaaaaaacaaaaagaaaaaaaaagcaattttgaagcagccctccagaaggagttggttctgtattatttgtattaaatacgagcttgcgaaccaatcattttacatctggtttttaaaccgtaagggcaccatgaatgcagtgccgttacttttttttttttttttctgtgtgaaacaactcttattgtgatgttacttgttattgtttaaatgtacagaaacaaagggtaaaaatgtgttaatataccttgttccatggtgttgttcttttggggggaggggacgctactcaacacttaatagaatcacaacgctgttgggccagtagtatttattgctttagagattgcttgtcgtacctgtatgtcgtccctttttaaatatgttttcctttttcttgaaactgtataaagtttttttcccccttagcataagcatcttatatataacaactcatttgtacaaggtttttaagtttatatataaaatgtgtatatatatttttgtttcccctttttgacttttttttttctgtatgaaacccagatgtcaccaaatggacattaatagttgcattaaggatcagtagcattaacaaaagttgctttaaaagccattatgtaaaacaagacttgaaaatgagtgagggaattttagcgacactgtctgagcagcagtgggaaccatcttcgtttcccctttgaactcccagtgggatgccctaccctgcgcccttaggacccggactgaccgtgtacaaaactttacgtgccaaaattctcagtgaatttagctttctccctctttttgatgctgtaatttttgttcatcatgttttgctgtgatgttacataggtagatttgtatgtagttttaatgtcacctataacaaaatgtgtttggtagcagattgtccagaaagcattttaaatgaagaggtataaacccttaagggccaaaattctgtatattagattactcttaaacgaaaaaccagctgccgcttttatgtacacatattacatacgagtaggcagcagactttaaaaataaaaaaaacctaggcatgttgatgttgcaaaatgctgtataaagctgaaacctgttcattcagtgccattgtagttgacatgaagcgattgtaaaactgtctccgatttttctctggtttattaaaatgctaactataacattttttgtgaatactttgaatgtttcctaacagttgtgatgttactgttccgttttatgctcttattccaagttcatttttaatggtttggaagccatttttgtaatgaataaatgttcatgctgtacagtatctgtagcatgccgttctggattaataaaagcaacttagtatgtgcagataaaggaaggt

SEQ ID NO: 295030 - DNA, 3808 bp, Homo sapiens
ggttttttttttttaccccccttttttatttattatttttttgcacattgagcggatccttgggaacgagagaaaaaagaaacccaaactcacgcgtgcagaagatctccccccccttcccctcccctcctccctcttttcccctccccaggagaaaaagacccccaagcagaaaaaagttcaccttggactcgtctttttcttgcaatattttttgggggggcaaaactttttgggggtgattttttttggcttttcttcctccttcatttttcttccaaaattgctgctggtgggtgaaaaaaaaatgccgcagctgaacggcggtggaggggatgacctaggcgccaacgacgaactgatttccttcaaagacgagggcgaacaggaggagaagagctccgaaaactcctcggcagagagggatttagctgatgtcaaatcgtctctagtcaatgaatcagaaacgaatcaaaacagctcctccgattccgaggcggaaagacggcctccgcctcgctccgaaagtttccgagacaaatcccgggaaagtttggaagaagcggccaagaggcaagatggagggctctttaaggggccaccgtatcccggctaccccttcatcatgatccccgacctgacgagcccctacctccccaacggatcgctctcgcccaccgcccgaaccctccattttcagtccggcagcacacattactctgcgtacaaaacgattgaacaccagattgcagttcagtatctccagatgaaatggccactgcttgatgtccaggcagggagcctccagagtagacaagccctcaaggatgcccggtccccatcaccggcacacattgtctctaacaaagtgccagtggtgcagcaccctcaccatgtccaccccctcacgcctcttatcacgtacagcaatgaacacttcacgccgggaaacccacctccacacttaccagccgacgtagaccccaaaacaggaatcccacggcctccgcaccctccagatatatccccgtattacccactatcgcctggcaccgtaggacaaatcccccatccgctaggatggttagtaccacagcaaggtcaaccagtgtacccaatcacgacaggaggattcagacacccctaccccacagctctgaccgtcaatgcttccatgtccaggttccctccccatatggtcccaccacatcatacgctacacacgacgggcattccgcatccggccatagtcacaccaacagtcaaacaggaatcgtcccagagtgatgtcggctcactccatagttcaaagcatcaggactccaaaaaggaagaagaaaagaagaagccccacataaagaaacctcttaatgcattcatgttgtatatgaaggaaatgagagcaaaggtcgtagctgagtgcacgttgaaagaaagcgcggccatcaaccagatccttgggcggaggtggcatgcactgtccagagaagagcaagcgaaatactacgagctggcccggaaggagcgacagcttcatatgcaactgtaccccggctggtccgcgcgggataactatggaaagaagaagaagaggaaaagggacaagcagccgggagagaccaatgaacacagcgaatgtttcctaaatccttgcctttcacttcctccgattacaggagaaaaaaaaagtgcgttcgctacatacaaggtgaaggcagctgcctcagcccaccctcttcagatggaagcttactagattcgcctcccccctccccgaacctgctaggctcccctccccgagacgccaagtcacagactgagcagacccagcctctgtcgctgtccctgaagcccgaccccctggcccacctgtccatgatgcctccgccacccgccctcctgctcgctgaggccacccacaaggcctccgccctctgtcccaacggggccctggacctgcccccagccgctttgcagcctgccgccccctcctcatcaattgcacagccgtcgacttcttccttacattcccacagctccctggccgggacccagccccagccgctgtcgctcgtcaccaagtctttagaatagctttagcgtcgtgaaccccgctgctttgtttatggttttgtttcacttttcttaatttgccccccacccccaccttgaaaggttttgttttgtactctcttaattttgtgccatgtggctacattagttgatgtttatcgagttcattggtcaatatttgacccattcttatttcaatttctccttttaaatatgtagatgagagaagaacctcatgattctaccaaaatttttatcaacagctgtttaaagtctttgtagcgtttaaaaaatatatatatatacataactgttatgtagttcggatagcttagttttaaaagactgattaaaaaacaaaaagaaaaaaaaagcaattttgaagcagccctccagaaggagttggttctgtattatttgtattaaatacgagcttgcgaaccaatcattttacatctggtttttaaaccgtaagggcaccatgaatgcagtgccgttacttttttttttttttttctgtgtgaaacaactcttattgtgatgttacttgttattgtttaaatgtacagaaacaaagggtaaaaatgtgttaatataccttgttccatggtgttgttcttttggggggaggggacgctactcaacacttaatagaatcacaacgctgttgggccagtagtatttattgctttagagattgcttgtcgtacctgtatgtcgtccctttttaaatatgttttcctttttcttgaaactgtataaagtttttttcccccttagcataagcatcttatatataacaactcatttgtacaaggtttttaagtttatatataaaatgtgtatatatatttttgtttcccctttttgacttttttttttctgtatgaaacccagatgtcaccaaatggacattaatagttgcattaaggatcagtagcattaacaaaagttgctttaaaagccattatgtaaaacaagacttgaaaatgagtgagggaattttagcgacactgtctgagcagcagtgggaaccatcttcgtttcccctttgaactcccagtgggatgccctaccctgcgcccttaggacccggactgaccgtgtacaaaactttacgtgccaaaattctcagtgaatttagctttctccctctttttgatgctgtaatttttgttcatcatgttttgctgtgatgttacataggtagatttgtatgtagttttaatgtcacctataacaaaatgtgtttggtagcagattgtccagaaagcattttaaatgaagaggtataaacccttaagggccaaaattctgtatattagattactcttaaacgaaaaaccagctgccgcttttatgtacacatattacatacgagtaggcagcagactttaaaaataaaaaaaacctaggcatgttgatgttgcaaaatgctgtataaagctgaaacctgttcattcagtgccattgtagttgacatgaagcgattgtaaaactgtctccgatttttctctggtttattaaaatgctaactataacattttttgtgaatactttgaatgtttcctaacagttgtgatgttactgttccgttttatgctcttattccaagttcatttttaatggtttggaagccatttttgtaatgaataaatgttcatgctgtacagtatctgtagcatgccgttctggattaataaaagcaacttagtatgtgcagataaaggaaggt

SEQ ID NO: 295031 - DNA, 3757 bp, Homo sapiens
ggttttttttttttaccccccttttttatttattatttttttgcacattgagcggatccttgggaacgagagaaaaaagaaacccaaactcacgcgtgcagaagatctccccccccttcccctcccctcctccctcttttcccctccccaggagaaaaagacccccaagcagaaaaaagttcaccttggactcgtctttttcttgcaatattttttgggggggcaaaactttttgggggtgattttttttggcttttcttcctccttcatttttcttccaaaattgctgctggtgggtgaaaaaaaaatgccgcagctgaacggcggtggaggggatgacctaggcgccaacgacgaactgatttccttcaaagacgagggcgaacaggaggagaagagctccgaaaactcctcggcagagagggatttagctgatgtcaaatcgtctctagtcaatgaatcagaaacgaatcaaaacagctcctccgattccgaggcggaaagacggcctccgcctcgctccgaaagtttccgagacaaatcccgggaaagtttggaagaagcggccaagaggcaagatggagggctctttaaggggccaccgtatcccggctaccccttcatcatgatccccgacctgacgagcccctacctccccaacggatcgctctcgcccaccgcccgaaccctccattttcagtccggcagcacacattactctgcgtacaaaacgattgaacaccagattgcagttcagtatctccagatgaaatggccactgcttgatgtccaggcagggagcctccagagtagacaagccctcaaggatgcccggtccccatcaccggcacacattgtctctaacaaagtgccagtggtgcagcaccctcaccatgtccaccccctcacgcctcttatcacgtacagcaatgaacacttcacgccgggaaacccacctccacacttaccagccgacgtagaccccaaaacaggaatcccacggcctccgcaccctccagatatatccccgtattacccactatcgcctggcaccgtaggacaaatcccccatccgctaggatggttagtaccacagcaaggtcaaccagtgtacccaatcacgacaggaggattcagacacccctaccccacagctctgaccgtcaatgcttccatgtccaggttccctccccatatggtcccaccacatcatacgctacacacgacgggcattccgcatccggccatagtcacaccaacagtcaaacaggaatcgtcccagagtgatgtcggctcactccatagttcaaagcatcaggactccaaaaaggaagaagaaaagaagaagccccacataaagaaacctcttaatgcattcatgttgtatatgaaggaaatgagagcaaaggtcgtagctgagtgcacgttgaaagaaagcgcggccatcaaccagatccttgggcggaggtggcatgcactgtccagagaagagcaagcgaaatactacgagctggcccggaaggagcgacagcttcatatgcaactgtaccccggctggtccgcgcgggataactatggaaagaagaagaagaggaaaagggacaagcagccgggagagaccaatggagaaaaaaaaagtgcgttcgctacatacaaggtgaaggcagctgcctcagcccaccctcttcagatggaagcttactagattcgcctcccccctccccgaacctgctaggctcccctccccgagacgccaagtcacagactgagcagacccagcctctgtcgctgtccctgaagcccgaccccctggcccacctgtccatgatgcctccgccacccgccctcctgctcgctgaggccacccacaaggcctccgccctctgtcccaacggggccctggacctgcccccagccgctttgcagcctgccgccccctcctcatcaattgcacagccgtcgacttcttccttacattcccacagctccctggccgggacccagccccagccgctgtcgctcgtcaccaagtctttagaatagctttagcgtcgtgaaccccgctgctttgtttatggttttgtttcacttttcttaatttgccccccacccccaccttgaaaggttttgttttgtactctcttaattttgtgccatgtggctacattagttgatgtttatcgagttcattggtcaatatttgacccattcttatttcaatttctccttttaaatatgtagatgagagaagaacctcatgattctaccaaaatttttatcaacagctgtttaaagtctttgtagcgtttaaaaaatatatatatatacataactgttatgtagttcggatagcttagttttaaaagactgattaaaaaacaaaaagaaaaaaaaagcaattttgaagcagccctccagaaggagttggttctgtattatttgtattaaatacgagcttgcgaaccaatcattttacatctggtttttaaaccgtaagggcaccatgaatgcagtgccgttacttttttttttttttttctgtgtgaaacaactcttattgtgatgttacttgttattgtttaaatgtacagaaacaaagggtaaaaatgtgttaatataccttgttccatggtgttgttcttttggggggaggggacgctactcaacacttaatagaatcacaacgctgttgggccagtagtatttattgctttagagattgcttgtcgtacctgtatgtcgtccctttttaaatatgttttcctttttcttgaaactgtataaagtttttttcccccttagcataagcatcttatatataacaactcatttgtacaaggtttttaagtttatatataaaatgtgtatatatatttttgtttcccctttttgacttttttttttctgtatgaaacccagatgtcaccaaatggacattaatagttgcattaaggatcagtagcattaacaaaagttgctttaaaagccattatgtaaaacaagacttgaaaatgagtgagggaattttagcgacactgtctgagcagcagtgggaaccatcttcgtttcccctttgaactcccagtgggatgccctaccctgcgcccttaggacccggactgaccgtgtacaaaactttacgtgccaaaattctcagtgaatttagctttctccctctttttgatgctgtaatttttgttcatcatgttttgctgtgatgttacataggtagatttgtatgtagttttaatgtcacctataacaaaatgtgtttggtagcagattgtccagaaagcattttaaatgaagaggtataaacccttaagggccaaaattctgtatattagattactcttaaacgaaaaaccagctgccgcttttatgtacacatattacatacgagtaggcagcagactttaaaaataaaaaaaacctaggcatgttgatgttgcaaaatgctgtataaagctgaaacctgttcattcagtgccattgtagttgacatgaagcgattgtaaaactgtctccgatttttctctggtttattaaaatgctaactataacattttttgtgaatactttgaatgtttcctaacagttgtgatgttactgttccgttttatgctcttattccaagttcatttttaatggtttggaagccatttttgtaatgaataaatgttcatgctgtacagtatctgtagcatgccgttctggattaataaaagcaacttagtatgtgcagataaaggaaggt

SEQ ID NO: 295032 - DNA, 3627 bp, Homo sapiens
  misc_feature (1612)..(1612): n is a, c, g, or t
ggttttttttttttaccccccttttttatttattatttttttgcacattgagcggatccttgggaacgagagaaaaaagaaacccaaactcacgcgtgcagaagatctccccccccttcccctcccctcctccctcttttcccctccccaggagaaaaagacccccaagcagaaaaaagttcaccttggactcgtctttttcttgcaatattttttgggggggcaaaactttttgggggtgattttttttggcttttcttcctccttcatttttcttccaaaattgctgctggtgggtgaaaaaaaaatgccgcagctgaacggcggtggaggggatgacctaggcgccaacgacgaactgatttccttcaaagacgagggcgaacaggaggagaagagctccgaaaactcctcggcagagagggatttagctgatgtcaaatcgtctctagtcaatgaatcagaaacgaatcaaaacagctcctccgattccgaggcggaaagacggcctccgcctcgctccgaaagtttccgagacaaatcccgggaaagtttggaagaagcggccaagaggcaagatggagggctctttaaggggccaccgtatcccggctaccccttcatcatgatccccgacctgacgagcccctacctccccaacggatcgctctcgcccaccgcccgaacctatctccagatgaaatggccactgcttgatgtccaggcagggagcctccagagtagacaagccctcaaggatgcccggtccccatcaccggcacacattgtctctaacaaagtgccagtggtgcagcaccctcaccatgtccaccccctcacgcctcttatcacgtacagcaatgaacacttcacgccgggaaacccacctccacacttaccagccgacgtagaccccaaaacaggaatcccacggcctccgcaccctccagatatatccccgtattacccactatcgcctggcaccgtaggacaaatcccccatccgctaggatggttagtaccacagcaaggtcaaccagtgtacccaatcacgacaggaggattcagacacccctaccccacagctctgaccgtcaatgcttccatgtccaggttccctccccatatggtcccaccacatcatacgctacacacgacgggcattccgcatccggccatagtcacaccaacagtcaaacaggaatcgtcccagagtgatgtcggctcactccatagttcaaagcatcaggactccaaaaaggaagaagaaaagaagaagccccacataaagaaacctcttaatgcattcatgttgtatatgaaggaaatgagagcaaaggtcgtagctgagtgcacgttgaaagaaagcgcggccatcaaccagatccttgggcggaggtggcatgcactgtccagagaagagcaagcgaaatactacgagctggcccggaaggagcgacagcttcatatgcaactgtaccccggctggtccgcgcgggataactatggaaagaagaagaagaggaaaagggacaagcagccgggagagaccaatgaacacagcgaatgtttcctaaatccttgcctttcacttcctccgattacagacctnagcgctcctaagaaatgccgagcgcgctttggccttgatcaacagaataactggtgcggcccttgcaggagaaaaaaaaagtgcgttcgctacatacaaggtgaaggcagctgcctcagcccaccctcttcagatggaagcttactagattcgcctcccccctccccgaacctgctaggctcccctccccgagacgccaagtcacagactgagcagacccagcctctgtcgctgtccctgaagcccgaccccctggcccacctgtccatgatgcctccgccacccgccctcctgctcgctgaggccacccacaaggcctccgccctctgtcccaacggggccctggacctgcccccagccgctttgcagcctgccgccccctcctcatcaattgcacagccgtcgacttcttccttacattcccacagctccctggccgggacccagccccagccgctgtcgctcgtcaccaagtctttagaatagctttagcgtcgtgaaccccgctgctttgtttatggttttgtttcacttttcttaatttgccccccacccccaccttgaaaggttttgttttgtactctcttaattttgtgccatgtggctacattagttgatgtttatcgagttcattggtcaatatttgacccattcttatttcaatttctccttttaaatatgtagatgagagaagaacctcatgattctaccaaaatttttatcaacagctgtttaaagtctttgtagcgtttaaaaaatatatatatatacataactgttatgtagttcggatagcttagttttaaaagactgattaaaaaacaaaaagaaaaaaaaagcaattttgaagcagccctccagaaggagttggttctgtattatttgtattaaatacgagcttgcgaaccaatcattttacatctggtttttaaaccgtaagggcaccatgaatgcagtgccgttacttttttttttttttttctgtgtgaaacaactcttattgtgatgttacttgttattgtttaaatgtacagaaacaaagggtaaaaatgtgttaatataccttgttccatggtgttgttcttttggggggaggggacgctactcaacacttaatagaatcacaacgctgttgggccagtagtatttattgctttagagattgcttgtcgtacctgtatgtcgtccctttttaaatatgttttcctttttcttgaaactgtataaagtttttttcccccttagcataagcatcttatatataacaactcatttgtacaaggtttttaagtttatatataaaatgtgtatatatatttttgtttcccctttttgacttttttttttctgtatgaaacccagatgtcaccaaatggacattaatagttgcattaaggatcagtagcattaacaaaagttgctttaaaagccattatgtaaaacaagacttgaaaatgagtgagggaattttagcgacactgtctgagcagcagtgggaaccatcttcgtttcccctttgaactcccagtgggatgccctaccctgcgcccttaggacccggactgaccgtgtacaaaactttacggccaaaattctgtatattagattactcttaaacgaaaaaccagctgccgcttttatgtacacatattacatacgagtaggcagcagactttaaaaataaaaaaaacctaggcatgttgatgttgcaaaatgctgtataaagctgaaacctgttcattcagtgccattgtagttgacatgaagcgattgtaaaactgtctccgatttttctctggtttattaaaatgctaactataacattttttgtgaatactttgaatgtttcctaacagttgtgatgttactgttccgttttatgctcttattccaagttcatttttaatggtttggaagccatttttgtaatgaataaatgttcatgctgtacagtatctgtagcatgccgttctggattaataaaagcaacttagtatgtgcagataaaggaaggt

SEQ ID NO: 295033 - DNA, 3754 bp, Homo sapiens
  misc_feature (1612)..(1612): n is a, c, g, or t
ggttttttttttttaccccccttttttatttattatttttttgcacattgagcggatccttgggaacgagagaaaaaagaaacccaaactcacgcgtgcagaagatctccccccccttcccctcccctcctccctcttttcccctccccaggagaaaaagacccccaagcagaaaaaagttcaccttggactcgtctttttcttgcaatattttttgggggggcaaaactttttgggggtgattttttttggcttttcttcctccttcatttttcttccaaaattgctgctggtgggtgaaaaaaaaatgccgcagctgaacggcggtggaggggatgacctaggcgccaacgacgaactgatttccttcaaagacgagggcgaacaggaggagaagagctccgaaaactcctcggcagagagggatttagctgatgtcaaatcgtctctagtcaatgaatcagaaacgaatcaaaacagctcctccgattccgaggcggaaagacggcctccgcctcgctccgaaagtttccgagacaaatcccgggaaagtttggaagaagcggccaagaggcaagatggagggctctttaaggggccaccgtatcccggctaccccttcatcatgatccccgacctgacgagcccctacctccccaacggatcgctctcgcccaccgcccgaacctatctccagatgaaatggccactgcttgatgtccaggcagggagcctccagagtagacaagccctcaaggatgcccggtccccatcaccggcacacattgtctctaacaaagtgccagtggtgcagcaccctcaccatgtccaccccctcacgcctcttatcacgtacagcaatgaacacttcacgccgggaaacccacctccacacttaccagccgacgtagaccccaaaacaggaatcccacggcctccgcaccctccagatatatccccgtattacccactatcgcctggcaccgtaggacaaatcccccatccgctaggatggttagtaccacagcaaggtcaaccagtgtacccaatcacgacaggaggattcagacacccctaccccacagctctgaccgtcaatgcttccatgtccaggttccctccccatatggtcccaccacatcatacgctacacacgacgggcattccgcatccggccatagtcacaccaacagtcaaacaggaatcgtcccagagtgatgtcggctcactccatagttcaaagcatcaggactccaaaaaggaagaagaaaagaagaagccccacataaagaaacctcttaatgcattcatgttgtatatgaaggaaatgagagcaaaggtcgtagctgagtgcacgttgaaagaaagcgcggccatcaaccagatccttgggcggaggtggcatgcactgtccagagaagagcaagcgaaatactacgagctggcccggaaggagcgacagcttcatatgcaactgtaccccggctggtccgcgcgggataactatggaaagaagaagaagaggaaaagggacaagcagccgggagagaccaatgaacacagcgaatgtttcctaaatccttgcctttcacttcctccgattacagacctnagcgctcctaagaaatgccgagcgcgctttggccttgatcaacagaataactggtgcggcccttgcaggagaaaaaaaaagtgcgttcgctacatacaaggtgaaggcagctgcctcagcccaccctcttcagatggaagcttactagattcgcctcccccctccccgaacctgctaggctcccctccccgagacgccaagtcacagactgagcagacccagcctctgtcgctgtccctgaagcccgaccccctggcccacctgtccatgatgcctccgccacccgccctcctgctcgctgaggccacccacaaggcctccgccctctgtcccaacggggccctggacctgcccccagccgctttgcagcctgccgccccctcctcatcaattgcacagccgtcgacttcttccttacattcccacagctccctggccgggacccagccccagccgctgtcgctcgtcaccaagtctttagaatagctttagcgtcgtgaaccccgctgctttgtttatggttttgtttcacttttcttaatttgccccccacccccaccttgaaaggttttgttttgtactctcttaattttgtgccatgtggctacattagttgatgtttatcgagttcattggtcaatatttgacccattcttatttcaatttctccttttaaatatgtagatgagagaagaacctcatgattctaccaaaatttttatcaacagctgtttaaagtctttgtagcgtttaaaaaatatatatatatacataactgttatgtagttcggatagcttagttttaaaagactgattaaaaaacaaaaagaaaaaaaaagcaattttgaagcagccctccagaaggagttggttctgtattatttgtattaaatacgagcttgcgaaccaatcattttacatctggtttttaaaccgtaagggcaccatgaatgcagtgccgttacttttttttttttttttctgtgtgaaacaactcttattgtgatgttacttgttattgtttaaatgtacagaaacaaagggtaaaaatgtgttaatataccttgttccatggtgttgttcttttggggggaggggacgctactcaacacttaatagaatcacaacgctgttgggccagtagtatttattgctttagagattgcttgtcgtacctgtatgtcgtccctttttaaatatgttttcctttttcttgaaactgtataaagtttttttcccccttagcataagcatcttatatataacaactcatttgtacaaggtttttaagtttatatataaaatgtgtatatatatttttgtttcccctttttgacttttttttttctgtatgaaacccagatgtcaccaaatggacattaatagttgcattaaggatcagtagcattaacaaaagttgctttaaaagccattatgtaaaacaagacttgaaaatgagtgagggaattttagcgacactgtctgagcagcagtgggaaccatcttcgtttcccctttgaactcccagtgggatgccctaccctgcgcccttaggacccggactgaccgtgtacaaaactttacgtgccaaaattctcagtgaatttagctttctccctctttttgatgctgtaatttttgttcatcatgttttgctgtgatgttacataggtagatttgtatgtagttttaatgtcacctataacaaaatgtgtttggtagcagattgtccagaaagcattttaaatgaagaggtataaacccttaagggccaaaattctgtatattagattactcttaaacgaaaaaccagctgccgcttttatgtacacatattacatacgagtaggcagcagactttaaaaatttcagtgccattgtagttgacatgaagcgattgtaaaactgtctccgatttttctctggtttattaaaatgctaactataacattttttgtgaatactttgaatgtttcctaacagttgtgatgttactgttccgttttatgctcttattccaagttcatttttaatggtttggaagccatttttgtaatgaataaatgttcatgctgtacagtatctgtagcatgccgttctggattaataaaagcaacttagtatgtgcagataaaggaaggt

SEQ ID NO: 295034 - DNA, 3700 bp, Homo sapiens
ggttttttttttttaccccccttttttatttattatttttttgcacattgagcggatccttgggaacgagagaaaaaagaaacccaaactcacgcgtgcagaagatctccccccccttcccctcccctcctccctcttttcccctccccaggagaaaaagacccccaagcagaaaaaagttcaccttggactcgtctttttcttgcaatattttttgggggggcaaaactttttgggggtgattttttttggcttttcttcctccttcatttttcttccaaaattgctgctggtgggtgaaaaaaaaatgccgcagctgaacggcggtggaggggatgacctaggcgccaacgacgaactgatttccttcaaagacgagggcgaacaggaggagaagagctccgaaaactcctcggcagagagggatttagctgatgtcaaatcgtctctagtcaatgaatcagaaacgaatcaaaacagctcctccgattccgaggcggaaagacggcctccgcctcgctccgaaagtttccgagacaaatcccgggaaagtttggaagaagcggccaagaggcaagatggagggctctttaaggggccaccgtatcccggctaccccttcatcatgatccccgacctgacgagcccctacctccccaacggatcgctctcgcccaccgcccgaacctatctccagatgaaatggccactgcttgatgtccaggcagggagcctccagagtagacaagcctctaacaaagtgccagtggtgcagcaccctcaccatgtccaccccctcacgcctcttatcacgtacagcaatgaacacttcacgccgggaaacccacctccacacttaccagccgacgtagaccccaaaacaggaatcccacggcctccgcaccctccagatatatccccgtattacccactatcgcctggcaccgtaggacaaatcccccatccgctaggatggttagtaccacagcaaggtcaaccagtgtacccaatcacgacaggaggattcagacacccctaccccacagctctgaccgtcaatgcttccatgtccaggttccctccccatatggtcccaccacatcatacgctacacacgacgggcattccgcatccggccatagtcacaccaacagtcaaacaggaatcgtcccagagtgatgtcggctcactccatagttcaaagcatcaggactccaaaaaggaagaagaaaagaagaagccccacataaagaaacctcttaatgcattcatgttgtatatgaaggaaatgagagcaaaggtcgtagctgagtgcacgttgaaagaaagcgcggccatcaaccagatccttgggcggaggtggcatgcactgtccagagaagagcaagcgaaatactacgagctggcccggaaggagcgacagcttcatatgcaactgtaccccggctggtccgcgcgggataactatggaaagaagaagaagaggaaaagggacaagcagccgggagagaccaatgaacacagcgaatgtttcctaaatccttgcctttcacttcctccgattacaggagaaaaaaaaagtgcgttcgctacatacaaggtgaaggcagctgcctcagcccaccctcttcagatggaagcttactagattcgcctcccccctccccgaacctgctaggctcccctccccgagacgccaagtcacagactgagcagacccagcctctgtcgctgtccctgaagcccgaccccctggcccacctgtccatgatgcctccgccacccgccctcctgctcgctgaggccacccacaaggcctccgccctctgtcccaacggggccctggacctgcccccagccgctttgcagcctgccgccccctcctcatcaattgcacagccgtcgacttcttccttacattcccacagctccctggccgggacccagccccagccgctgtcgctcgtcaccaagtctttagaatagctttagcgtcgtgaaccccgctgctttgtttatggttttgtttcacttttcttaatttgccccccacccccaccttgaaaggttttgttttgtactctcttaattttgtgccatgtggctacattagttgatgtttatcgagttcattggtcaatatttgacccattcttatttcaatttctccttttaaatatgtagatgagagaagaacctcatgattctaccaaaatttttatcaacagctgtttaaagtctttgtagcgtttaaaaaatatatatatatacataactgttatgtagttcggatagcttagttttaaaagactgattaaaaaacaaaaagaaaaaaaaagcaattttgaagcagccctccagaaggagttggttctgtattatttgtattaaatacgagcttgcgaaccaatcattttacatctggtttttaaaccgtaagggcaccatgaatgcagtgccgttacttttttttttttttttctgtgtgaaacaactcttattgtgatgttacttgttattgtttaaatgtacagaaacaaagggtaaaaatgtgttaatataccttgttccatggtgttgttcttttggggggaggggacgctactcaacacttaatagaatcacaacgctgttgggccagtagtatttattgctttagagattgcttgtcgtacctgtatgtcgtccctttttaaatatgttttcctttttcttgaaactgtataaagtttttttcccccttagcataagcatcttatatataacaactcatttgtacaaggtttttaagtttatatataaaatgtgtatatatatttttgtttcccctttttgacttttttttttctgtatgaaacccagatgtcaccaaatggacattaatagttgcattaaggatcagtagcattaacaaaagttgctttaaaagccattatgtaaaacaagacttgaaaatgagtgagggaattttagcgacactgtctgagcagcagtgggaaccatcttcgtttcccctttgaactcccagtgggatgccctaccctgcgcccttaggacccggactgaccgtgtacaaaactttacgtgccaaaattctcagtgaatttagctttctccctctttttgatgctgtaatttttgttcatcatgttttgctgtgatgttacataggtagatttgtatgtagttttaatgtcacctataacaaaatgtgtttggtagcagattgtccagaaagcattttaaatgaagaggtataaacccttaagggccaaaattctgtatattagattactcttaaacgaaaaaccagctgccgcttttatgtacacatattacatacgagtaggcagcagactttaaaaataaaaaaaacctaggcatgttgatgttgcaaaatgctgtataaagctgaaacctgttcattcagtgccattgtagttgacatgaagcgattgtaaaactgtctccgatttttctctggtttattaaaatgctaactataacattttttgtgaatactttgaatgtttcctaacagttgtgatgttactgttccgttttatgctcttattccaagttcatttttaatggtttggaagccatttttgtaatgaataaatgttcatgctgtacagtatctgtagcatgccgttctggattaataaaagcaacttagtatgtgcagataaaggaaggt

SEQ ID NO: 295035 - DNA, 3448 bp, Homo sapiens
ggttttttttttttaccccccttttttatttattatttttttgcacattgagcggatccttgggaacgagagaaaaaagaaacccaaactcacgcgtgcagaagatctccccccccttcccctcccctcctccctcttttcccctccccaggagaaaaagacccccaagcagaaaaaagttcaccttggactcgtctttttcttgcaatattttttgggggggcaaaactttttgggggtgattttttttggcttttcttcctccttcatttttcttccaaaattgctgctggtgggtgaaaaaaaaatgccgcagctgaacggcggtggaggggatgacctaggcgccaacgacgaactgatttccttcaaagacgagggcgaacaggaggagaagagctccgaaaactcctcggcagagagggatttagctgatgtcaaatcgtctctagtcaatgaatcagaaacgaatcaaaacagctcctccgattccgaggcggaaagacggcctccgcctcgctccgaaagtttccgagacaaatcccgggaaagtttggaagaagcggccaagaggcaagatggagggctctttaaggggccaccgtatcccggctaccccttcatcatgatccccgacctgacgagcccctacctccccaacggatcgctctcgcccaccgcccgaaccctccattttcagtccggcagcacacattactctgcgtacaaaacgattgaacaccagattgcagttcagtatctccagatgaaatggccactgcttgatgtccaggcagggagcctccagagtagacaagccctcaaggatgcccggtccccatcaccggcacacattgtctctaacaaagtgccagtggtgcagcaccctcaccatgtccaccccctcacgcctcttatcacgtacagcaatgaacacttcacgccgggaaacccacctccacacttaccagccgacgtagaccccaaaacaggaatcccacggcctccgcaccctccagatatatccccgtattacccactatcgcctggcaccgtaggacaaatcccccatccgctaggatggttagtaccacagcaaggtcaaccagtgtacccaatcacgacaggaggattcagacacccctaccccacagctctgaccgtcaatgcttccatgtccaggttccctccccatatggtcccaccacatcatacgctacacacgacgggcattccgcatccggccatagtcacaccaacagtcaaacaggaatcgtcccagagtgatgtcggctcactccatagttcaaagcatcaggactccaaaaaggaagaagaaaagaagaagccccacataaagaaacctcttaatgcattcatgttgtatatgaaggaaatgagagcaaaggtcgtagctgagtgcacgttgaaagaaagcgcggccatcaaccagatccttgggcggaggtggcatgcactgtccagagaagagcaagcgaaatactacgagctggcccggaaggagcgacagcttcatatgcaactgtaccccggctggtccgcgcgggataactatggaaagaagaagaagaggaaaagggacaagcagccgggagagaccaatgcccctcctcatcaattgcacagccgtcgacttcttccttacattcccacagctccctggccgggacccagccccagccgctgtcgctcgtcaccaagtctttagaatagctttagcgtcgtgaaccccgctgctttgtttatggttttgtttcacttttcttaatttgccccccacccccaccttgaaaggttttgttttgtactctcttaattttgtgccatgtggctacattagttgatgtttatcgagttcattggtcaatatttgacccattcttatttcaatttctccttttaaatatgtagatgagagaagaacctcatgattctaccaaaatttttatcaacagctgtttaaagtctttgtagcgtttaaaaaatatatatatatacataactgttatgtagttcggatagcttagttttaaaagactgattaaaaaacaaaaagaaaaaaaaagcaattttgaagcagccctccagaaggagttggttctgtattatttgtattaaatacgagcttgcgaaccaatcattttacatctggtttttaaaccgtaagggcaccatgaatgcagtgccgttacttttttttttttttttctgtgtgaaacaactcttattgtgatgttacttgttattgtttaaatgtacagaaacaaagggtaaaaatgtgttaatataccttgttccatggtgttgttcttttggggggaggggacgctactcaacacttaatagaatcacaacgctgttgggccagtagtatttattgctttagagattgcttgtcgtacctgtatgtcgtccctttttaaatatgttttcctttttcttgaaactgtataaagtttttttcccccttagcataagcatcttatatataacaactcatttgtacaaggtttttaagtttatatataaaatgtgtatatatatttttgtttcccctttttgacttttttttttctgtatgaaacccagatgtcaccaaatggacattaatagttgcattaaggatcagtagcattaacaaaagttgctttaaaagccattatgtaaaacaagacttgaaaatgagtgagggaattttagcgacactgtctgagcagcagtgggaaccatcttcgtttcccctttgaactcccagtgggatgccctaccctgcgcccttaggacccggactgaccgtgtacaaaactttacgtgccaaaattctcagtgaatttagctttctccctctttttgatgctgtaatttttgttcatcatgttttgctgtgatgttacataggtagatttgtatgtagttttaatgtcacctataacaaaatgtgtttggtagcagattgtccagaaagcattttaaatgaagaggtataaacccttaagggccaaaattctgtatattagattactcttaaacgaaaaaccagctgccgcttttatgtacacatattacatacgagtaggcagcagactttaaaaataaaaaaaacctaggcatgttgatgttgcaaaatgctgtataaagctgaaacctgttcattcagtgccattgtagttgacatgaagcgattgtaaaactgtctccgatttttctctggtttattaaaatgctaactataacattttttgtgaatactttgaatgtttcctaacagttgtgatgttactgttccgttttatgctcttattccaagttcatttttaatggtttggaagccatttttgtaatgaataaatgttcatgctgtacagtatctgtagcatgccgttctggattaataaaagcaacttagtatgtgcagataaaggaaggt

SEQ ID NO: 295036 - DNA, 3230 bp, Homo sapiens
gaactgtaatccctctatcatggagcttctatagaaatgtgggttagggcagaaaggaaggctgggggctgtgtgtgccttggtgacgtgtccccctcgctcccgagccttactctgttcccctttcttcctggcagcagagccccctcccttgctgcactcagggacatgactgtcagcacttctaccccccctcagacttcactgtcagcactcaagtcttcagggacatgaaaaggagccactccttacaaaaagttggggagccctggtgtattgagtctaacaaagtgccagtggtgcagcaccctcaccatgtccaccccctcacgcctcttatcacgtacagcaatgaacacttcacgccgggaaacccacctccacacttaccagccgacgtagaccccaaaacaggaatcccacggcctccgcaccctccagatatatccccgtattacccactatcgcctggcaccgtaggacaaatcccccatccgctaggatggttagtaccacagcaaggtcaaccagtgtacccaatcacgacaggaggattcagacacccctaccccacagctctgaccgtcaatgcttccatgtccaggttccctccccatatggtcccaccacatcatacgctacacacgacgggcattccgcatccggccatagtcacaccaacagtcaaacaggaatcgtcccagagtgatgtcggctcactccatagttcaaagcatcaggactccaaaaaggaagaagaaaagaagaagccccacataaagaaacctcttaatgcattcatgttgtatatgaaggaaatgagagcaaaggtcgtagctgagtgcacgttgaaagaaagcgcggccatcaaccagatccttgggcggaggtggcatgcactgtccagagaagagcaagcgaaatactacgagctggcccggaaggagcgacagcttcatatgcaactgtaccccggctggtccgcgcgggataactatggaaagaagaagaagaggaaaagggacaagcagccgggagagaccaatgaacacagcgaatgtttcctaaatccttgcctttcacttcctccgattacaggagaaaaaaaaagtgcgttcgctacatacaaggtgaaggcagctgcctcagcccaccctcttcagatggaagcttactagattcgcctcccccctccccgaacctgctaggctcccctccccgagacgccaagtcacagactgagcagacccagcctctgtcgctgtccctgaagcccgaccccctggcccacctgtccatgatgcctccgccacccgccctcctgctcgctgaggccacccacaaggcctccgccctctgtcccaacggggccctggacctgcccccagccgctttgcagcctgccgccccctcctcatcaattgcacagccgtcgacttcttccttacattcccacagctccctggccgggacccagccccagccgctgtcgctcgtcaccaagtctttagaatagctttagcgtcgtgaaccccgctgctttgtttatggttttgtttcacttttcttaatttgccccccacccccaccttgaaaggttttgttttgtactctcttaattttgtgccatgtggctacattagttgatgtttatcgagttcattggtcaatatttgacccattcttatttcaatttctccttttaaatatgtagatgagagaagaacctcatgattctaccaaaatttttatcaacagctgtttaaagtctttgtagcgtttaaaaaatatatatatatacataactgttatgtagttcggatagcttagttttaaaagactgattaaaaaacaaaaagaaaaaaaaagcaattttgaagcagccctccagaaggagttggttctgtattatttgtattaaatacgagcttgcgaaccaatcattttacatctggtttttaaaccgtaagggcaccatgaatgcagtgccgttacttttttttttttttttctgtgtgaaacaactcttattgtgatgttacttgttattgtttaaatgtacagaaacaaagggtaaaaatgtgttaatataccttgttccatggtgttgttcttttggggggaggggacgctactcaacacttaatagaatcacaacgctgttgggccagtagtatttattgctttagagattgcttgtcgtacctgtatgtcgtccctttttaaatatgttttcctttttcttgaaactgtataaagtttttttcccccttagcataagcatcttatatataacaactcatttgtacaaggtttttaagtttatatataaaatgtgtatatatatttttgtttcccctttttgacttttttttttctgtatgaaacccagatgtcaccaaatggacattaatagttgcattaaggatcagtagcattaacaaaagttgctttaaaagccattatgtaaaacaagacttgaaaatgagtgagggaattttagcgacactgtctgagcagcagtgggaaccatcttcgtttcccctttgaactcccagtgggatgccctaccctgcgcccttaggacccggactgaccgtgtacaaaactttacgtgccaaaattctcagtgaatttagctttctccctctttttgatgctgtaatttttgttcatcatgttttgctgtgatgttacataggtagatttgtatgtagttttaatgtcacctataacaaaatgtgtttggtagcagattgtccagaaagcattttaaatgaagaggtataaacccttaagggccaaaattctgtatattagattactcttaaacgaaaaaccagctgccgcttttatgtacacatattacatacgagtaggcagcagactttaaaaataaaaaaaacctaggcatgttgatgttgcaaaatgctgtataaagctgaaacctgttcattcagtgccattgtagttgacatgaagcgattgtaaaactgtctccgatttttctctggtttattaaaatgctaactataacattttttgtgaatactttgaatgtttcctaacagttgtgatgttactgttccgttttatgctcttattccaagttcatttttaatggtttggaagccatttttgtaatgaataaatgttcatgctgtacagtatctgtagcatgccgttctggattaataaaagcaacttagtatgtgcagataaaggaaggt

SEQ ID NO: 295037 - DNA, 3771 bp, Homo sapiens
ggttttttttttttaccccccttttttatttattatttttttgcacattgagcggatccttgggaacgagagaaaaaagaaacccaaactcacgcgtgcagaagatctccccccccttcccctcccctcctccctcttttcccctccccaggagaaaaagacccccaagcagaaaaaagttcaccttggactcgtctttttcttgcaatattttttgggggggcaaaactttttgggggtgattttttttggcttttcttcctccttcatttttcttccaaaattgctgctggtgggtgaaaaaaaaatgccgcagctgaacggcggtggaggggatgacctaggcgccaacgacgaactgatttccttcaaagacgagggcgaacaggaggagaagagctccgaaaactcctcggcagagagggatttagctgatgtcaaatcgtctctagtcaatgaatcagaaacgaatcaaaacagctcctccgattccgaggcggaaagacggcctccgcctcgctccgaaagtttccgagacaaatcccgggaaagtttggaagaagcggccaagaggcaagatggagggctctttaaggggccaccgtatcccggctaccccttcatcatgatccccgacctgacgagcccctacctccccaacggatcgctctcgcccaccgcccgaaccctccattttcagtccggcagcacacattactctgcgtacaaaacgattgaacaccagattgcagttcagtatctccagatgaaatggccactgcttgatgtccaggcagggagcctccagagtagacaagccctcaaggatgcccggtccccatcaccggcacacattgtctctaacaaagtgccagtggtgcagcaccctcaccatgtccaccccctcacgcctcttatcacgtacagcaatgaacacttcacgccgggaaacccacctccacacttaccaggaatcccacggcctccgcaccctccagatatatccccgtattacccactatcgcctggcaccatccgctaggatggttagtaccacagcaaggtcaaccagtgtacccaatcacgacaggaggattcagacacccctaccccacagctctgaccgtcaatgcttccatgtccaggttccctccccatatggtcccaccacatcatacgctacacacgacgggcattccgcatccggccatagtcacaccaacagtcaaacaggaatcgtcccagagtgatgtcggctcactccatagttcaaagcatcaggactccaaaaaggaagaagaaaagaagaagccccacataaagaaacctcttaatgcattcatgttgtatatgaaggaaatgagagcaaaggtcgtagctgagtgcacgttgaaagaaagcgcggccatcaaccagatccttgggcggaggtggcatgcactgtccagagaagagcaagcgaaatactacgagctggcccggaaggagcgacagcttcatatgcaactgtaccccggctggtccgcgcgggataactatggaaagaagaagaagaggaaaagggacaagcagccgggagagaccaatgaacacagcgaatgtttcctaaatccttgcctttcacttcctccgattacaggagaaaaaaaaagtgcgttcgctacatacaaggtgaaggcagctgcctcagcccaccctcttcagatggaagcttactagattcgcctcccccctccccgaacctgctaggctcccctccccgagacgccaagtcacagactgagcagacccagcctctgtcgctgtccctgaagcccgaccccctggcccacctgtccatgatgcctccgccacccgccctcctgctcgctgaggccacccacaaggcctccgccctctgtcccaacggggccctggacctgcccccagccgctttgcagcctgccgccccctcctcatcaattgcacagccgtcgacttcttccttacattcccacagctccctggccgggacccagccccagccgctgtcgctcgtcaccaagtctttagaatagctttagcgtcgtgaaccccgctgctttgtttatggttttgtttcacttttcttaatttgccccccacccccaccttgaaaggttttgttttgtactctcttaattttgtgccatgtggctacattagttgatgtttatcgagttcattggtcaatatttgacccattcttatttcaatttctccttttaaatatgtagatgagagaagaacctcatgattctaccaaaatttttatcaacagctgtttaaagtctttgtagcgtttaaaaaatatatatatatacataactgttatgtagttcggatagcttagttttaaaagactgattaaaaaacaaaaagaaaaaaaaagcaattttgaagcagccctccagaaggagttggttctgtattatttgtattaaatacgagcttgcgaaccaatcattttacatctggtttttaaaccgtaagggcaccatgaatgcagtgccgttacttttttttttttttttctgtgtgaaacaactcttattgtgatgttacttgttattgtttaaatgtacagaaacaaagggtaaaaatgtgttaatataccttgttccatggtgttgttcttttggggggaggggacgctactcaacacttaatagaatcacaacgctgttgggccagtagtatttattgctttagagattgcttgtcgtacctgtatgtcgtccctttttaaatatgttttcctttttcttgaaactgtataaagtttttttcccccttagcataagcatcttatatataacaactcatttgtacaaggtttttaagtttatatataaaatgtgtatatatatttttgtttcccctttttgacttttttttttctgtatgaaacccagatgtcaccaaatggacattaatagttgcattaaggatcagtagcattaacaaaagttgctttaaaagccattatgtaaaacaagacttgaaaatgagtgagggaattttagcgacactgtctgagcagcagtgggaaccatcttcgtttcccctttgaactcccagtgggatgccctaccctgcgcccttaggacccggactgaccgtgtacaaaactttacgtgccaaaattctcagtgaatttagctttctccctctttttgatgctgtaatttttgttcatcatgttttgctgtgatgttacataggtagatttgtatgtagttttaatgtcacctataacaaaatgtgtttggtagcagattgtccagaaagcattttaaatgaagaggtataaacccttaagggccaaaattctgtatattagattactcttaaacgaaaaaccagctgccgcttttatgtacacatattacatacgagtaggcagcagactttaaaaataaaaaaaacctaggcatgttgatgttgcaaaatgctgtataaagctgaaacctgttcattcagtgccattgtagttgacatgaagcgattgtaaaactgtctccgatttttctctggtttattaaaatgctaactataacattttttgtgaatactttgaatgtttcctaacagttgtgatgttactgttccgttttatgctcttattccaagttcatttttaatggtttggaagccatttttgtaatgaataaatgttcatgctgtacagtatctgtagcatgccgttctggattaataaaagcaacttagtatgtgcagataaaggaaggt

SEQ ID NO: 295038 - DNA, 2816 bp, Homo sapiens
gactgagaccacagccttaacaaacaaggaggggcacttatctttttgctttgaaagccagcatcctggagctggtccggccctatgaatgccttggtggcccgggtactgagcacagagagccaccatttccaaaggtttgaatgagttaacacttggcagcaattgcattcccgtgcacttagagtcgagacacatggagaagggttctggggtaggcttcttctttcccttttttctttttcctttttggttgttttatgtttaaaaaccacatgtctgtacggaggagcttggttagctgacattgttttacagtgctgaaaaagaagcgtggcattgaacggcatgcaccagctaaagggctgcaagcagtgagtcatgcagtctcagactgcagcgtccctaggcctgcagaattaacaaaatatatgtgtgtatatatgtagcattggttccaaaaggaatcagaacagcccagaagtgtccaaattaagcacccatgttccacctgcaggtctccatccagcctgcattctcagggaaagtgtaggtacttccttcttggtggagggataccgactagctcctgtctcatttcctttctttaatgaccacctttggttaaatgtgttgtttctttgttctgatacaagcagtctttgaatttggaatattacaatggagaaaaaaaaagtgcgttcgctacatacaaggtgaaggcagctgcctcagcccaccctcttcagatggaagcttactagattcgcctcccccctccccgaacctgctaggctcccctccccgagacgccaagtcacagactgagcagacccagcctctgtcgctgtccctgaagcccgaccccctggcccacctgtccatgatgcctccgccacccgccctcctgctcgctgaggccacccacaaggcctccgccctctgtcccaacggggccctggacctgcccccagccgctttgcagcctgccgccccctcctcatcaattgcacagccgtcgacttcttccttacattcccacagctccctggccgggacccagccccagccgctgtcgctcgtcaccaagtctttagaatagctttagcgtcgtgaaccccgctgctttgtttatggttttgtttcacttttcttaatttgccccccacccccaccttgaaaggttttgttttgtactctcttaattttgtgccatgtggctacattagttgatgtttatcgagttcattggtcaatatttgacccattcttatttcaatttctccttttaaatatgtagatgagagaagaacctcatgattctaccaaaatttttatcaacagctgtttaaagtctttgtagcgtttaaaaaatatatatatatacataactgttatgtagttcggatagcttagttttaaaagactgattaaaaaacaaaaagaaaaaaaaagcaattttgaagcagccctccagaaggagttggttctgtattatttgtattaaatacgagcttgcgaaccaatcattttacatctggtttttaaaccgtaagggcaccatgaatgcagtgccgttacttttttttttttttttctgtgtgaaacaactcttattgtgatgttacttgttattgtttaaatgtacagaaacaaagggtaaaaatgtgttaatataccttgttccatggtgttgttcttttggggggaggggacgctactcaacacttaatagaatcacaacgctgttgggccagtagtatttattgctttagagattgcttgtcgtacctgtatgtcgtccctttttaaatatgttttcctttttcttgaaactgtataaagtttttttcccccttagcataagcatcttatatataacaactcatttgtacaaggtttttaagtttatatataaaatgtgtatatatatttttgtttcccctttttgacttttttttttctgtatgaaacccagatgtcaccaaatggacattaatagttgcattaaggatcagtagcattaacaaaagttgctttaaaagccattatgtaaaacaagacttgaaaatgagtgagggaattttagcgacactgtctgagcagcagtgggaaccatcttcgtttcccctttgaactcccagtgggatgccctaccctgcgcccttaggacccggactgaccgtgtacaaaactttacgtgccaaaattctcagtgaatttagctttctccctctttttgatgctgtaatttttgttcatcatgttttgctgtgatgttacataggtagatttgtatgtagttttaatgtcacctataacaaaatgtgtttggtagcagattgtccagaaagcattttaaatgaagaggtataaacccttaagggccaaaattctgtatattagattactcttaaacgaaaaaccagctgccgcttttatgtacacatattacatacgagtaggcagcagactttaaaaataaaaaaaacctaggcatgttgatgttgcaaaatgctgtataaagctgaaacctgttcattcagtgccattgtagttgacatgaagcgattgtaaaactgtctccgatttttctctggtttattaaaatgctaactataacattttttgtgaatactttgaatgtttcctaacagttgtgatgttactgttccgttttatgctcttattccaagttcatttttaatggtttggaagccatttttgtaatgaataaatgttcatgctgtacagtatctgtagcatgccgttctggattaataaaagcaacttagtatgtgcagataaaggaaggt

SEQ ID NO: 295039 - DNA, 2302 bp, Homo sapiens
  misc_feature (4)..(4): n is a, c, g, or t
  misc_feature (6)..(6): n is a, c, g, or t
  misc_feature (9)..(9): n is a, c, g, or t
  misc_feature (13)..(15): n is a, c, g, or t
  misc_feature (17)..(18): n is a, c, g, or t
  misc_feature (29)..(29): n is a, c, g, or t
tgcntntcncttnnncnnattcagacctnagcgctcctaagaaatgccgagcgcgctttggccttgatcaacagaataactggtgcggcccttgcagatgcaaatactccaaagaagtgtcgggcactgttcgggcttgaccgacagactttatggtgcaaaccgtgcaggagaaaaaaaaagtgcgttcgctacatacaaggtgaaggcagctgcctcagcccaccctcttcagatggaagcttactagattcgcctcccccctccccgaacctgctaggctcccctccccgagacgccaagtcacagactgagcagacccagcctctgtcgctgtccctgaagcccgaccccctggcccacctgtccatgatgcctccgccacccgccctcctgctcgctgaggccacccacaaggcctccgccctctgtcccaacggggccctggacctgcccccagccgctttgcagcctgccgccccctcctcatcaattgcacagccgtcgacttcttccttacattcccacagctccctggccgggacccagccccagccgctgtcgctcgtcaccaagtctttagaatagctttagcgtcgtgaaccccgctgctttgtttatggttttgtttcacttttcttaatttgccccccacccccaccttgaaaggttttgttttgtactctcttaattttgtgccatgtggctacattagttgatgtttatcgagttcattggtcaatatttgacccattcttatttcaatttctccttttaaatatgtagatgagagaagaacctcatgattctaccaaaatttttatcaacagctgtttaaagtctttgtagcgtttaaaaaatatatatatatacataactgttatgtagttcggatagcttagttttaaaagactgattaaaaaacaaaaagaaaaaaaaagcaattttgaagcagccctccagaaggagttggttctgtattatttgtattaaatacgagcttgcgaaccaatcattttacatctggtttttaaaccgtaagggcaccatgaatgcagtgccgttacttttttttttttttttctgtgtgaaacaactcttattgtgatgttacttgttattgtttaaatgtacagaaacaaagggtaaaaatgtgttaatataccttgttccatggtgttgttcttttggggggaggggacgctactcaacacttaatagaatcacaacgctgttgggccagtagtatttattgctttagagattgcttgtcgtacctgtatgtcgtccctttttaaatatgttttcctttttcttgaaactgtataaagtttttttcccccttagcataagcatcttatatataacaactcatttgtacaaggtttttaagtttatatataaaatgtgtatatatatttttgtttcccctttttgacttttttttttctgtatgaaacccagatgtcaccaaatggacattaatagttgcattaaggatcagtagcattaacaaaagttgctttaaaagccattatgtaaaacaagacttgaaaatgagtgagggaattttagcgacactgtctgagcagcagtgggaaccatcttcgtttcccctttgaactcccagtgggatgccctaccctgcgcccttaggacccggactgaccgtgtacaaaactttacgtgccaaaattctcagtgaatttagctttctccctctttttgatgctgtaatttttgttcatcatgttttgctgtgatgttacataggtagatttgtatgtagttttaatgtcacctataacaaaatgtgtttggtagcagattgtccagaaagcattttaaatgaagaggtataaacccttaagggccaaaattctgtatattagattactcttaaacgaaaaaccagctgccgcttttatgtacacatattacatacgagtaggcagcagactttaaaaataaaaaaaacctaggcatgttgatgttgcaaaatgctgtataaagctgaaacctgttcattcagtgccattgtagttgacatgaagcgattgtaaaactgtctccgatttttctctggtttattaaaatgctaactataacattttttgtgaatactttgaatgtttcctaacagttgtgatgttactgttccgttttatgctcttattccaagttcatttttaatggtttggaagccatttttgtaatgaataaatgttcatgctgtacagtatctgtagcatgccgttctggattaataaaagcaacttagtatgtgcagataaaggaaggt

SEQ ID NO: 295040 - DNA, 2569 bp, Homo sapiens
tgggagtgaagggccgaggaaacttgatgggaaagtgagggactgtctaagccaaaagagcttttcagttcttctcaatttggacaaagccactttttggcaaatagatgccaccatctgcaggtggccgcctccatgctgctctcgtatataatttgggcatggtggggcatgggtgtttagtaggggttgggggaagcaagtagagagttcagactcttaaataagttgtttgccagagcaggcttagatctgggcactgtgaagtaagcgacccaccctgggggggcgccactgtaattgtcctcggaccactgggcgtgccacctctgtgggacatcccttaggtgacctcagcttgggtgtgagcattaggtaactctctcccttggcatctgtgccctctattcacagataactctctcccctgtttctaggagaaaaaaaaagtgcgttcgctacatacaaggtgaaggcagctgcctcagcccaccctcttcagatggaagcttactagattcgcctcccccctccccgaacctgctaggctcccctccccgagacgccaagtcacagactgagcagacccagcctctgtcgctgtccctgaagcccgaccccctggcccacctgtccatgatgcctccgccacccgccctcctgctcgctgaggccacccacaaggcctccgccctctgtcccaacggggccctggacctgcccccagccgctttgcagcctgccgccccctcctcatcaattgcacagccgtcgacttcttccttacattcccacagctccctggccgggacccagccccagccgctgtcgctcgtcaccaagtctttagaatagctttagcgtcgtgaaccccgctgctttgtttatggttttgtttcacttttcttaatttgccccccacccccaccttgaaaggttttgttttgtactctcttaattttgtgccatgtggctacattagttgatgtttatcgagttcattggtcaatatttgacccattcttatttcaatttctccttttaaatatgtagatgagagaagaacctcatgattctaccaaaatttttatcaacagctgtttaaagtctttgtagcgtttaaaaaatatatatatatacataactgttatgtagttcggatagcttagttttaaaagactgattaaaaaacaaaaagaaaaaaaaagcaattttgaagcagccctccagaaggagttggttctgtattatttgtattaaatacgagcttgcgaaccaatcattttacatctggtttttaaaccgtaagggcaccatgaatgcagtgccgttacttttttttttttttttctgtgtgaaacaactcttattgtgatgttacttgttattgtttaaatgtacagaaacaaagggtaaaaatgtgttaatataccttgttccatggtgttgttcttttggggggaggggacgctactcaacacttaatagaatcacaacgctgttgggccagtagtatttattgctttagagattgcttgtcgtacctgtatgtcgtccctttttaaatatgttttcctttttcttgaaactgtataaagtttttttcccccttagcataagcatcttatatataacaactcatttgtacaaggtttttaagtttatatataaaatgtgtatatatatttttgtttcccctttttgacttttttttttctgtatgaaacccagatgtcaccaaatggacattaatagttgcattaaggatcagtagcattaacaaaagttgctttaaaagccattatgtaaaacaagacttgaaaatgagtgagggaattttagcgacactgtctgagcagcagtgggaaccatcttcgtttcccctttgaactcccagtgggatgccctaccctgcgcccttaggacccggactgaccgtgtacaaaactttacgtgccaaaattctcagtgaatttagctttctccctctttttgatgctgtaatttttgttcatcatgttttgctgtgatgttacataggtagatttgtatgtagttttaatgtcacctataacaaaatgtgtttggtagcagattgtccagaaagcattttaaatgaagaggtataaacccttaagggccaaaattctgtatattagattactcttaaacgaaaaaccagctgccgcttttatgtacacatattacatacgagtaggcagcagactttaaaaataaaaaaaacctaggcatgttgatgttgcaaaatgctgtataaagctgaaacctgttcattcagtgccattgtagttgacatgaagcgattgtaaaactgtctccgatttttctctggtttattaaaatgctaactataacattttttgtgaatactttgaatgtttcctaacagttgtgatgttactgttccgttttatgctcttattccaagttcatttttaatggtttggaagccatttttgtaatgaataaatgttcatgctgtacagtatctgtagcatgccgttctggattaataaaagcaacttagtatgtgcagataaaggaaggt

SEQ ID NO: 295041 - DNA, 2429 bp, Homo sapiens
gagagcttcccttcaccacccgccaatcccttctctgctcccaagaagcgtgtgtccctccagctggggtacaatgcaagggcatttggcttgaagcggggttggaggttggacaaataccgggggtttgtgtggatggagatggcagtatggtcacttcctcctgccttctccttccaggtgcgcccagacactcttctcacatctgtttcttgcagtaattccctgtgtttcatctcttcatctagggaaagaagaagaagaggaaaagggacaagcagccgggagagaccaatggagaaaaaaaaagtgcgttcgctacatacaaggtgaaggcagctgcctcagcccaccctcttcagatggaagcttactagattcgcctcccccctccccgaacctgctaggctcccctccccgagacgccaagtcacagactgagcagacccagcctctgtcgctgtccctgaagcccgaccccctggcccacctgtccatgatgcctccgccacccgccctcctgctcgctgaggccacccacaaggcctccgccctctgtcccaacggggccctggacctgcccccagccgctttgcagcctgccgccccctcctcatcaattgcacagccgtcgacttcttccttacattcccacagctccctggccgggacccagccccagccgctgtcgctcgtcaccaagtctttagaatagctttagcgtcgtgaaccccgctgctttgtttatggttttgtttcacttttcttaatttgccccccacccccaccttgaaaggttttgttttgtactctcttaattttgtgccatgtggctacattagttgatgtttatcgagttcattggtcaatatttgacccattcttatttcaatttctccttttaaatatgtagatgagagaagaacctcatgattctaccaaaatttttatcaacagctgtttaaagtctttgtagcgtttaaaaaatatatatatatacataactgttatgtagttcggatagcttagttttaaaagactgattaaaaaacaaaaagaaaaaaaaagcaattttgaagcagccctccagaaggagttggttctgtattatttgtattaaatacgagcttgcgaaccaatcattttacatctggtttttaaaccgtaagggcaccatgaatgcagtgccgttacttttttttttttttttctgtgtgaaacaactcttattgtgatgttacttgttattgtttaaatgtacagaaacaaagggtaaaaatgtgttaatataccttgttccatggtgttgttcttttggggggaggggacgctactcaacacttaatagaatcacaacgctgttgggccagtagtatttattgctttagagattgcttgtcgtacctgtatgtcgtccctttttaaatatgttttcctttttcttgaaactgtataaagtttttttcccccttagcataagcatcttatatataacaactcatttgtacaaggtttttaagtttatatataaaatgtgtatatatatttttgtttcccctttttgacttttttttttctgtatgaaacccagatgtcaccaaatggacattaatagttgcattaaggatcagtagcattaacaaaagttgctttaaaagccattatgtaaaacaagacttgaaaatgagtgagggaattttagcgacactgtctgagcagcagtgggaaccatcttcgtttcccctttgaactcccagtgggatgccctaccctgcgcccttaggacccggactgaccgtgtacaaaactttacgtgccaaaattctcagtgaatttagctttctccctctttttgatgctgtaatttttgttcatcatgttttgctgtgatgttacataggtagatttgtatgtagttttaatgtcacctataacaaaatgtgtttggtagcagattgtccagaaagcattttaaatgaagaggtataaacccttaagggccaaaattctgtatattagattactcttaaacgaaaaaccagctgccgcttttatgtacacatattacatacgagtaggcagcagactttaaaaataaaaaaaacctaggcatgttgatgttgcaaaatgctgtataaagctgaaacctgttcattcagtgccattgtagttgacatgaagcgattgtaaaactgtctccgatttttctctggtttattaaaatgctaactataacattttttgtgaatactttgaatgtttcctaacagttgtgatgttactgttccgttttatgctcttattccaagttcatttttaatggtttggaagccatttttgtaatgaataaatgttcatgctgtacagtatctgtagcatgccgttctggattaataaaagcaacttagtatgtgcagataaaggaaggt

SEQ ID NO: 295042 - DNA, 658 bp, Homo sapiens
  misc_feature (6)..(6): n is a, c, g, or t
  misc_feature (12)..(12): n is a, c, g, or t
  misc_feature (83)..(83): n is a, c, g, or t
aaaacnggcccncggcggggcgcctcgggccctcaggcacgcgctctgaggcttcggcggtccgccctgccgcctcgcgcccnggtccagctcgttttgttcatcatgttttgctgtgatgttacataggtagatttgtatgtagttttaatgtcacctataacaaaatgtgtttggtagcagattgtccagaaagcattttaaatgaagaggtataaacccttaagggccaaaattctgtatattagattactcttaaacgaaaaaccagctgccgcttttatgtacacatattacatacgagtaggcagcagactttaaaaataaaaaaaacctaggcatgttgatgttgcaaaatgctgtataaagctgaaacctgttcattcagtgccattgtagttgacatgaagcgattgtaaaactgtctccgatttttctctggtttattaaaatgctaactataacattttttgtgaatactttgaatgtttcctaacagttgtgatgttactgttccgttttatgctcttattccaagttcatttttaatggtttggaagccatttttgtaatgaataaatgttcatgctgtacagtatctgtagcatgccgttctggattaataaaagcaacttagtatgtgcagataaaggaaggt

SEQ ID NO: 295043 - DNA, 1494 bp, Homo sapiens
ggttttttttttttaccccccttttttatttattatttttttgcacattgagcggatccttgggaacgagagaaaaaagaaacccaaactcacgcgtgcagaagatctccccccccttcccctcccctcctccctcttttcccctccccaggagaaaaagacccccaagcagaaaaaagttcaccttggactcgtctttttcttgcaatattttttgggggggcaaaactttttgggggtgattttttttggcttttcttcctccttcatttttcttccaaaattgctgctggtgggtgaaaaaaaaatgccgcagctgaacggcggtggaggggatgacctaggcgccaacgacgaactgatttccttcaaagacgagggcgaacaggaggagaagagctccgaaaactcctcggcagagagggatttagctgatgtcaaatcgtctctagtcaatgaatcagaaacgaatcaaaacagctcctccgattccgaggcggaaagacggcctccgcctcgctccgaaagtttccgagacaaatcccgggaaagtttggaagaagcggccaagaggcaagatggagggctctttaaggggccaccgtatcccggctaccccttcatcatgatccccgacctgacgagcccctacctccccaacggatcgctctcgcccaccgcccgaaccctccattttcagtccggcagcacacattactctgcgtacaaaacgattgaacaccagattgcagttcagtatctccagatgaaatggccactgcttgatgtccaggcagggagcctccagagtagacaagccctcaaggatgcccggtccccatcaccggcacacattgtctctaacaaagtgccagtggtgcagcaccctcaccatgtccaccccctcacgcctcttatcacgtacagcaatgaacacttcacgccgggaaacccacctccacacttaccagccgacgtagaccccaaaacaggaatcccacggcctccgcaccctccagatatatccccgtattacccactatcgcctggcaccgtaggacaaatcccccatccgctaggatggttagtaccacagcaaggtcaaccagtgtacccaatcacgacaggaggattcagacacccctaccccacagctctgaccgtcaatgcttccatgtccaggttccctccccatatggtcccaccacatcatacgctacacacgacgggcattccgcatccggccatagtcacaccaacagtcaaacaggaatcgtcccagagtgatgtcggctcactccatagttcaaagcatcaggactccaaaaaggaagaagaaaagaagaagccccacataaagaaacctcttaatgcattcatgttgtatatgaaggaaatgagagcaaaggtcgtagctgagtgcacgttgaaagaaagcgcggccatcaaccagatccttgggcggagggtggcatgcacgcccttctcagggag

SEQ ID NO: 295044 - DNA, 1890 bp, Homo sapiens
ggttttttttttttaccccccttttttatttattatttttttgcacattgagcggatccttgggaacgagagaaaaaagaaacccaaactcacgcgtgcagaagatctccccccccttcccctcccctcctccctcttttcccctccccaggagaaaaagacccccaagcagaaaaaagttcaccttggactcgtctttttcttgcaatattttttgggggggcaaaactttttgggggtgattttttttggcttttcttcctccttcatttttcttccaaaattgctgctggtgggtgaaaaaaaaatgccgcagctgaacggcggtggaggggatgacctaggcgccaacgacgaactgatttccttcaaagacgagggcgaacaggaggagaagagctccgaaaactcctcggcagagagggatttagctgatgtcaaatcgtctctagtcaatgaatcagaaacgaatcaaaacagctcctccgattccgaggcggaaagacggcctccgcctcgctccgaaagtttccgagacaaatcccgggaaagtttggaagaagcggccaagaggcaagatggagggctctttaaggggccaccgtatcccggctaccccttcatcatgatccccgacctgacgagcccctacctccccaacggatcgctctcgcccaccgcccgaaccctccattttcagtccggcagcacacattactctgcgtacaaaacgattgaacaccagattgcagttcagtatctccagatgaaatggccactgcttgatgtccaggcagggagcctccagagtagacaagccctcaaggatgcccggtccccatcaccggcacacattgtctctaacaaagtgccagtggtgcagcaccctcaccatgtccaccccctcacgcctcttatcacgtacagcaatgaacacttcacgccgggaaacccacctccacacttaccagccgacgtagaccccaaaacaggaatcccacggcctccgcaccctccagatatatccccgtattacccactatcgcctggcaccgtaggacaaatcccccatccgctaggatggttagtaccacagcaaggtcaaccagtgtacccaatcacgacaggaggattcagacacccctaccccacagctctgaccgtcaatgcttccatgtccaggttccctccccatatggtcccaccacatcatacgctacacacgacgggcattccgcatccggccatagtcacaccaacagtcaaacaggaatcgtcccagagtgatgtcggctcactccatagttcaaagcatcaggactccaaaaaggaagaagaaaagaagaagccccacataaagaaacctcttaatgcattcatgttgtatatgaaggaaatgagagcaaaggtcgtagctgagtgcacgttgaaagaaagcgcggccatcaaccagatccttgggcggaggtggcatgcactgtccagagaagagcaagcgaaatactacgagctggcccggaaggagcgacagcttcatatgcaactgtaccccggctggtccgcgcgggataactatggaaagaagaagaagaggaaaagggacaagcagccgggagagaccaatgaacacagcgaatgtttcctaaatccttgcctttcacttcctccgattacaggtgctaatgtcattttgagtcattaaaatagttgataaactgttttttaatttttcttgccattatagttttattaacatttaaacacgtatgacatttgaacattctttaaaatgaccatcaacacggtttcgtatgtttcagtagattttttttttcagttgcttctttttttttttttaatttaacctttgttttgtttatttatttttcc

SEQ ID NO: 295045 - DNA, 980 bp, Homo sapiens
ggttttttttttttaccccccttttttatttattatttttttgcacattgagcggatccttgggaacgagagaaaaaagaaacccaaactcacgcgtgcagaagatctccccccccttcccctcccctcctccctcttttcccctccccaggagaaaaagacccccaagcagaaaaaagttcaccttggactcgtctttttcttgcaatattttttgggggggcaaaactttttgggggtgattttttttggcttttcttcctccttcatttttcttccaaaattgctgctggtgggtgaaaaaaaaatgccgcagctgaacggcggtggaggggatgacctaggcgccaacgacgaactgatttccttcaaagacgagggcgaacaggaggagaagagctccgaaaactcctcggcagagagggatttagctgatgtcaaatcgtctctagtcaatgaatcagaaacgaatcaaaacagctcctccgattccgaggcggaaagacggcctccgcctcgctccgaaagtttccgagacaaatcccgggaaagtttggaagaagcggccaagaggcaagatggagggctctttaaggggccaccgtatcccggctaccccttcatcatgatccccgacctgacgagcccctacctccccaacggatcgctctcgcccaccgcccgaacctatctccagatgaaatggccactgcttgatgtccaggcagggagcctccagagtagacaagccctcaaggatgcccggtccccatcaccggcacacattgtcgtaagtaacctcccagagatgatggcttcctttattgagggggtgaaaaagaaaatgcttttttgatgataacaggccttatttgtcatttttttctttctttaaacacattttctttggaaatattgttgggtatagtttatatctataaggtattcattttctgctattggaccttaatgattgtaac

SEQ ID NO: 295046 - DNA, 390 bp, Homo sapiens
tagtccaagcccacttttccgcccaagtacgtcagttgaatttgtcttttgctaaagatgttaaaaatcataatgtcttatgtcagtagcaataatgaattggctttaatgacattatgagaatcattatgtttaatttatcgctaattaatgctgacaggtttcatatgccttgggttgctttcatgtgagtgttacgtgctgtttttttttttctttttaattgtgtgtacacatccctcctcattcattcattttgattctgacgatttacacagctttctgtcttgttccctccccatatggtcccaccacatcatacgctacacacgacgggcattccgcatccggccatagtcacaccaacagtcaaacaggaatcgtcccaga

SEQ ID NO: 295047 - DNA, 124 bp, Homo sapiens
gcttgacggtgtctttctctgttctcctccccacagtctaactctaacaaagtgccagtggtgcagcaccctcaccatgtccaccccctcacgcctcttatcacgtacagcaatgaacacttca

SEQ ID NO: 295048 - DNA, 360 bp, Homo sapiens
tttcttgcaatattttttgggggggcaaaactttttgggggtgattttttttggcttttcttcctccttcatttttcttccaaaattgctgctggtgggtgaaaaaaaaatgccgcagctgaacggcggtggaggggatgacctaggcgccaacgacgaactgatttccttcaaagacgagggcgaacaggaggagaagagctccgaaaactcctcggcagagagggatttagctgatgtcaaatcgtctctagtcaatgaatcagaaacgaatcaaaacagctcctccgattccgaggtaggaaaagcccctcgggctggtggggttttttatctgtttcctgggcttggcaaatgttg

SEQ ID NO: 295049 - DNA, 477 bp, Homo sapiens
agaaattagaaatactgcataggcaatctcagaggtcccttggagaaggccaggcttttacaaacaaacaaaacaaaaattttgaaggctttgtataatttgttcttttttttcagaacacagcgaatgtttcctaaatccttgcctttcacttcctccgattacaggtgctaatgtcattttgagtcattaaaatagttgataaactgttttttaatttttcttgccattatagttttattaacatttaaacacgtatgacatttgaacattctttaaaatgaccatcaacacggtttcgtatgtttcagtagattttttttttcagttgcttctttttttttttttaatttaacctttgttttgtttatttatttttcccataacagttgtttaagcagtgatgacagtgatttagagttgaactaactgtgcaaattgaatatgcagtatttctttaaaagagactggttaaaa

SEQ ID NO: 295050 - DNA, 3283 bp, Homo sapiens
agctgttccccgcgctgcgcggagcagggaccaggcggttgcggcggcgacagccatggccggcgcgctggcaggtctggccgcgggcttgcaggtcccgcgggtcgcgcccagcccagactcggactcggacacagactcggaggacccgagtctccggcgcagcgcgggcggcttgctccgctcgcaggtcatccacagcggtcacttcatggtgtcgtcgccgcacagcgactcgctgccccggcggcgcgaccaggaggggtccgtggggccctccgacttcgggccgcgcagtatcgaccccacactcacacgcctcttcgagtgcttgagcctggcctacagtggcaagctggtgtctcccaagtggaagaatttcaaaggcctcaagctgctctgcagagacaagatccgcctgaacaacgccatctggagggcctggtatatccagtatgtgaagcggaggaagagccccgtgtgtggcttcgtgacccccctgcaggggcctgaggctgatgcgcaccggaagccggaggccgtggtcctggaggggaactactggaagcggcgcatcgaggtggtgatgcgggaataccacaagtggcgcatctactacaagaagcggctccgtaagcccagcagggaagatgacctcctggcccctaagcaggcggaaggcaggtggccgccgccggagcaatggtgcaaacagctcttctccagtgtggtccccgtgctgctgggggacccagaggaggagccgggtgggcggcagctcctggacctcaattgctttttgtccgacatctcagacactctcttcaccatgactcagtccggcccttcgcccctgcagctgccgcctgaggatgcctacgtcggcaatgctgacatgatccagccggacctgacgccactgcagccaagcctggatgacttcatggacatctcagatttctttaccaactcccgcctcccacagccgcccatgccttcaaacttcccagagccccccagcttcagccccgtggttgactccctcttcagcagtgggaccctgggcccagaggtgcccccggcttcctcggccatgacccacctctctggacacagccgtctgcaggctcggaacagctgccctggccccttggactccagcgccttcctgagttctgatttcctccttcctgaagaccccaagccccggctcccaccccctcctgtacccccacctctgctgcattaccctccccctgccaaggtgccaggcctggagccctgccccccacctcccttccctcccatggcaccacccactgctttgctgcaggaagagcctctcttctctcccaggtttcccttccccaccgtccctcctgccccaggagtgtctccgctgcctgctcctgcagccttcccacccaccccacagtctgtccccagcccagcccccacccccttccccatagagcttctacccttggggtattcggagcctgcctttgggccttgcttctccatgcccagaggcaagccccccgccccatcccctaggggacagaaagccagcccccctaccttagcccctgccactgccagtccccccaccactgcggggagcaacaacccctgcctcacacagctgctcacagcagctaagccggagcaagccctggagccaccacttgtatccagcaccctcctccggtccccagggtccccgcaggagacagtccctgaattcccctgcacattccttcccccgaccccggcccctacaccgccccggccacctccaggcccggccacattggccccttccaggcccctgcttgtccccaaagcggagcggctctcacccccagcgcccagcggcagtgaacggcggctgtcaggggacctcagctccatgccaggccctgggactctgagcgtccgtgtctctcccccgcaacccatcctcagccggggccgtccagacagcaacaagaccgagaaccggcgtatcacacacatctccgcggagcagaagcggcgcttcaacatcaagctggggtttgacacccttcatgggctcgtgagcacactcagtgcccagcccagcctcaaggtgagcaaagctaccacgctgcagaagacagctgagtacatccttatgctacagcaggagcgtgcgggcttgcaggaggaggcccagcagctgcgggatgagattgaggagctcaatgccgccattaacctgtgccagcagcagctgcccgccacaggggtacccatcacacaccagcgttttgaccagatgcgagacatgtttgatgactacgtccgaacccgtacgctgcacaactggaagttctgggtgttcagcatcctcatccggcctctgtttgagtccttcaacgggatggtgtccacggcaagtgtgcacaccctccgccagacctcactggcctggctggaccagtactgctctctgcccgctctccggccaactgtcctgaactccctacgccagctgggcacatctaccagtatcctgaccgacccgggccgcatccctgagcaagccacacgggcagtcacagagggcacccttggcaaacctttatagtcctggccagaccctgctgctcactcagctgccctgggggctgctttccctgggcacgggctccagggatcatctctgggcactcccttcctgccccaggccctggctctgcccttccctggggggtggagcagggtccaggtttcacacttgccacctcctggaggtcaagaagagcagagtccccgtccctgctctgccactgtgctccagcaccgtgaccttgggtgactcgtccgctgtctttggaccgctgtgtttcaatctgcaaaatggggatggggaaggttcaatcagcagatgacccccaggccttggcagctgtgacattgggggcctaggctggcaactccgggggctcaacggtggaaagaggaggatgctgtttctctgtcacctccacttgctccccgacaggtggggcacagacctctgttcctgagcagagaagcagaaaaggaggttccctctctctgctccttcactgctgacccagaggggctgcaggatggtttcccctgggagaggccaggagggcctgatcccaggagacaccagggccagagtgaccacagcagggcaggcatcatgtgtgtgtgtgtgtgtggatgtgtgtgtgtgggttttgtaaagaattcttgaccaataaaagcaaaaactgtctgctgg

SEQ ID NO: 295051 - DNA, 3226 bp, Homo sapiens
agctgttccccgcgctgcgcggagcagggaccaggcggttgcggcggcgacagccatggccggcgcgctggcaggtctggccgcgggcttgcaggtcccgcgggtcgcgcccagcccagactcggactcggacacagactcggaggacccgagtctccggcgcagcgcgggcggcttgctccgctcgcaggtcatccacagcggtcacttcatggtgtcgtcgccgcacagcgactcgctgccccggcggcgcgaccaggaggggtccgtggggccctccgacttcgggccgcgcagtatcgaccccacactcacacgcctcttcgagtgcttgagcctggcctacagtggcaagctggtgtctcccaagtggaagaatttcaaaggcctcaagctgctctgcagagacaagatccgcctgaacaacgccatctggagggcctggtatatccagtatgtgaagcggaggaagagccccgtgtgtggcttcgtgacccccctgcaggggcctgaggctgatgcgcaccggaagccggaggccgtggtcctggaggggaactactggaagcggcgcatcgaggtggtgatgcgggaataccacaagtggcgcatctactacaagaagcggctccgtaagcccagcagggaagatgacctcctggcccctaagcaggcggaaggcaggtggccgccgccggagcaatggtgcaaacagctcttctccagtgtggtccccgtgctgctgggggacccagaggaggagccgggtgggcggcagctcctggacctcaattgctttttgtccgacatctcagacactctcttcaccatgactcagtccggcccttcgcccctgcagctgccgcctgaggatgcctacgtcggcaatgctgacatgatccagccggacctgacgccactgcagccaagcctggatgacttcatggacatctcagatttctttaccaactcccgcctcccacagccgcccatgccttcaaacttcccagagccccccagcttcagccccgtggttgactccctcttcagcagtgggaccctgggcccagaggtgcccccggcttcctcggccatgacccacctctctggacacagccgtctgcaggctcggaacagctgccctggccccttggactccagcgccttcctgagttctgatttcctccttcctgaagaccccaagccccggctcccaccccctcctgtacccccacctctgctgcattaccctccccctgccaaggtgccaggcctggagccctgccccccacctcccttccctcccatggcaccacccactgctttgctgcaggaagagcctctcttctctcccaggtttcccttccccaccgtccctcctgccccaggagtgtctccgctgcctgctcctgcagccttcccacccaccccacagtctgtccccagcccagcccccacccccttccccatagagcttctacccttggggtattcggagcctgcctttgggccttgcttctccatgcccagaggcaagccccccgccccatcccctaggggacagaaagccagcccccctaccttagcccctgccactgccagtccccccaccactgcggggagcaacaacccctgcctcacacagctgctcacagcagctaagccggagcaagccctggagccaccacttgtatccagcaccctcctccggtccccagggtccccgcaggagacagtccctgaattcccctgcacattccttcccccgaccccggcccctacaccgccccggccacctccaggcccggccacattggccccttccaggcccctgcttgtccccaaagcggagcggctctcacccccagcgcccagcggcagtgaacggcggctgtcaggggacctcagctccatgccaggccctgggactctgagcgtccgtgtctctcccccgcaacccatcctcagccggggccgtccagacagcaacaagaccgagaaccggcgtatcacacacatctccgcggagcagaagcggcgcttcaacatcaagctggggtttgacacccttcatgggctcgtgagcacactcagtgcccagcccagcctcaaggagcgtgcgggcttgcaggaggaggcccagcagctgcgggatgagattgaggagctcaatgccgccattaacctgtgccagcagcagctgcccgccacaggggtacccatcacacaccagcgttttgaccagatgcgagacatgtttgatgactacgtccgaacccgtacgctgcacaactggaagttctgggtgttcagcatcctcatccggcctctgtttgagtccttcaacgggatggtgtccacggcaagtgtgcacaccctccgccagacctcactggcctggctggaccagtactgctctctgcccgctctccggccaactgtcctgaactccctacgccagctgggcacatctaccagtatcctgaccgacccgggccgcatccctgagcaagccacacgggcagtcacagagggcacccttggcaaacctttatagtcctggccagaccctgctgctcactcagctgccctgggggctgctttccctgggcacgggctccagggatcatctctgggcactcccttcctgccccaggccctggctctgcccttccctggggggtggagcagggtccaggtttcacacttgccacctcctggaggtcaagaagagcagagtccccgtccctgctctgccactgtgctccagcaccgtgaccttgggtgactcgtccgctgtctttggaccgctgtgtttcaatctgcaaaatggggatggggaaggttcaatcagcagatgacccccaggccttggcagctgtgacattgggggcctaggctggcaactccgggggctcaacggtggaaagaggaggatgctgtttctctgtcacctccacttgctccccgacaggtggggcacagacctctgttcctgagcagagaagcagaaaaggaggttccctctctctgctccttcactgctgacccagaggggctgcaggatggtttcccctgggagaggccaggagggcctgatcccaggagacaccagggccagagtgaccacagcagggcaggcatcatgtgtgtgtgtgtgtgtggatgtgtgtgtgtgggttttgtaaagaattcttgaccaataaaagcaaaaactgtctgctgg

SEQ ID NO: 295052 - DNA, 3132 bp, Homo sapiens
agctgttccccgcgctgcgcggagcagggaccaggcggttgcggcggcgacagccatggccggcgcgctggcaggtctggccgcgggcttgcaggtcccgcgggtcgcgcccagcccagactcggactcggacacagactcggaggacccgagtctccggcgcagcgcgggcggcttgctccgctcgcaggtcatccacagcggtcacttcatggtgtcgtcgccgcacagcgactcgctgccccggcggcgcgaccaggaggggtccgtggggccctccgacttcgggccgcgcagtatcgaccccacactcacacgcctcttcgagtgcttgagcctggcctacagtggcaagctggtgtctcccaagtggaagaatttcaaaggcctcaagctgctctgcagagacaagatccgcctgaacaacgccatctggagggcctggtatatccagtatgtgaagcggaggaagagccccgtgtgtggcttcgtgacccccctgcaggggcctgaggctgatgcgcaccggaagccggaggccgtggtcctggaggggaactactggaagcggcgcatcgaggtggtgatgcgggaataccacaagtggcgcatctactacaagaagcggctccgtaagcccagcagggaagatgacctcctggcccctaagcaggcggaaggcaggtggccgccgccggagcaatggtgcaaacagctcttctccagtgtggtccccgtgctgctgggggacccagaggaggagccgggtgggcggcagctcctggacctcaattgctttttgtccgacatctcagacactctcttcaccatgactcagtccggcccttcgcccctgcagctgccgcctgaggatgcctacgtcggcaatgctgacatgatccagccggacctgacgccactgcagccaagcctggatgacttcatggacatctcagatttctttaccaactcccgcctcccacagccgcccatgccttcaaacttcccagagccccccagcttcagccccgtggttgactccctcttcagcagtgggaccctgggcccagaggtgcccccggcttcctcggccatgacccacctctctggacacagccgtctgcaggctcggaacagctgccctggccccttggactccagcgccttcctgagttctgatttcctccttcctgaagaccccaagccccggctcccaccccctcctgtacccccacctctgctgcattaccctccccctgccaaggtgccaggcctggagccctgccccccacctcccttccctcccatggcaccacccactgctttgctgcaggaagagcctctcttctctcccaggtttcccttccccaccgtccctcctgccccaggagtgtctccgctgcctgctcctgcagccttcccacccaccccacagtctgtccccagcccagcccccacccccttccccatagagcttctacccttggggtattcggagcctgcctttgggccttgcttctccatgcccagaggcaagccccccgccccatcccctaggggacagaaagccagcccccctaccttagcccctgccactgccagtccccccaccactgcggggagcaacaacccctgcctcacacagctgctcacagcagctaagccggagcaagccctggagccaccacttgtatccagcaccctcctccggtccccagggtccccggcagtgaacggcggctgtcaggggacctcagctccatgccaggccctgggactctgagcgtccgtgtctctcccccgcaacccatcctcagccggggccgtccagacagcaacaagaccgagaaccggcgtatcacacacatctccgcggagcagaagcggcgcttcaacatcaagctggggtttgacacccttcatgggctcgtgagcacactcagtgcccagcccagcctcaaggtgagcaaagctaccacgctgcagaagacagctgagtacatccttatgctacagcaggagcgtgcgggcttgcaggaggaggcccagcagctgcgggatgagattgaggagctcaatgccgccattaacctgtgccagcagcagctgcccgccacaggggtacccatcacacaccagcgttttgaccagatgcgagacatgtttgatgactacgtccgaacccgtacgctgcacaactggaagttctgggtgttcagcatcctcatccggcctctgtttgagtccttcaacgggatggtgtccacggcaagtgtgcacaccctccgccagacctcactggcctggctggaccagtactgctctctgcccgctctccggccaactgtcctgaactccctacgccagctgggcacatctaccagtatcctgaccgacccgggccgcatccctgagcaagccacacgggcagtcacagagggcacccttggcaaacctttatagtcctggccagaccctgctgctcactcagctgccctgggggctgctttccctgggcacgggctccagggatcatctctgggcactcccttcctgccccaggccctggctctgcccttccctggggggtggagcagggtccaggtttcacacttgccacctcctggaggtcaagaagagcagagtccccgtccctgctctgccactgtgctccagcaccgtgaccttgggtgactcgtccgctgtctttggaccgctgtgtttcaatctgcaaaatggggatggggaaggttcaatcagcagatgacccccaggccttggcagctgtgacattgggggcctaggctggcaactccgggggctcaacggtggaaagaggaggatgctgtttctctgtcacctccacttgctccccgacaggtggggcacagacctctgttcctgagcagagaagcagaaaaggaggttccctctctctgctccttcactgctgacccagaggggctgcaggatggtttcccctgggagaggccaggagggcctgatcccaggagacaccagggccagagtgaccacagcagggcaggcatcatgtgtgtgtgtgtgtgtggatgtgtgtgtgtgggttttgtaaagaattcttgaccaataaaagcaaaaactgtctgctgg

SEQ ID NO: 295053 - DNA, 3278 bp, Homo sapiens
agctgttccccgcgctgcgcggagcagggaccaggcggttgcggcggcgacagccatggccggcgcgctggcaggtctggccgcgggcttgcaggtcccgcgggtcgcgcccagcccagactcggactcggacacagactcggaggacccgagtctccggcgcagcgcgggcggcttgctccgctcgcaggtcatccacagcggtcacttcatggtgtcgtcgccgcacagcgactcgctgccccggcggcgcgaccaggaggggtccgtggggccctccgacttcgggccgcgcagtatcgaccccacactcacacgcctcttcgagtgcttgagcctggcctacagtggcaagctggtgtctcccaagtggaagaatttcaaaggcctcaagctgctctgcagagacaagatccgcctgaacaacgccatctggagggcctggtatatccagtatgtgaagcggaggaagagccccgtgtgtggcttcgtgacccccctgcaggggcctgaggctgatgcgcaccggaagccggaggccgtggtcctggaggggaactactggaagcggcgcatcgagcctacgtcggcaatgctgacatgatccagccggacctgacgccactgcagccaagcctggatgacttcatggacatctcagatttctttaccaactcccgcctcccacagccgcccatgccttcaaacttcccagagccccccagcttcagccccgtggttgactccctcttcagcagtgggaccctgggcccagaggtgcccccggcttcctcggccatgacccacctctctggacacagccgtctgcaggctcggaacagctgccctggccccttggactccagcgccttcctgagttctgatttcctccttcctgaagaccccaagccccggctcccaccccctcctgtacccccacctctgctgcattaccctccccctgccaaggtgccaggcctggagccctgccccccacctcccttccctcccatggcaccacccactgctttgctgcaggaagagcctctcttctctcccaggtttcccttccccaccgtccctcctgccccaggagtgtctccgctgcctgctcctgcagccttcccacccaccccacagtctgtccccagcccagcccccacccccttccccatagagcttctacccttggggtattcggagcctgcctttgggccttgcttctccatgcccagaggcaagccccccgccccatcccctaggggacagaaagccagcccccctaccttagcccctgccactgccagtccccccaccactgcggggagcaacaacccctgcctcacacagctgctcacagcagctaagccggagcaagccctggagccaccacttgtatccagcaccctcctccggtccccagggtccccgcaggagacagtccctgaattcccctgcacattccttcccccgaccccggcccctacaccgccccggccacctccaggcccggccacattggccccttccaggcccctgcttgtccccaaagcggagcggctctcacccccagcgcccagcggcagtgaacggcggctgtcaggggacctcagctccatgccaggccctgggactctgagcgtccgtgtctctcccccgcaacccatcctcagccggggccgtccagacagcaacaagaccgagaaccggcgtatcacacacatctccgcggagcagaagcggcgcttcaacatcaagctggggtttgacacccttcatgggctcgtgagcacactcagtgcccagcccagcctcaaggtgagcaaagctaccacgctgcagaagacagctgagtacatccttatgctacagcaggagcgtgcgggcttgcaggaggaggcccagcagctgcgggatgagattgaggagctcaatgccgccattaacctgtgccagcagcagctgcccgccacaggggtacccatcacacaccagcgttttgaccagatgcgagacatgtttgatgactacgtccgaacccgtacgctgcacaactggaagttctgggtgttcagcatcctcatccggcctctgtttgagtccttcaacgggatggtgtccacggcaagtgtgcacaccctccgccagacctcactggcctggctggaccagtactgctctctgcccgctctccggccaagtacgtgagccatctccctgcctgctagagggacccagcctcgggggtggagggagcattccaccctgcttagatcccacatccagcttgccatcaacacagcctagggttgtggccaccccgcatcccccagatggtcctctggccaccagacgcctgtagacagaggttctaggagggggtgacagtcttgccaactaatacctccccctatccctttggttccacatccaagggtagggccctgaccccaggaagtgtctgtctctctctctctgtctcccacccagctgtcctgaactccctacgccagctgggcacatctaccagtatcctgaccgacccgggccgcatccctgagcaagccacacgggcagtcacagagggcacccttggcaaacctttatagtcctggccagaccctgctgctcactcagctgccctgggggctgctttccctgggcacgggctccagggatcatctctgggcactcccttcctgccccaggccctggctctgcccttccctggggggtggagcagggtccaggtttcacacttgccacctcctggaggtcaagaagagcagagtccccgtccctgctctgccactgtgctccagcaccgtgaccttgggtgactcgtccgctgtctttggaccgctgtgtttcaatctgcaaaatggggatggggaaggttcaatcagcagatgacccccaggccttggcagctgtgacattgggggcctaggctggcaactccgggggctcaacggtggaaagaggaggatgctgtttctctgtcacctccacttgctccccgacaggtggggcacagacctctgttcctgagcagagaagcagaaaaggaggttccctctctctgctccttcactgctgacccagaggggctgcaggatggtttcccctgggagaggccaggagggcctgatcccaggagacaccagggccagagtgaccacagcagggcaggcatcatgtgtgtgtgtgtgtgtggatgtgtgtgtgtgggttttgtaaagaattcttgaccaataaaagcaaaaactgtctgctgg

SEQ ID NO: 295054 - DNA, 2668 bp, Homo sapiens
cacacccagccgcacaagaacccctcctgcattccgtcctcacacgcaggcctgtccatctacttgctactgtcacactcttgccagcagaagaggcccctgtaatggccgatatcaccacccagtctatcctcaccccacagctgtgcagcgggaacctcctgctggcccacgtgcttgccacagcccatgctggcacgacgctccagcaggtcggcgtccctgcgggccacactaccggtgacatggctagcatgaccctccttcctggcagtgacactgttgatgtgaaccccagtttcacatctgtcatttgtaaataggaccattttcccttttcgctctcccttccattcacagggcttttcattctctctgtttctgcctccgtttcagatatttactcacctttttctctctcactatgtctgccgtggtctccatgagactacgccacgtaagattcccccattaaaggtcatgaattgagtggcttttagtatacctgtggttgtgcacattcaattttaattcgcaatccattgtaaaacgtcttatcacccccgaccagagaaagaccctgtagacattagtcactcctcattctgtctcaaaccctctccctgaccctcagccctaggtagcaactacctagtgcgatcaatcccatatgcatagatttccatattgtggacatttcctataaacggaattgcacaataggtgagctgctatgactgacataacacgtagcacaatattttcaagattcatccacattgtaggcttacccacagggggaaaccattttttggggggttttagtaacaccggtgttttctccttcctttcatccttctttccttccttccttccttccttccttccttccttccttccttccttccgtccctcctgccccaggagtgtctccgctgcctgctcctgcagccttcccacccaccccacagtctgtccccagcccagcccccacccccttccccatagagcttctacccttggggtattcggagcctgcctttgggccttgcttctccatgcccagaggcaagccccccgccccatcccctaggggacagaaagccagcccccctaccttagcccctgccactgccagtccccccaccactgcggggagcaacaacccctgcctcacacagctgctcacagcagctaagccggagcaagccctggagccaccacttgtatccagcaccctcctccggtccccagggtccccggcagtgaacggcggctgtcaggggacctcagctccatgccaggccctgggactctgagcgtccgtgtctctcccccgcaacccatcctcagccggggccgtccagacagcaacaagaccgagaaccggcgtatcacacacatctccgcggagcagaagcggcgcttcaacatcaagctggggtttgacacccttcatgggctcgtgagcacactcagtgcccagcccagcctcaaggtgagcaaagctaccacgctgcagaagacagctgagtacatccttatgctacagcaggagcgtgcgggcttgcaggaggaggcccagcagctgcgggatgagattgaggagctcaatgccgccattaacctgtgccagcagcagctgcccgccacaggggtacccatcacacaccagcgttttgaccagatgcgagacatgtttgatgactacgtccgaacccgtacgctgcacaactggaagttctgggtgttcagcatcctcatccggcctctgtttgagtccttcaacgggatggtgtccacggcaagtgtgcacaccctccgccagacctcactggcctggctggaccagtactgctctctgcccgctctccggccaactgtcctgaactccctacgccagctgggcacatctaccagtatcctgaccgacccgggccgcatccctgagcaagccacacgggcagtcacagagggcacccttggcaaacctttatagtcctggccagaccctgctgctcactcagctgccctgggggctgctttccctgggcacgggctccagggatcatctctgggcactcccttcctgccccaggccctggctctgcccttccctggggggtggagcagggtccaggtttcacacttgccacctcctggaggtcaagaagagcagagtccccgtccctgctctgccactgtgctccagcaccgtgaccttgggtgactcgtccgctgtctttggaccgctgtgtttcaatctgcaaaatggggatggggaaggttcaatcagcagatgacccccaggccttggcagctgtgacattgggggcctaggctggcaactccgggggctcaacggtggaaagaggaggatgctgtttctctgtcacctccacttgctccccgacaggtggggcacagacctctgttcctgagcagagaagcagaaaaggaggttccctctctctgctccttcactgctgacccagaggggctgcaggatggtttcccctgggagaggccaggagggcctgatcccaggagacaccagggccagagtgaccacagcagggcaggcatcatgtgtgtgtgtgtgtgtggatgtgtgtgtgtgggttttgtaaagaattcttgaccaataaaagcaaaaactgtctgctgg

SEQ ID NO: 295055 - DNA, 816 bp, Homo sapiens
cgtggacagattgtttttgccgttttcgggcaactgcctaccttcctccgcatgtggacatctaccagtatcctgaccgacccgggccgcatccctgagcaagccacacgggcagtcacagagggcacccttggcaaacctttatagtcctggccagaccctgctgctcactcagctgccctgggggctgctttccctgggcacgggctccagggatcatctctgggcactcccttcctgccccaggccctggctctgcccttccctggggggtggagcagggtccaggtttcacacttgccacctcctggaggtcaagaagagcagagtccccgtccctgctctgccactgtgctccagcaccgtgaccttgggtgactcgtccgctgtctttggaccgctgtgtttcaatctgcaaaatggggatggggaaggttcaatcagcagatgacccccaggccttggcagctgtgacattgggggcctaggctggcaactccgggggctcaacggtggaaagaggaggatgctgtttctctgtcacctccacttgctccccgacaggtggggcacagacctctgttcctgagcagagaagcagaaaaggaggttccctctctctgctccttcactgctgacccagaggggctgcaggatggtttcccctgggagaggccaggagggcctgatcccaggagacaccagggccagagtgaccacagcagggcaggcatcatgtgtgtgtgtgtgtgtggatgtgtgtgtgtgggttttgtaaagaattcttgaccaataaaagcaaaaactgtctgctgg

SEQ ID NO: 295056 - DNA, 669 bp, Homo sapiens
cgctgctaaaagccgggcccgcggcgcagcgcacggagccctctgccgcccgcgcggagaaggcgccgggcgcggtccggcggtcccaagcatccccgcagcgcccccgccgcccgccgcccgcccctggccgcgccgcgcccctctgcaggtcgagcggattccaggtgagggcgtggagcccccgcgtcatcagtggcaagctggtgtctcccaagtggaagaatttcaaaggcctcaagctgctctgcagagacaagatccgcctgaacaacgccatctggagggcctggtatatccagtatgtgaagcggaggaagagccccgtgtgtggcttcgtgacccccctgcaggggcctgaggctgatgcgcaccggaagccggaggccgtggtcctggaggggaactactggaagcggcgcatcgaggtggtgatgcgggaataccacaagtggcgcatctactacaagaagcggctccgtaagcccagcagggaagatgacctcctggcccctaagcaggtgggtgctctgtaagtccagcaggcaagggcatccctttgccccccaagtagatgggaggcagagttgacagtttccgcctcagtgggcaagacagtggctgggcatgagggtggaatgtgggatgttactgccatcctgtggttca

SEQ ID NO: 295057 - DNA, 3325 bp, Homo sapiens
cgctgctaaaagccgggcccgcggcgcagcgcacggagccctctgccgcccgcgcggagaaggcgccgggcgcggtccggcggtcccaagcatccccgcagcgcccccgccgcccgccgcccgcccctggccgcgccgcgcccctctgcaggtcgagcggattccaggtgagggcgtggagcccccgcgtcatcagtggcaagctggtgtctcccaagtggaagaatttcaaaggcctcaagctgctctgcagagacaagatccgcctgaacaacgccatctggagggcctggtatatccagtatgtgaagcggaggaagagccccgtgtgtggcttcgtgacccccctgcaggggcctgaggctgatgcgcaccggaagccggaggccgtggtcctggaggggaactactggaagcggcgcatcgaggtggtgatgcgggaataccacaagtggcgcatctactacaagaagcgggtcagtgggggagggccaggaggccccagagctttcctcctgcggctgccggctaccgcccgcctcggaagatccctggaaaggggatcctgacccccgagcttgcgcccctcgggccctccattcagtcccgggccgacagcgccaccgtgtggccacagcgtctcctagcggcctccttacctaggggtcggctccgtaagcccagcagggaagatgacctcctggcccctaagcaggcggaaggcaggtggccgccgccggagcaatggtgcaaacagctcttctccagtgtggtccccgtgctgctgggggacccagaggaggagccgggtgggcggcagctcctggacctcaattgctttttgtccgacatctcagacactctcttcaccatgactcagtccggcccttcgcccctgcagctgccgcctgaggatgcctacgtcggcaatgctgacatgatccagccggacctgacgccactgcagccaagcctggatgacttcatggacatctcagatttctttaccaactcccgcctcccacagccgcccatgccttcaaacttcccagagccccccagcttcagccccgtggttgactccctcttcagcagtgggaccctgggcccagaggtgcccccggcttcctcggccatgacccacctctctggacacagccgtctgcaggctcggaacagctgccctggccccttggactccagcgccttcctgagttctgatttcctccttcctgaagaccccaagccccggctcccaccccctcctgtacccccacctctgctgcattaccctccccctgccaaggtgccaggcctggagccctgccccccacctcccttccctcccatggcaccacccactgctttgctgcaggaagagcctctcttctctcccaggtttcccttccccaccgtccctcctgccccaggagtgtctccgctgcctgctcctgcagccttcccacccaccccacagtctgtccccagcccagcccccacccccttccccatagagcttctacccttggggtattcggagcctgcctttgggccttgcttctccatgcccagaggcaagccccccgccccatcccctaggggacagaaagccagcccccctaccttagcccctgccactgccagtccccccaccactgcggggagcaacaacccctgcctcacacagctgctcacagcagctaagccggagcaagccctggagccaccacttgtatccagcaccctcctccggtccccagggtccccgcaggagacagtccctgaattcccctgcacattccttcccccgaccccggcccctacaccgccccggccacctccaggcccggccacattggccccttccaggcccctgcttgtccccaaagcggagcggctctcacccccagcgcccagcggcagtgaacggcggctgtcaggggacctcagctccatgccaggccctgggactctgagcgtccgtgtctctcccccgcaacccatcctcagccggggccgtccagacagcaacaagaccgagaaccggcgtatcacacacatctccgcggagcagaagcggcgcttcaacatcaagctggggtttgacacccttcatgggctcgtgagcacactcagtgcccagcccagcctcaaggtgagcaaagctaccacgctgcagaagacagctgagtacatccttatgctacagcaggagcgtgcgggcttgcaggaggaggcccagcagctgcgggatgagattgaggagctcaatgccgccattaacctgtgccagcagcagctgcccgccacaggggtacccatcacacaccagcgttttgaccagatgcgagacatgtttgatgactacgtccgaacccgtacgctgcacaactggaagttctgggtgttcagcatcctcatccggcctctgtttgagtccttcaacgggatggtgtccacggcaagtgtgcacaccctccgccagacctcactggcctggctggaccagtactgctctctgcccgctctccggccaactgtcctgaactccctacgccagctgggcacatctaccagtatcctgaccgacccgggccgcatccctgagcaagccacacgggcagtcacagagggcacccttggcaaacctttatagtcctggccagaccctgctgctcactcagctgccctgggggctgctttccctgggcacgggctccagggatcatctctgggcactcccttcctgccccaggccctggctctgcccttccctggggggtggagcagggtccaggtttcacacttgccacctcctggaggtcaagaagagcagagtccccgtccctgctctgccactgtgctccagcaccgtgaccttgggtgactcgtccgctgtctttggaccgctgtgtttcaatctgcaaaatggggatggggaaggttcaatcagcagatgacccccaggccttggcagctgtgacattgggggcctaggctggcaactccgggggctcaacggtggaaagaggaggatgctgtttctctgtcacctccacttgctccccgacaggtggggcacagacctctgttcctgagcagagaagcagaaaaggaggttccctctctctgctccttcactgctgacccagaggggctgcaggatggtttcccctgggagaggccaggagggcctgatcccaggagacaccagggccagagtgaccacagcagggcaggcatcatgtgtgtgtgtgtgtgtggatgtgtgtgtgtgggttttgtaaagaattcttgaccaataaaagcaaaaactgtctgctgg

SEQ ID NO: 295058 - DNA, 2703 bp, Homo sapiens
ggaggatggggcaagggatccggtgtccaactctgtgtgtccctgcagctccgtaagcccagcagggaagatgacctcctggcccctaagcaggcggaaggcaggtggccgccgccggagcaatggtgcaaacagctcttctccagtgtggtccccgtgctgctgggggacccagaggaggagccgggtgggcggcagctcctggacctcaattgctttttgtccgacatctcagacactctcttcaccatgactcagtccggcccttcgcccctgcagctgccgcctgaggatgcctacgtcggcaatgctgacatgatccagccggacctgacgccactgcagccaagcctggatgacttcatggacatctcagatttctttaccaactcccgcctcccacagccgcccatgccttcaaacttcccagagccccccagcttcagccccgtggttgactccctcttcagcagtgggaccctgggcccagaggtgcccccggcttcctcggccatgacccacctctctggacacagccgtctgcaggctcggaacagctgccctggccccttggactccagcgccttcctgagttctgatttcctccttcctgaagaccccaagccccggctcccaccccctcctgtacccccacctctgctgcattaccctccccctgccaaggtgccaggcctggagccctgccccccacctcccttccctcccatggcaccacccactgctttgctgcaggaagagcctctcttctctcccaggtttcccttccccaccgtccctcctgccccaggagtgtctccgctgcctgctcctgcagccttcccacccaccccacagtctgtccccagcccagcccccacccccttccccatagagcttctacccttggggtattcggagcctgcctttgggccttgcttctccatgcccagaggcaagccccccgccccatcccctaggggacagaaagccagcccccctaccttagcccctgccactgccagtccccccaccactgcggggagcaacaacccctgcctcacacagctgctcacagcagctaagccggagcaagccctggagccaccacttgtatccagcaccctcctccggtccccagggtccccgcaggagacagtccctgaattcccctgcacattccttcccccgaccccggcccctacaccgccccggccacctccaggcccggccacattggccccttccaggcccctgcttgtccccaaagcggagcggctctcacccccagcgcccagcggcagtgaacggcggctgtcaggggacctcagctccatgccaggccctgggactctgagcgtccgtgtctctcccccgcaacccatcctcagccggggccgtccagacagcaacaagaccgagaaccggcgtatcacacacatctccgcggagcagaagcggcgcttcaacatcaagctggggtttgacacccttcatgggctcgtgagcacactcagtgcccagcccagcctcaaggtgagcaaagctaccacgctgcagaagacagctgagtacatccttatgctacagcaggagcgtgcgggcttgcaggaggaggcccagcagctgcgggatgagattgaggagctcaatgccgccattaacctgtgccagcagcagctgcccgccacaggggtacccatcacacaccagcgttttgaccagatgcgagacatgtttgatgactacgtccgaacccgtacgctgcacaactggaagttctgggtgttcagcatcctcatccggcctctgtttgagtccttcaacgggatggtgtccacggcaagtgtgcacaccctccgccagacctcactggcctggctggaccagtactgctctctgcccgctctccggccaactgtcctgaactccctacgccagctgggcacatctaccagtatcctgaccgacccgggccgcatccctgagcaagccacacgggcagtcacagagggcacccttggcaaacctttatagtcctggccagaccctgctgctcactcagctgccctgggggctgctttccctgggcacgggctccagggatcatctctgggcactcccttcctgccccaggccctggctctgcccttccctggggggtggagcagggtccaggtttcacacttgccacctcctggaggtcaagaagagcagagtccccgtccctgctctgccactgtgctccagcaccgtgaccttgggtgactcgtccgctgtctttggaccgctgtgtttcaatctgcaaaatggggatggggaaggttcaatcagcagatgacccccaggccttggcagctgtgacattgggggcctaggctggcaactccgggggctcaacggtggaaagaggaggatgctgtttctctgtcacctccacttgctccccgacaggtggggcacagacctctgttcctgagcagagaagcagaaaaggaggttccctctctctgctccttcactgctgacccagaggggctgcaggatggtttcccctgggagaggccaggagggcctgatcccaggagacaccagggccagagtgaccacagcagggcaggcatcatgtgtgtgtgtgtgtgtggatgtgtgtgtgtgggttttgtaaagaattcttgaccaataaaagcaaaaactgtctgctgg

SEQ ID NO: 295059 - DNA, 2782 bp, Homo sapiens
agctgttccccgcgctgcgcggagcagggaccaggcggttgcggcggcgacagccatggccggcgcgctggcaggtctggccgcgggcttgcaggtcccgcgggtcgcgcccagcccagactcggactcggacacagactcggaggacccgagtctccggcgcagcgcgggcggcttgctccgctcgcaggtcatccacagcggtcacttcatggtgtcgtcgccgcacagcgactcgctgccccggcggcgcgaccaggaggggtccgtggggccctccgacttcgggccgcgcagtatcgaccccacactcacacgcctcttcgagtgcttgagcctggcctacagtggcaagctggtgtctcccaagtggaagaatttcaaaggcctcaagctgctctgcagagacaagatccgcctgaacaacgccatctggagggcctggtatatccagtatttctttaccaactcccgcctcccacagccgcccatgccttcaaacttcccagagccccccagcttcagccccgtggttgactccctcttcagcagtgggaccctgggcccagaggtgcccccggcttcctcggccatgacccacctctctggacacagccgtctgcaggctcggaacagctgccctggccccttggactccagcgccttcctgagttctgatttcctccttcctgaagaccccaagccccggctcccaccccctcctgtacccccacctctgctgcattaccctccccctgccaaggtgccaggcctggagccctgccccccacctcccttccctcccatggcaccacccactgctttgctgcaggaagagcctctcttctctcccaggtttcccttccccaccgtccctcctgccccaggagtgtctccgctgcctgctcctgcagccttcccacccaccccacagtctgtccccagcccagcccccacccccttccccatagagcttctacccttggggtattcggagcctgcctttgggccttgcttctccatgcccagaggcaagccccccgccccatcccctaggggacagaaagccagcccccctaccttagcccctgccactgccagtccccccaccactgcggggagcaacaacccctgcctcacacagctgctcacagcagctaagccggagcaagccctggagccaccacttgtatccagcaccctcctccggtccccagggtccccgcaggagacagtccctgaattcccctgcacattccttcccccgaccccggcccctacaccgccccggccacctccaggcccggccacattggccccttccaggcccctgcttgtccccaaagcggagcggctctcacccccagcgcccagcggcagtgaacggcggctgtcaggggacctcagctccatgccaggccctgggactctgagcgtccgtgtctctcccccgcaacccatcctcagccggggccgtccagacagcaacaagaccgagaaccggcgtatcacacacatctccgcggagcagaagcggcgcttcaacatcaagctggggtttgacacccttcatgggctcgtgagcacactcagtgcccagcccagcctcaaggtgagcaaagctaccacgctgcagaagacagctgagtacatccttatgctacagcaggagcgtgcgggcttgcaggaggaggcccagcagctgcgggatgagattgaggagctcaatgccgccattaacctgtgccagcagcagctgcccgccacaggggtacccatcacacaccagcgttttgaccagatgcgagacatgtttgatgactacgtccgaacccgtacgctgcacaactggaagttctgggtgttcagcatcctcatccggcctctgtttgagtccttcaacgggatggtgtccacggcaagtgtgcacaccctccgccagacctcactggcctggctggaccagtactgctctctgcccgctctccggccaactgtcctgaactccctacgccagctgggcacatctaccagtatcctgaccgacccgggccgcatccctgagcaagccacacgggcagtcacagagggcacccttggcaaacctttatagtcctggccagaccctgctgctcactcagctgccctgggggctgctttccctgggcacgggctccagggatcatctctgggcactcccttcctgccccaggccctggctctgcccttccctggggggtggagcagggtccaggtttcacacttgccacctcctggaggtcaagaagagcagagtccccgtccctgctctgccactgtgctccagcaccgtgaccttgggtgactcgtccgctgtctttggaccgctgtgtttcaatctgcaaaatggggatggggaaggttcaatcagcagatgacccccaggccttggcagctgtgacattgggggcctaggctggcaactccgggggctcaacggtggaaagaggaggatgctgtttctctgtcacctccacttgctccccgacaggtggggcacagacctctgttcctgagcagagaagcagaaaaggaggttccctctctctgctccttcactgctgacccagaggggctgcaggatggtttcccctgggagaggccaggagggcctgatcccaggagacaccagggccagagtgaccacagcagggcaggcatcatgtgtgtgtgtgtgtgtggatgtgtgtgtgtgggttttgtaaagaattcttgaccaataaaagcaaaaactgtctgctgg

SEQ ID NO: 295060 - DNA, 1429 bp, Homo sapiens
gggtctgtctgtccctaccacaggcagtgaacggcggctgtcaggggacctcagctccatgccaggccctgggactctgagcgtccgtgtctctcccccgcaacccatcctcagccggggccgtccagacagcaacaagaccgagaaccggcgtatcacacacatctccgcggagcagaagcggcgcttcaacatcaagctggggtttgacacccttcatgggctcgtgagcacactcagtgcccagcccagcctcaaggtgagcaaagctaccacgctgcagaagacagctgagtacatccttatgctacagcaggagcgtgcgggcttgcaggaggaggcccagcagctgcgggatgagattgaggagctcaatgccgccattaacctgtgccagcagcagctgcccgccacaggggtacccatcacacaccagcgttttgaccagatgcgagacatgtttgatgactacgtccgaacccgtacgctgcacaactggaagttctgggtgttcagcatcctcatccggcctctgtttgagtccttcaacgggatggtgtccacggcaagtgtgcacaccctccgccagacctcactggcctggctggaccagtactgctctctgcccgctctccggccaactgtcctgaactccctacgccagctgggcacatctaccagtatcctgaccgacccgggccgcatccctgagcaagccacacgggcagtcacagagggcacccttggcaaacctttatagtcctggccagaccctgctgctcactcagctgccctgggggctgctttccctgggcacgggctccagggatcatctctgggcactcccttcctgccccaggccctggctctgcccttccctggggggtggagcagggtccaggtttcacacttgccacctcctggaggtcaagaagagcagagtccccgtccctgctctgccactgtgctccagcaccgtgaccttgggtgactcgtccgctgtctttggaccgctgtgtttcaatctgcaaaatggggatggggaaggttcaatcagcagatgacccccaggccttggcagctgtgacattgggggcctaggctggcaactccgggggctcaacggtggaaagaggaggatgctgtttctctgtcacctccacttgctccccgacaggtggggcacagacctctgttcctgagcagagaagcagaaaaggaggttccctctctctgctccttcactgctgacccagaggggctgcaggatggtttcccctgggagaggccaggagggcctgatcccaggagacaccagggccagagtgaccacagcagggcaggcatcatgtgtgtgtgtgtgtgtggatgtgtgtgtgtgggttttgtaaagaattcttgaccaataaaagcaaaaactgtctgctgg

SEQ ID NO: 295061 - DNA, 3408 bp, Homo sapiens
cgctgctaaaagccgggcccgcggcgcagcgcacggagccctctgccgcccgcgcggagaaggcgccgggcgcggtccggcggtcccaagcatccccgcagcgcccccgccgcccgccgcccgcccctggccgcgccgcgcccctctgcaggtcgagcggattccaggtgagggcgtggagcccccgcgtcatcagtggcaagctggtgtctcccaagtggaagaatttcaaaggcctcaagctgctctgcagagacaagatccgcctgaacaacgccatctggagggcctggtatatccagtatgtgaagcggaggaagagccccgtgtgtggcttcgtgacccccctgcaggggcctgaggctgatgcgcaccggaagccggaggccgtggtcctggaggggaactactggaagcggcgcatcgaggtggtgatgcgggaataccacaagtggcgcatctactacaagaagcgggtcagtgggggagggccaggaggccccagagctttcctcctgcggctgccggctaccgcccgcctcggaagatccctggaaaggggatcctgacccccgagcttgcgcccctcgggccctccattcagtcccgggccgacagcgccaccgtgtggccacagcgtctcctagcggcctccttacctaggggtcggctccgtaagcccagcagggaagatgacctcctggcccctaagcaggcggaaggcaggtggccgccgccggagcaatggtgcaaacagctcttctccagtgtggtccccgtgctgctgggggacccagaggaggagccgggtgggcggcagctcctggacctcaattgctttttgtccgacatctcagacactctcttcaccatgactcagtccggcccttcgcccctgcagctgccgcctgaggatgcctacgtcggcaatgctgacatgatccagccggacctgacgccactgcagccaagcctggatgacttcatggacatctcagatttctttaccaactcccgcctcccacagccgcccatgccttcaaacttcccagagccccccagcttcagccccgtggttgactccctcttcagcagtgggaccctgggcccagaggtgcccccggcttcctcggccatgacccacctctctggacacagccgtctgcaggctcggaacagctgccctggccccttggactccagcgccttcctgagttctgatttcctccttcctgaagaccccaagccccggctcccaccccctcctgtacccccacctctgctgcattaccctccccctgccaaggtgccaggcctggagccctgccccccacctcccttccctcccatggcaccacccactgctttgctgcaggaagagcctctcttctctcccaggtttcccttccccaccgtccctcctgccccaggagtgtctccgctgcctgctcctgcagccttcccacccaccccacagtctgtccccagcccagcccccacccccttccccatagagcttctacccttggggtattcggagcctgcctttgggccttgcttctccatgcccagaggcaagccccccgccccatcccctaggggacagaaagccagcccccctaccttagcccctgccactgccagtccccccaccactgcggggagcaacaacccctgcctcacacagctgctcacagcagctaagccggagcaagccctggagccaccacttgtatccagcaccctcctccggtccccagggtccccgcaggagacagtccctgaattcccctgcacattccttcccccgaccccggcccctacaccgccccggccacctccaggcccggccacattggccccttccaggcccctgcttgtccccaaagcggagcggctctcacccccagcgcccagcggcagtgaacggcggctgtcaggggacctcagctccatgccaggccctgggactctgagcgtccgtgtctctcccccgcaacccatcctcagccggggccgtccagacagcaacaagaccgagaaccggcgtatcacacacatctccgcggagcagaagcggcgcttcaacatcaagctggggtttgacacccttcatgggctcgtgagcacactcagtgcccagcccagcctcaaggtgagcaaagctaccacgctgcagaagacagctgagtacatccttatgctacagcaggagcgtgcgggcttgcaggaggaggcccagcagctgcgggatgagattgaggagctcaatgccgccattaacctgtgccagcagcagctgcccgccacaggggtacccatcacacaccagcgttttgaccagatgcgagacatgtttgatgactacgtccgaacccgtacgctgcacaactggaagttctgggtgttcagcatcctcatccggcctctgtttgagtccttcaacgggatggtgtccacggcaagtgtgcacaccctccgccagacctcactggcctggctggaccagtactgctctctgcccgctctccggccaactgtcctgaactccctacgccagctgggcacatctaccagtatcctgaccgacccgggccgcatccctgagcaagccacacgggcagtcacagagggcacccttggcaaacctttatagtcctggccagaccctgctgctcactcagctgccctgggggctgctttccctgggcacgggctccagggatcatctctgggcactcccttcctgccccaggccctggctctgcccttccctggggggtggagcagggtccaggtttcacacttgccacctcctggaggtcaagaagagcagagtccccgtccctgctctgccactgtgctccagcaccgtgaccttgggtgactcgtccgctgtctttggaccgctgtgtttcaatctgcaaaatggggatggggaaggttcaatcagcagatgacccccaggccttggcagctgtgacattgggggcctaggctggcaactccgggggctcaacggtggaaagaggaggatgctgtttctctgtcacctccacttgctccccgacaggtggggcacagacctctgttcctgagcagagaagcagaaaaggaggttccctctctctgctccttcactgctgacccagaggggctgcaggatggtttcccctgggagaggccaggagggcctgatcccaggagacaccagggccagagtgaccacagcagggcaggcatcatgtgtgtgtgtgtgtgtggatgtgtgtgtgtgggttttgtaaagaattcttgaccaataaaagcaaaaactgtctgctggaaaaaaaaaaaatacttgaaaaactgaaagcttaatggagcgttactaaccttaaaagaaaggagtactttgacatttaaaaa

SEQ ID NO: 295062 - DNA, 387 bp, Homo sapiens
aaaaaaaaaaagaagaagtaggggctgcaacatgagtcattggggttcaacgttagacagtgtccaggccctttcttcccctggtttgaactgggcatcagggctccacgtggtgtggggggaccagctggaccacaggcagctccttgacctgggcccagttcagcatcctcatccggcctctgtttgagtccttcaacgggatggtgtccacggcaagtgtgcacaccctccgccagacctcactggcctggctggaccagtactgctctctgcccgctctccggccaagtacgtgagccatctccctgcctgctagagggacccagcctcgggggtggagggagcattccaccctgcttagatcccacatccagcttgccatca

SEQ ID NO: 295063 - DNA, 485 bp, Homo sapiens
gcggccgctgagcgcatcggagggcgggcgcgccgaggcgccgggtgggagcggagcatcttcacttctgcggggacctagtttgcccccacctgatgcaacccagaaaatggactgactgcgagtgccttggggcggagaatgtgtcttgctacgtgtaaagcacctagaaccctgccagattcaggggacacagcatcctgccgttttcctgccgtcccccgcccgccacacagtaggcgctccagtggctcggggcatctaccaggcaggccgcgctgtcctgccctgccggggctggagtggagcaaccctccggggccacccacatctgggtaccttttccccactttttccaccccagccgcgcacagtcaccagaaaactcttttaggtatctgaccttcatttgaacctatgttccctcacttgaacttctttttcctcattcatgagattctaaaggaaatatatgggattgggac

SEQ ID NO: 295064 - DNA, 609 bp, Homo sapiens
gcggcgcgctgggttgctttctcgggggtcgggtgagggccaggcggcggtccctacccggatccgccttcctcaaggcgggtctgcccttcggggagggcgtgtcggtctcagcctctggggcctgcctggtgtggaggacaggagagaagcatttcttctcctactgtattccttcagcatcttcacttctgcggggacctagtttgcccccacctgatgcaacccagaaaatggactgactgcgagtgccttggggcggagaatgtgtcttgctacgtgtaaagcacctagaaccctgccagattcaggggacacagcatcctgccgttttcctgccgtcccccgcccgccacacagtaggcgctccagtggctcggggcatctaccaggcaggccgcgctgtcctgccctgccggggctggagtggagcaaccctccggggccacccacatctgggtaccttttccccactttttccaccccagccgcgcacagtcaccagaaaactcttttaggtatctgaccttcatttgaacctatgttccctcacttgaacttctttttcctcattcatgagattctaaaggaaatatatgggattgggac

SEQ ID NO: 295065 - DNA, 3032 bp, Homo sapiens
atgatgcaaactaaagtacagaacaagaaaaggcaagtggctttcttcattttattgatgctttggggagaggtgggttctgaatcgattcagtattccgtattggaggagacagaaagtggcacgtttgtggccaacttgacaaaggacctgggactgagggtgggggagctggcttcgcggggcgctcgggttgttttcaaagggaacagacaacatttgcagtttgatccacagacccatgatttactgctaaatgaaaaactggaccgggaggagctgtgtggctccactgagccgtgtgtgctacctttccaagtgttactggaaaaccccttgcagttttttcaggcttccttgcgagtcagagatataaatgaccacgccccggaattccctgccagagaaatgctcctgaaaatatcagaaattactatgccaggaaagatatttcctttgaaaatggcacacgatttagacaccggcagcaacggccttcagaggtacacaatcagctccaaccctcacttccacgttctcacccgcaatcgcagcgaaggcaggaagttcccggagctggtgctagacaaaccgttggaccgcgaggagcagccccaactcaggctaacgctgatcgcgctggatggcgggtctccgccccggtcagggacctccgagattcagatccaggttttggacatcaatgacaacgtccccgagtttgctcaggagctctatgaagcacaagtccctgagaacaaccccctcggctctctggttattaccgtctcagccagagatttagatgcaggatcgtttgggaaggtatcttacgccctgtttcaagtcgatgacgtcaaccaacccttcgaaataaacgcaatcacaggagaaattcggctgagaaaggctttggattttgaggaaattcagtcttatgacgtggatgttgaggctacagatggtggaggcctatcaggaaaatgctctttagtcgtcagggtcctggacgtgaatgacaatgcccctgaactcaccatgtcgttcttcatcagcctcatcccagaaaacttaccagagatcacagtggcagttttcagtgtttcagatgcagactctggacataaccaacaggttatttgttcaatagagaacaatctcccctttctactaagaccttccgtggagaatttctacaccctggtaacagaaggcgcgctggacagagagagcagagccgagtacaacatcactatcacggtcactgatttggggacaccaaggctgaaaacccagcagagcataactgtgcaggtctccgacgtcaatgacaacgtccccgccttcacccaaacctcctacaccctgttcgtccgcgagaacaacagccccgccctgcacatcggcagcgtcagcgccacagacagagactcaggcatcaacgcccaggtcacctactcgctgctgccgccccaggacccgcacctgcccctctcttccctggtctccatcaacgcggacaacggccacctgtttgccctcaggtcgctggactacgaggccctgcagtctttcgagttccgcgtgggcgccacagaccgcggctccccggcgttgagcagcgaggcgctggtgcgcttgctggtgctggacgccaacgacaactcgcccttcgtgttgtacccgctgcagaacggctccgcgccctgcaccgagctggtgccccgggcggccgagccgggctacctggtgaccaaggtggtggcggtggacggcgactcgggccagaacgcctggctgtcgtaccagctgctcaaggccacggagctcggtctgttcggcgtgtgggcgcacaatggcgaggtgcgcaccgccaggctgctgagcgagcgagacgcagccaagcacaggctggtggtgcttgtcaaggacaatggcgagcctccgcgctcggccaccgccacgctgcacgtgctcctggtggacggcttctcccagccctacctgcctctccctgaggcggccccggcccaagcccaggccgactctctcaccgtctacctggtggtggcgttggcctcggtgtcgtcgctcttcctcttttcggtgctcctgttcgtggcggtgcggctgtgcaggaggagcagggcggcctcggtgggtcgctactcggtgcccgagggtccctttccagggcatctggtggatgtgagcggcaccgggaccctatcccagagctaccagtacaaggtgtgtctgacgggaggctcagaaacaaatgagttcaagttcctgaagccgattatgcccaacttccctcctcagggcactgagagagaaatggaagaaacccccacctctcggaatagcttcccgttcagttaagtgtgggattattttactaaatcttacttatgtttggagatctcttttaacttaaagttacatggtctgtttcttgtttattttacctctattctttaggttgaaattttatataaagtaagatactggtatcttagtatttcctgttcatgcttagtagtttattacttcacttgagggtacttgacaatatgaacaaaaagtaaatttttatttgcataattttaagcttttgaaattaaattatctattcttcccccccccaaaaaaaagtattgtaaatccttaagtaaaattgtatttctagctattggtaagagttgtttcactattgctatgtaggactgtttaaaatgtgagtatctgatattatttaatcctccaatgtctcattttgcagtaactcctacagtgtgtaacactaaaaataagaactaatgatggctaaacactaaagtagccattcatacttatgcatattttagtatcccataatagtcaatccaaaatttttgtgactatagactttactgaagtgtcaacacattagtttgtgagcctcatgtaagaacatgatggtctttttttaaaaaaaaagtcgtgccaattataagtgcttaataaatatttgctgaatgttactaaca

SEQ ID NO: 295066 - DNA, 3498 bp, Homo sapiens
  misc_feature (1)..(1): n is a, c, g, or t
  misc_feature (38)..(38): n is a, c, g, or t
  misc_feature (40)..(40): n is a, c, g, or t
  misc_feature (129)..(129): n is a, c, g, or t
nggagcaatgtgctggacctcagttcaacgaagatgangntatagagttttcactcattttgttcagctttccaaggaatgcatgtataaaagtcatcatcgatccatgcacagtctttgtacctacanagatggaatatcagaagattttggaaaatggacatttaccatcctgagggatccaccagcacctgaagaagcccacgccacatatgctgcacgtgcccaggggctccccaccatctccaggaatctcccaagacaaagatgatccatcgcagcctctggccttcttccatgccagaccacctaggaattagaggcaaaacaggtgtgcttgagaaaggcaagcaggtacacaggtctcaagggccatgccattcattcccttgtggtgcatcctgtatctacttcccacaggctactacagaaggaaccagaggcactataattcatgggtgtggtctggtttagcaacacctaagttttgctgacagccgtgagtgacaagatacaaacaaacccactgcttcatgcagttaaaaataacaacaaacctctgtaggtctgcaatgcttgtaactaagttctggtattccaagaaccattgccagtgatcaaggaacatatttcaaaggctcactaatccaagattgggcagaaatgtagaatatgacctggcaatttcatctgtgctacaaaccacagaaagcagaatttatagaaaagaaaacggtgtcttaaagaaacaaattaaactcttgagagaaatccttgcacttaaaacctgaaggatggttccatggaagctacacatggcaggaatgaggccccctgtgtaagagaaaagttggcctgtgaatgtctgctggacataaagagtccagtgggagccttgtggatatagaaaattatccaacactgccttgatactggacacaagtccacatgggataccctaattttgtgctctccctgtcacacaacccccaggcagtgaatcctgcaataagatttaggaagaaaactgcctttgaccttaggcaggaggtcaacactgccccaaaaccgacctctaacatacttcttattaaagggccccaagagaggtatccacaatgaccagacagtgcccccaaaacaatagaaattccagtagcactaggatagcagaatgactcagacttagcactgcagggagtatgagtacaaccacaaggacataaaatatctaaaaaagacctcctgaaagtttccagatcactgagattattgcagaaagagatgcataccagacttcaaacataggagagaatagggtcacttacgtaaaccaatatattttggttttgccactgttcacttgagctaccatccacactgctgttacatcaccacacttaatgttgggataaccacaacatttttttttctgatatcgacctgatatactccaataaaatgttccctggagaaaaacacgtgtgactggggatggagcaaagactgtcaggaaacaaaagcaatctgctgaaaggccctcccatgtagacatcagatcatattccattcccagcaccctaaggccaacatggcatttgtgatgtgcagtacacaccatgcaaaacagacgcgcaaatgtggcggacatccccatcttagggtaccaagtcaacacatgtatggcgctttctcattcccacctggagtatccatcaccagccatgggatttcagtttctccctggagacacacaaatcataaatggagccgatctacagggtactctccagaaagaaaataagcatcaccaacctcctcacaactgacttccactgctgctacgaaaacaccatgggcactaaaaagtcctcagccatgaaaaaaaatgagccaaagaacaacaaagatgtggccttgggctctcttcccaaccacaaggagctatctacctctggggaacaagggaacccagagccagcactcaaggacaaacctggccacacagaggcgggttaccggctaactcttctgtgccacctgcacattcacccagtcctgcagacattgtgcgtgctacccagcctcacaaagagaagtccttcacacaaggaatctcctctgcacaggagcacctactgccctgtgactccctttgatccaaagtggaccccatcctaagcctggatggatggcttagtgcaacccacatcaaccaatggaagttgtctctctctctccagctccagttggagccacgtgctggacctcagtttgacgaggacgacggtatagagttttcactcattttgttcagctttccaaggaatgcatgtattgaggtcatcatcgatccatgcacagtctttatccctgcaaagaaggaacatcaggggcttttggaaaatggacatttaccaacctgtgggatccaccagcacccaacagagatcacattccacatgtcaaggggctccctgccctctctagggatctcccaagatgaagactgtccctcgtagccactggccttacttccatggccacaacacctgggaagtgcagaggaaaaacgggtgtgcttaagaacgggaggcaggtacacatgtcaaaagggccattccactcgactcactgtggtatatcccatatgtgcttcccacaggctactccccttttgggatgggtgtatgggtctacccaggaatgaagatagcaggcacgtgttaattttgaaggcaccatcaagctacagagccctaagtgtaagaactctctcaaaaccactcatttgccatcactgactcaaaagccctcctcttggtcatcagagaagacacaagccacagggctatttaaatgaggagagttttggggaaaaactcttccagtacaaaaggcaattttccttcagtcttgaagacttttcaccctgggctgcttgaacacttttcagattgagaaaaacgttcaataacaacttaacctctacctcagcgtcttcctcacaggtgcagctcagaggaccaccagacacactgaatcccacatggcttctaaggcactgtggctgagaacaccatacattttaaggcacttgcctttgaacatggccgcgcagtgcaaaacctatgcatcactgcctgtggataccagccctgtcctacaacaagatgactatttcacaaagaagactcctgggaagaattaggaggaattagaaaataacctaacatcacgagctactaaggtatttaagcacagagaccttcctggaccatgtttccgagtagagatcaccaggatatgggaagtcacactcttataatcgggcacgttgactgcatcgaggtgcctgagtggttcagaggcaaagtatgcacaacctacgataggtagaaaccctgggccgatataagctcaaatgcctaatggagacaagcatctcacagagggtcctgaacacagaccttccaaaccaagtcagtctgaggagtt

SEQ ID NO: 295067 - DNA, 1501 bp, Homo sapiens
  misc_feature (1415)..(1415): n is a, c, g, or t
  misc_feature (1418)..(1418): n is a, c, g, or t
gccgtcgtccgcaaagcctgagtcctgtcctttctctctccccggacagcatgagcttcaccactcgctccaccttctccaccaactaccggtccctgggctctgtccaggcgcccagctacggcgcccggccggtcagcagcgcggccagcgtctatgcaggcgctgggggctctggttcccggatctccgtgtcccgctccaccagcttcaggggcggcatggggtccgggggcctggccaccgggatagccgggggtctggcaggaatgggaggcatccagaacgagaaggagaccatgcaaagcctgaacgaccgcctggcctcttacctggacagagtgaggagcctggagaccgagaaccggaggctggagagcaaaatccgggagcacttggagaagaagggaccccaggtcagagactggagccattacttcaagatcatcgaggacctgagggctcagatcttcgcaaatactgtggacaatgcccgcatcgttctgcagattgacaatgcccgtcttgctgctgatgactttagagtcaagtatgagacagagctggccatgcgccagtctgtggagaacgacatccatgggctccgcaaggtcattgatgacaccaatatcacacgactgcagctggagacagagatcgaggctctcaaggaggagctgctcttcatgaagaagaaccacgaagaggaagtaaaaggcctacaagcccagattgccagctctgggttgaccgtggaggtagatgcccccaaatctcaggacctcgccaagatcatggcagacatccggggccaatatgacgagctggctcggaagaaccgagaggagctagacaagtactggtctcagcagattgaggagagcaccacagtggtcaccacacagtctgctgaggttggagctgctgagacgacgctcacagagctgagacgtacagtccagtccttggagatcgacctggactccatgagaaatctgaaggccacgttggagaacagcctgagggaggtggaggcccgctacgccctacagatggagcagctcaacgggatcctgctgcaccttgagtcagagctggcacagacccgggcagagggacagcgccaggcccaggagtatgaggccctgctgaacatcaaggtcaagctggaggctgagatcgccacctaccgccgcctgctggaagatggcgaggactttaatcttggtgatgccttggacagcagcaactccatgcaaaccatccaaaagaccaccacccgccggatagtggatggcaaagtggtgtctgagaccaatgacaccaaagttctgaggcattaagccagcagaagcagggtaccctttggggagcaggaggccaataaaaagttcagagttcaaaaaacaaaaaanaanaaaacaccggtttttctggggcgacagagaaacgcgccggctcgttgccacccttggcaagggcgggccctggggtataatcg

SEQ ID NO: 295068 - DNA, 2604 bp, Homo sapiens
ggcgcgctccagcacatggcgccctgctgcagcaagggccgacggcggcggagtccgccgctatcccatcagcccggccaggcaggtccagctctcacccgcccaggtcgtcccgcctcccctatcccgtcttgctctgcggcgcaggggcaagatggctgctgagaagcaggtcccaggcggcggcggcggcggcggcaggcggtggacgtggtgccggaggggaagaaaataaagaaaacgaacgcccttcggccggatcgaaggcaaacaaagaatttggggatagcctgagtttggagattcttcagattattaaggaatcccagcagcagcatggtttacggcatggagattttcagaggtacaggggctactgttcccgtagacaaagacgtcttcgaaaaacactcaacttcaagatgggtaacagacacaaattcacagggaagaaagtgactgaagagcttctgaccgataatagatacttgcttctggttctgatggatgctgaaagagcctggagctacgccatgcagctgaaacaggaagccaacactgaaccccgaaaacggtttcacttgttatctcgcctacgcaaagccgtgaagcatgcagaggaattggaacgcttgtgtgagagcaatcgcgtggatgccaagaccaaattagaggctcaggcttacacagcttacctctcaggaatgctacgttttgaacatcaagaatggaaagctgccattgaggcttttaacaaatgcaaaactatctatgagaagctagccagtgctttcacagaggagcaggctgtgctgtataaccaacgtgtggaagagatttcacccaacatccgctattgtgcatataatattggggaccagtcagccatcaatgaactcatgcagatgagattgaggtctgggggcactgagggtctcttggctgaaaaattggaggctttgatcactcagactcgagccaaacaggcagctaccatgagtgaagtggagtggagagggagaacggttccagtgaagattgacaaagtgcgcattttcttattaggactggctgataacgaagcagctattgtccaggctgaaagcgaagaaactaaggagcgcctgtttgaatcaatgctcagcgagtgtcgggacgccatccaggtggttcgggaggagctcaagccagatcagaaacagagagattatatccttgaaggagagccagggaaggtgtctaatcttcaatacttgcatagctacctgacttacatcaagctatcaacggcaatcaagcgtaatgagaacatggccaaaggtctgcagagggctctgctgcagcagcagccagaggatgacagcaagcgctcaccccggccccaggacctgatccgactctatgacatcatcttacagaatctggtggaattgctccagcttcctggtttagaggaagacaaagccttccagaaagagataggcctcaagactctggtgttcaaagcttacaggtgttttttcattgctcagtcctatgtgctggtgaagaagtggagcgaagcccttgtcctgtatgacagagtcctgaaatatgcaaatgaagtaaattctgatgctggcgccttcaagaacagcctaaaggacctgcctgatgtgcaagagctcatcactcaagtgcggtcagagaagtgctccctgcaggccgcagccatccttgatgcaaacgacgctcatcaaacagagacctcctcctcccaagtcaaggacaataagcctctggttgaacggtttgagacattctgcctggacccttcccttgtcaccaagcaagccaaccttgtgcacttcccaccaggcttccagcccattccctgcaagcctttgttctttgacctggccctcaaccatgtggctttcccaccccttgaggacaagttggaacagaagaccaagagtggcctcactggatacatcaagggcatctttggattcaggagctaaccaggctcttcctcgggggcgggggagattctgactcttaatctgtattgtgagaaaatcccagcaagttccatgatattaaatccaggtctgcattggcccggggcaagagtttaacatcttcggccctgcattcctacatcttgtgtctgtacacgttcttaagcagcgtgtcaggagagcaccctgttgtcttctggtaaatgtgtgcagggtcatcctgtctcctgtacctcctgggaaaggggccgctgctgtctggtgccctgtgagctgtgattgattgcctttggtcagtaatgcgttcaggagtccacaccaggcacagatggggccttgaaacgctttgtcatgcttcttcagtaccatggatttgaaatgaactcatccttgctgtgagcatccaggagcccttgagaagtttatctatgactatgaaactggcaacgtcaccccagaattacggtcagccttattccccttcacctcccagtgaacgctaagaagtttcagacaagcagagagctctatttttagaagaaatatgttacactcagaaatgatgaaaccaaatcttatattaaaaggcaaagatgacgga

SEQ ID NO: 295069 - DNA, 2094 bp, Homo sapiens
ggcgcgctccagcacatggcgccctgctgcagcaagggccgacggcggcggagtccgccgctatcccatcagcccggccaggcaggtccagctctcacccgcccaggtcgtcccgcctcccctatcccgtcttgctctgcggcgcaggggcaagatggctgctgagaagcaggtcccaggcggcggcggcggcggcggcagtggcggcggcggtggcagtggcggcggcggtagcggcggtggacgtggtgccggaggggaagaaaataaagaaaacgaacgcccttcggccggatcgaaggcaaacaaagaatttggggatagcctgagtttggagattcttcagattattaaggaatcccagcagcagcatggtttacggcatggagattttcagaggtacaggggctactgttcccgtagacaaagacgtcttcgaaaaacactcaacttcaagatgggtaacagacacaaattcacagggaagaaagtgactgaagagcttctgaccgataatagatacttgcttctggttctgatggatgctgaaagagcctggagctacgccatgcagctgaaacaggaagccaacactgaaccccgaaaacggtttcacttgttatctcgcctacgcaaagccgtgaagcatgcagaggaattggaacgcttgtgtgagagcaatcgcgtggatgccaagaccaaattagaggctcaggcttacacagcttacctctcaggaatgctacgttttgaacatcaagaatggaaagctgccattgaggcttttaacaaatgcaaaactatctatgagaagctagccagtgctttcacagaggagcaggctgtgctgtataaccaacgtgtggaagagatttcacccaacatccgctattgtgcatataatattggggaccagtcagccatcaatgaactcatgcagatgagattgaggtctgggggcactgagggtctcttggctgaaaaattggaggctttgatcactcagactcgagccaaacaggcagctaccatgagtgaagtggagtggagagggagaacggttccagtgaagattgacaaagtgcgcattttcttattaggactggctgataacgaagcagctattgtccaggctgaaagcgaagaaactaaggagcgcctgtttgaatcaatgctcagcgagtgtcgggacgccatccaggtggttcgggaggagctcaagccagatcagagagacctcctcctcccaagtcaaggacaataagcctctggttgaacggtttgagacattctgcctggacccttcccttgtcaccaagcaagccaaccttgtgcacttcccaccaggcttccagcccattccctgcaagcctttgttctttgacctggccctcaaccatgtggctttcccaccccttgaggacaagttggaacagaagaccaagagtggcctcactggatacatcaagggcatctttggattcaggagctaaccaggctcttcctcgggggcgggggagattctgactcttaatctgtattgtgagaaaatcccagcaagttccatgatattaaatccaggtctgcattggcccggggcaagagtttaacatcttcggccctgcattcctacatcttgtgtctgtacacgttcttaagcagcgtgtcaggagagcaccctgttgtcttctggtaaatgtgtgcagggtcatcctgtctcctgtacctcctgggaaaggggccgctgctgtctggtgccctgtgagctgtgattgattgcctttggtcagtaatgcgttcaggagtccacaccaggcacagatggggccttgaaacgctttgtcatgcttcttcagtaccatggatttgaaatgaactcatccttgctgtgagcatccaggagcccttgagaagtttatctatgactatgaaactggcaacgtcaccccagaattacggtcagccttattccccttcacctcccagtgaacgctaagaagtttcagacaagcagagagctctatttttagaagaaatatgttacactcagaaatgatgaaaccaaatcttatattaaaaggcaaagatgacgga

SEQ ID NO: 295070 - DNA, 1691 bp, Homo sapiens
tagttacttctcgtgtctgagaaccctctgcgcgtcttacagaatctggtggaattgctccagcttcctggtttagaggaagacaaagccttccagaaagagataggcctcaagactctggtgttcaaagcttacaggtgttttttcattgctcagtcctatgtgctggtgaagaagtggagcgaagcccttgtcctgtatgacagagtcctgaaatatgcaaatgaagtaaattctgatgctggcgccttcaagaacagcctaaaggacctgcctgatgtgcaagagctcatcactcaagtgcggtcagagaagtgctccctgcaggccgcagccatccttgatgcaaacgacgctcatcaaacagagacctcctcctcccaagtcaaggacaataagcctctggttgaacggtttgagacattctgcctggacccttcccttgtcaccaagcaagccaaccttgtgcacttcccaccaggcttccagcccattccctgcaagcctttgttctttgacctggccctcaaccatgtggctttcccaccccttgaggacaagttggaacagaagaccaagagtggcctcactggatacatcaagggcatctttggattcaggagctaaccaggctcttcctcgggggcgggggagattctgactcttaatctgtattgtgagaaaatcccagcaagttccatgatattaatccgtctgctgaaaaaaaaaaaaaaaaaaaaaaacaaacgggggcgcaaaataacggggggccattccgctaccctctggaaagcgacctagggggctaaacgaggggcgtaacacgatcggatcacgtacttgacactttggttgaccacaacgtactttttattgctcgtcttgtttctctatgcctcattcgtaccacaccgcacataaagctaacaaacacgacaacataacaacagatcagaaaacaagggagggggaagagcagcggggaaggagagcgaggggagaggaggaggggagaagagaggaggggagagagaagggcaaggaagagagggacagggacgggagcaaggggggacgagacagacggcggggcgggaagaggggcagcacgagagcacgagacggcagcaggggcaagaacaagggagagagcgcgagagaggagggaaagaaagaagaagagcggagagacgaggaagagggagagaggagtcgaagcagagacggggggaggacgcggaagaggaggagacggagaggaagaggagagagagtgagaagaagaagggagagagggaggagagaggggcaggaggcagggcggagggaggtggatgagagaaggaaaaggaaggagacgagagacggactaggaagggagagagaggagaaaagagcgcgacacgaagaggagacgccacgcggaacgcggaacagagcgagaagagagagagaggaaaggcaggaccgcggccgagggagcgaggggaaacgagagacggagagacggagagggagaacgagatgcgaacagcgaacggacgaaaggaacgagacagagcaaagagaggagcacagagacgcaggagcggagagaggggaagccgacagagaggcgagaaagggagagtgaaaaccgaggaacacgataggacgagaggacacgagcaagaaagaacaggacgggagca

SEQ ID NO: 295071 - DNA, 490 bp, Homo sapiens
gagcaccctgcacacatttaccagaagacaacagggtgctctcctgacacgctgcttaagaacgtgtacagacacctgttgtcttctggtaaatgtgtgcagggtcatcctgtctcctgtacctcctgggaaaggggccgctgctgtctggtgccctgtgagctgtgattgattgcctttggtcagtaatgcgttcaggagtccacaccaggcacagatggggccttgaaacgctttgtcatgcttcttcagtaccatggatttgaaatgaactcatccttgctgtgagcatccaggagcccttgagaagtttatctatgactatgaaactggcaacgtcaccccagaattacggtcagccttattccccttcacctcccagtgaacgctaagaagtttcagacaagcagagagctctatttttagaagaaatatgttacactcagaaatgatgaaaccaaatcttatattaaaaggcaaagatgacgga

SEQ ID NO: 295072 - DNA, 2639 bp, Homo sapiens
ggcgcgctccagcacatggcgccctgctgcagcaagggccgacggcggcggagtccgccgctatcccatcagcccggccaggcaggtccagctctcacccgcccaggtcgtcccgcctcccctatcccgtcttgctctgcggcgcaggggcaagatggctgctgagaagcaggtcccaggcggcggcggcggcggcggcagtggcggcggcggtggcagtggcggcggcggtagcggcggtggacgtggtgccggaggggaagaaaataaagaaaacgaacgcccttcggccggatcgaaggcaaacaaagaatttggggatagcctgagtttggagattcttcagattattaaggaatcccagcagcagcatggtttacggcatggagattttcagaggtacaggggctactgttcccgtagacaaagacgtcttcgaaaaacactcaacttcaagatgggtaacagacacaaattcacagggaagaaagtgactgaagagcttctgaccgataatagatacttgcttctggttctgatggatgctgaaagagcctggagctacgccatgcagctgaaacaggaagccaacactgaaccccgaaaacggtttcacttgttatctcgcctacgcaaagccgtgaagcatgcagaggaattggaacgcttgtgtgagagcaatcgcgtggatgccaagaccaaattagaggctcaggcttacacagcttacctctcaggaatgctacgttttgaacatcaagaatggaaagctgccattgaggcttttaacaaatgcaaaactatctatgagaagctagccagtgctttcacagaggagcaggctgtgctgtataaccaacgtgtggaagagatttcacccaacatccgctattgtgcatataatattggggaccagtcagccatcaatgaactcatgcagatgagattgaggtctgggggcactgagggtctcttggctgaaaaattggaggctttgatcactcagactcgagccaaacaggcagctaccatgagtgaagtggagtggagagggagaacggttccagtgaagattgacaaagtgcgcattttcttattaggactggctgataacgaagcagctattgtccaggctgaaagcgaagaaactaaggagcgcctgtttgaatcaatgctcagcgagtgtcgggacgccatccaggtggttcgggaggagctcaagccagatcagaaacagagagattatatccttgaaggagagccagggaaggtgtctaatcttcaatacttgcatagctacctgacttacatcaagctatcaacggcaatcaagcgtaatgagaacatggccaaaggtctgcagagggctctgctgcagcagcagccagaggatgacagcaagcgctcaccccggccccaggacctgatccgactctatgacatcatcttacagaatctggtggaattgctccagcttcctggtttagaggaagacaaagccttccagaaagagataggcctcaagactctggtgttcaaagcttacaggtgttttttcattgctcagtcctatgtgctggtgaagaagtggagcgaagcccttgtcctgtatgacagagtcctgaaatatgcaaatgaagtaaattctgatgctggcgccttcaagaacagcctaaaggacctgcctgatgtgcaagagctcatcactcaagtgcggtcagagaagtgctccctgcaggccgcagccatccttgatgcaaacgacgctcatcaaacagagacctcctcctcccaagtcaaggacaataagcctctggttgaacggtttgagacattctgcctggacccttcccttgtcaccaagcaagccaaccttgtgcacttcccaccaggcttccagcccattccctgcaagcctttgttctttgacctggccctcaaccatgtggctttcccaccccttgaggacaagttggaacagaagaccaagagtggcctcactggatacatcaagggcatctttggattcaggagctaaccaggctcttcctcgggggcgggggagattctgactcttaatctgtattgtgagaaaatcccagcaagttccatgatattaaatccaggtctgcattggcccggggcaagagtttaacatcttcggccctgcattcctacatcttgtgtctgtacacgttcttaagcagcgtgtcaggagagcaccctgttgtcttctggtaaatgtgtgcagggtcatcctgtctcctgtacctcctgggaaaggggccgctgctgtctggtgccctgtgagctgtgattgattgcctttggtcagtaatgcgttcaggagtccacaccaggcacagatggggccttgaaacgctttgtcatgcttcttcagtaccatggatttgaaatgaactcatccttgctgtgagcatccaggagcccttgagaagtttatctatgactatgaaactggcaacgtcaccccagaattacggtcagccttattccccttcacctcccagtgaacgctaagaagtttcagacaagcagagagctctatttttagaagaaatatgttacactcagaaatgatgaaaccaaatcttatattaaaaggcaaagatgacgga

SEQ ID NO: 295073 - DNA, 2665 bp, Homo sapiens
ggcgcgctccagcacatggcgccctgctgcagcaagggccgacggcggcggagtccgccgctatcccatcagcccggccaggcaggtccagctctcacccgcccaggtcgtcccgcctcccctatcccgtcttgctctgcggcgcaggggcaagatggctgctgagaagcaggtcccaggcggcggcggcggcggcggcagtggcggcggcggtggcagtggcggcggcggtagcggcggtggacgtggtgccggaggggaagaaaataaagaaaacgaacgcccttcggccggatcgaaggcaaacaaagaatttggggatagcctgagtttggagattcttcagattattaaggaatcccagcagcagcatggtttacggcatggagattttcagaggtacaggggctactgttcccgtagacaaagacgtcttcgaaaaacactcaacttcaagatgggtaacagacacaaattcacagggaagaaagtgactgaagagcttctgaccgataatagatacttgcttctggttctgatggatgctgaaagagcctggagctacgccatgcagctgaaacaggaagccaacactgaaccccgaaaacggtttcacttgttatctcgcctacgcaaagccgtgaagcatgcagaggaattggaacgcttgtgtgagagcaatcgcgtggatgccaagaccaaattagaggctcaggcttacacagcttacctctcaggaatgctacgttttgaacatcaagaatggaaagctgccattgaggcttttaacaaatgcaaaactatctatgagaagctagccagtgctttcacagaggagcaggctgtgctgtataaccaacgtgtggaagagatttcacccaacatccgctattgtgcatataatattggggaccagtcagccatcaatgaactcatgcagatgagattgaggtctgggggcactgagggtctcttggctgaaaaattggaggctttgatcactcagactcgagccaaacaggcagctaccatgagtgaagtggagtggagagggagaacggttccagtgaagattgacaaagtgcgcattttcttattaggactggctgataacgaagcagctattgtccaggctgaaagcgaagaaactaaggagcgcctgtttgaatcaatgctcagcgagtgtcgggacgccatccaggtggttcgggaggagctcaagccagatcagaaacagagagattatatccttgaaggagagccagggaaggtgtctaatcttcaatacttgcatagctacctgacttacatcaagctatcaacggcaatcaagcgtaatgagaacatggccaaaggtctgcagagggctctgctgcagcagcagccagaggatgacagcaagcgctcaccccggccccaggacctgatccgactctatgacatcatcttacagaatctggtggaattgctccagcttcctggtttagaggaagacaaagccttccagaaagagataggcctcaagactctggtgttcaaagcttacaggtgttttttcattgctcagtcctatgtgctggtgaagaagtggagcgaagcccttgtcctgtatgacagagtcctgaaatatgcaaatgaagtaaattctgatgctggcgccttcaagaacagcctaaaggacctgcctgatgtgcaagagctcatcactcaagtgcggtcagagaagtgctccctgcaggccgcagccatccttgatgcaaacgacgctcatcaaacagagacctcctcctcccaagtcaaggacaataagcctctggttgaacggtttgagacattctgcctggacccttcccttgtcaccaagcaagccaaccttgtgcacttcccaccaggcttccagcccattccctgcaagcctttgttctttgacctggccctcaaccatgtggctttcccaccccttgaggacaagttggaacagaagaccaagagtggcctcactggatacatcaagggcatctttggattcaggagctaaccaggctcttcctcgggggcgggggagattctgactcttaatctgtattgtgagaaaatcccagcaagttccatgatattaaatccaggtctgcattggcccggggcaagagtttaacatcttcggccctgcattcctacatcttgtgtctgtacacgttcttaagcagcgtgtcaggagagcaccctgttgtcttctggtaaatgtgtgcagggtcatcctgtctcctgtacctcctgggaaaggggccgctgctgtctggtgccctgtgagctgtgattgattgcctttggtcagtaatgcgttcaggagtccacaccaggcacagatggggccttgaaacgctttgtcatgcttcttcagtaccatggatttgaaatgaactcatccttgctgtgagcatccaggagcccttgagaagtttatctatgactatgaaactggcaacgtcaccccagaattacggtcagccttattccccttcacctcccagtgaacgctaagaagtttcagacaagcagagagctctatttttagaagaaatatgttacactcagaaatgatgaaaccaaatcttatattaaaaggcaaagatgacggaaaaaaaaaacaaaaaaagcaaaaata

SEQ ID NO: 295074 - DNA, 2608 bp, Homo sapiens
  misc_feature (2406)..(2406): n is a, c, g, or t
  misc_feature (2462)..(2462): n is a, c, g, or t
  misc_feature (2468)..(2468): n is a, c, g, or t
  misc_feature (2474)..(2474): n is a, c, g, or t
  misc_feature (2496)..(2496): n is a, c, g, or t
  misc_feature (2499)..(2499): n is a, c, g, or t
  misc_feature (2502)..(2502): n is a, c, g, or t
  misc_feature (2590)..(2590): n is a, c, g, or t
ggcgcgctccagcacatggcgccctgctgcagcaagggccgacggcggcggagtccgccgctatcccatcagcccggccaggcaggtccagctctcacccgcccaggtcgtcccgcctcccctatcccgtcttgctctgcggcgcaggggcaagatggctgctgagaagcaggtcccaggcggcggcggcggcggcggcagtggcggcggcggtggcagtggcggcggcggtagcggcggtggacgtggtgccggaggggaagaaaataaagaaaacgaacgcccttcggccggatcgaaggcaaacaaagaatttggggatagcctgagtttggagattcttcagattattaaggaatcccagcagcagcatggtttacggcatggagattttcagaggtacaggggctactgttcccgtagacaaagacgtcttcgaaaaacactcaacttcaagatgggtaacagacacaaattcacagggaagaaagtgactgaagagcttctgaccgataatagatacttgcttctggttctgatggatgctgaaagagcctggagctacgccatgcagctgaaacaggaagccaacactgaaccccgaaaacggtttcacttgttatctcgcctacgcaaagccgtgaagcatgcagaggaattggaacgcttgtgtgagagcaatcgcgtggatgccaagaccaaattagaggctcaggcttacacagcttacctctcaggaatgctacgttttgaacatcaagaatggaaagctgccattgaggcttttaacaaatgcaaaactatctatgagaagctagccagtgctttcacagaggagcaggctgtgctgtataaccaacgtgtggaagagatttcacccaacatccgctattgtgcatataatattggggaccagtcagccatcaatgaactcatgcagatgagattgaggtctgggggcactgagggtctcttggctgaaaaattggaggctttgatcactcagactcgagccaaacaggcagctaccatgagtgaagtggagtggagagggagaacggttccagtgaagattgacaaagtgcgcattttcttattaggactggctgataacgaagcagctattgtccaggctgaaagcgaagaaactaaggagcgcctgtttgaatcaatgctcagcgagtgtcgggacgccatccaggtggttcgggaggagctcaagccagatcagaaacagagagattatatccttgaaggagagccagggaaggtgtctaatcttcaatacttgcatagctacctgacttacatcaagctatcaacggcaatcaagcgtaatgagaacatggccaaaggtctgcagagggctctgctgcagcagcagccagaggatgacagcaagcgctcaccccggccccaggacctgatccgactctatgacatcatcttacagaatctggtggaattgctccagcttcctggtttagaggaagacaaagccttccagaaagagataggcctcaagactctggtgttcaaagcttacaggtgttttttcattgctcagtcctatgtgctggtgaagaagtggagcgaagcccttgtcctgtatgacagagtcctgaaatatgcaaatgaagtaaattctgatgctggcgccttcaagaacagcctaaaggacctgcctgatgtgcaagagctcatcactcaagtgcggtcagagaagtgctccctgcaggccgcagccatccttgatgcaaacgacgctcatcaaacagagacctcctcctcccaagtcaaggacaataagcctctggttgaacggtttgagacattctgcctggacccttcccttgtcaccaagcaagccaaccttgtgcacttcccaccaggcttccagcccattccctgcaagcctttgttctttgacctggccctcaaccatgtggctttcccaccccttgaggacaagttggaacagaagaccaagagtggcctcactggatacatcaagggcatctttggattcaggagctaaccaggctcttcctcgggggcgggggagattctgactcttaatctgtattgtgagaaaatcccagcaagttccatgatattaaatccaggtctgcattggcccggggcaagagtttaacatcttcggccctgcattcctacatcttgtgtctgtacacgttcttaagcagcgtgtcaggagagcaccctgttgtcttctggtaaatgtgtgcagggtcatcctgtctcctgtacctcctgggaaaggggccgctgctgtctggtgccctgtgagctgtgattgattgcctttggtcagtaatgcgttcaggagtccacaccaggcacagatggggccttgaaacgctttgtcatgcttcttcagctacncagtgggatttttgaaaaatgcaaactcaatcctttgcctgctgagccattccagngagccnccttgnagcaagctttattctaatgaantantgnaaactgcgccaacgctcacccccagcaatttacgcgctcagccctttaattccccctttcaccctccccagctgcaacgcctaagggngctttcagcacaagccag

SEQ ID NO: 295075 - DNA, 2754 bp, Homo sapiens
tttttttataatgaaacattttatttagttttaacataatgaaagaatacactaaatattgaggtggcaaagaagccctgggcaggcagcaagagcgacttggtgaagccaagaggaggtcctgtcaatgacatctgacccgagctggttgctcaaagttgtttattaagcaaactccacgcctccagccttgtggcttcattttccaactcagttaaatggcgatgagggtcctccccagccataatcggagtatcgatcagcttctgaatcctcagatgagcaaaccttgctttcagaattgcaccgtccatgaagatgctttaggcctcgtgccgaattcggcacgaggcggtggacgtggtgccggaggggaagaaaataaagaaaacgaacgcccttcggccggatcgaaggcaaacaaagaatttggggatagcctgagtttggagattcttcagattattaaggaatcccagcagcagcatggtttacggcatggagattttcagaggtacaggggctactgttcccgtagacaaagacgtcttcgaaaaacactcaacttcaagatgggtaacagacacaaattcacagggaagaaagtgactgaagagcttctgaccgataatagatacttgcttctggttctgatggatgctgaaagagcctggagctacgccatgcagctgaaacaggaagccaacactgaaccccgaaaacggtttcacttgttatctcgcctacgcaaagccgtgaagcatgcagaggaattggaacgcttgtgtgagagcaatcgcgtggatgccaagaccaaattagaggctcaggcttacacagcttacctctcaggaatgctacgttttgaacatcaagaatggaaagctgccattgaggcttttaacaaatgcaaaactatctatgagaagctagccagtgctttcacagaggagcaggctgtgctgtataaccaacgtgtggaagagatttcacccaacatccgctattgtgcatataatattggggaccagtcagccatcaatgaactcatgcagatgagattgaggtctgggggcactgagggtctcttggctgaaaaattggaggctttgatcactcagactcgagccaaacaggcagctaccatgagtgaagtggagtggagagggagaacggttccagtgaagattgacaaagtgcgcattttcttattaggactggctgataacgaagcagctattgtccaggctgaaagcgaagaaactaaggagcgcctgtttgaatcaatgctcagcgagtgtcgggacgccatccaggtggttcgggaggagctcaagccagatcagaaacagagagattatatccttgaaggagagccagggaaggtgtctaatcttcaatacttgcatagctacctgacttacatcaagctatcaacggcaatcaagcgtaatgagaacatggccaaaggtctgcagagggctctgctgcagcagcagccagaggatgacagcaagcgctcaccccggccccaggacctgatccgactctatgacatcatcttacagaatctggtggaattgctccagcttcctggtttagaggaagacaaagccttccagaaagagataggcctcaagactctggtgttcaaagcttacaggtgttttttcattgctcagtcctatgtgctggtgaagaagtggagcgaagcccttgtcctgtatgacagagtcctgaaatatgcaaatgaagtaaattctgatgctggcgccttcaagaacagcctaaaggacctgcctgatgtgcaagagctcatcactcaagtgcggtcagagaagtgctccctgcaggccgcagccatccttgatgcaaacgacgctcatcaaacagagacctcctcctcccaagtcaaggacaataagcctctggttgaacggtttgagacattctgcctggacccttcccttgtcaccaagcaagccaaccttgtgcacttcccaccaggcttccagcccattccctgcaagcctttgttctttgacctggccctcaaccatgtggctttcccaccccttgaggacaagttggaacagaagaccaagagtggcctcactggatacatcaagggcatctttggattcaggagctaaccaggctcttcctcgggggcgggggagattctgactcttaatctgtattgtgagaaaatcccagcaagttccatgatattaaatccaggtctgcattggcccggggcaagagtttaacatcttcggccctgcattcctacatcttgtgtctgtacacgttcttaagcagcgtgtcaggagagcaccctgttgtcttctggtaaatgtgtgcagggtcatcctgtctcctgtacctcctgggaaaggggccgctgctgtctggtgccctgtgagctgtgattgattgcctttggtcagtaatgcgttcaggagtccacaccaggcacagatggggccttgaaacgctttgtcatgcttcttcagtaccatggatttgaaatgaactcatccttgctgtgagcatccaggagcccttgagaagtttatctatgactatgaaactggcaacgtcaccccagaattacggtcagccttattccccttcacctcccagtgaacgctaagaagtttcagacaagcagagagctctatttttagaagaaatatgttacactcagaaatgatgaaaccaaatcttatattaaaaggcaaagatgacgga

SEQ ID NO: 295076 - DNA, 2524 bp, Homo sapiens
ggcagcttgtgactcacccagctgggagctctccagagacacccctccctctgccagggccagcttggtcactgcaggggggtggcggggtgactcttgctcgtgccgaattcggcacgaggcggtggacgtggtgccggaggggaagaaaataaagaaaacgaacgcccttcggccggatcgaaggcaaacaaagaatttggggatagcctgagtttggagattcttcagattattaaggaatcccagcagcagcatggtttacggcatggagattttcagaggtacaggggctactgttcccgtagacaaagacgtcttcgaaaaacactcaacttcaagatgggtaacagacacaaattcacagggaagaaagtgactgaagagcttctgaccgataatagatacttgcttctggttctgatggatgctgaaagagcctggagctacgccatgcagctgaaacaggaagccaacactgaaccccgaaaacggtttcacttgttatctcgcctacgcaaagccgtgaagcatgcagaggaattggaacgcttgtgtgagagcaatcgcgtggatgccaagaccaaattagaggctcaggcttacacagcttacctctcaggaatgctacgttttgaacatcaagaatggaaagctgccattgaggcttttaacaaatgcaaaactatctatgagaagctagccagtgctttcacagaggagcaggctgtgctgtataaccaacgtgtggaagagatttcacccaacatccgctattgtgcatataatattggggaccagtcagccatcaatgaactcatgcagatgagattgaggtctgggggcactgagggtctcttggctgaaaaattggaggctttgatcactcagactcgagccaaacaggcagctaccatgagtgaagtggagtggagagggagaacggttccagtgaagattgacaaagtgcgcattttcttattaggactggctgataacgaagcagctattgtccaggctgaaagcgaagaaactaaggagcgcctgtttgaatcaatgctcagcgagtgtcgggacgccatccaggtggttcgggaggagctcaagccagatcagaaacagagagattatatccttgaaggagagccagggaaggtgtctaatcttcaatacttgcatagctacctgacttacatcaagctatcaacggcaatcaagcgtaatgagaacatggccaaaggtctgcagagggctctgctgcagcagcagccagaggatgacagcaagcgctcaccccggccccaggacctgatccgactctatgacatcatcttacagaatctggtggaattgctccagcttcctggtttagaggaagacaaagccttccagaaagagataggcctcaagactctggtgttcaaagcttacaggtgttttttcattgctcagtcctatgtgctggtgaagaagtggagcgaagcccttgtcctgtatgacagagtcctgaaatatgcaaatgaagtaaattctgatgctggcgccttcaagaacagcctaaaggacctgcctgatgtgcaagagctcatcactcaagtgcggtcagagaagtgctccctgcaggccgcagccatccttgatgcaaacgacgctcatcaaacagagacctcctcctcccaagtcaaggacaataagcctctggttgaacggtttgagacattctgcctggacccttcccttgtcaccaagcaagccaaccttgtgcacttcccaccaggcttccagcccattccctgcaagcctttgttctttgacctggccctcaaccatgtggctttcccaccccttgaggacaagttggaacagaagaccaagagtggcctcactggatacatcaagggcatctttggattcaggagctaaccaggctcttcctcgggggcgggggagattctgactcttaatctgtattgtgagaaaatcccagcaagttccatgatattaaatccaggtctgcattggcccggggcaagagtttaacatcttcggccctgcattcctacatcttgtgtctgtacacgttcttaagcagcgtgtcaggagagcaccctgttgtcttctggtaaatgtgtgcagggtcatcctgtctcctgtacctcctgggaaaggggccgctgctgtctggtgccctgtgagctgtgattgattgcctttggtcagtaatgcgttcaggagtccacaccaggcacagatggggccttgaaacgctttgtcatgcttcttcagtaccatggatttgaaatgaactcatccttgctgtgagcatccaggagcccttgagaagtttatctatgactatgaaactggcaacgtcaccccagaattacggtcagccttattccccttcacctcccagtgaacgctaagaagtttcagacaagcagagagctctatttttagaagaaatatgttacactcagaaatgatgaaaccaaatcttatattaaaaggcaaagatgacgga

SEQ ID NO: 295077 - DNA, 2098 bp, Homo sapiens
ggcgcgctccagcacatggcgccctgctgcagcaagggccgacggcggcggagtccgccgctatcccatcagcccggccaggcaggtccagctctcacccgcccaggtcgtcccgcctcccctatcccgtcttgctctgcggcgcaggggcaagatggctgctgagaagcaggtcccaggcggcggcggcggcggcggcagtggcggcggcggtggcagtggcggcggcggtagcggcggtggacgtggtgccggaggggaagaaaataaagaaaacgaacgcccttcggccggatcgaaggcaaacaaagaatttggggatagcctgagtttggagattcttcagattattaaggaatcccagcagcagcatggtttacggcatggagattttcagaggtacaggggctactgttcccgtagacaaagacgtcttcgaaaaacactcaacttcaagatgggtaacagacacaaattcacagggaagaaagtgactgaagagcttctgaccgataatagatacttgcttctggttctgatggatgctgaaagagcctggagctacgccatgcagctgaaacaggaagccaacactgaaccccgaaaacggtttcacttgttatctcgcctacgcaaagccgtgaagcatgcagaggaattggaacgcttgtgtgagagcaatcgcgtggatgccaagaccaaattagaggctcaggcttacacagcttacctctcaggaatgctacgttttgaacatcaagaatggaaagctgccattgaggcttttaacaaatgcaaaactatctatgagaagctagccagtgctttcacagaggagcaggctgtgctgtataaccaacgtgtggaagagatttcacccaacatccgctattgtgcatataatattggggaccagtcagccatcaatgaactcatgcagatgagattgaggtctgggggcactgagggtctcttggctgaaaaattggaggctttgatcactcagactcgagccaaacaggcagctaccatgagtgaagtggagtggagagggagaacggttccagtgaagattgacaaagtgcgcattttcttattaggactggctgataacgaagcagctattgtccaggctgaaagcgaagaaactaaggagcgcctgtttgaatcaatgctcagcgagtgtcgggacgccatccaggtggttcgggaggagctcaagccagatcagaaacagagagattatatccttgaaggagagccagggaaggtgtctaatcttcaatacttgcatagctacctgacttacatcaagctatcaacggcaatcaagcgtaatgagaacatggccaaaggtctgcagagggctctgctgcagcagcagccagaggatgacagcaagcgctcaccccggccccaggacctgatccgactctatgacatcatcttacagaatctggtggaattgctccagcttcctggtttagaggaagacaaagccttccagaaagagataggcctcaagactctggtgttcaaagcttacaggtgttttttcattgctcagtcctatgtgctggtgaagaagtggagcgaagcccttgtcctgtatgacagagtcctgaaatatgcaaatgaagtaaattctgatgctggcgccttcaagaacagcctaaaggacctgcctgatgtgcaagagctcatcactcaagtgcggtcagagaagtgctccctgcaggccgcagccatccttgatgcaaacgacgctcatcaaacagagacctcctcctcccaagtcaaggacaataagcctctggttgaacggtttgagacattctgcctggacccttcccttgtcaccaagcaagccaaccttgtgcacttcccaccaggcttccagcccattccctgcaagcctttgttctttgacctggccctcaaccatgtggctttcccaccccttgaggacaagttggaacagaagaccaagagtggcctcactggatacatcaagggcatctttggattcaggagctaaccaggctcttcctcgggccggacgttttggcataccttgggatcctctagaatcagctag

SEQ ID NO: 295078 - DNA, 2287 bp, Homo sapiens
ggcatatggttctacccggcccacttggcagcacttttatccacgaggtacaggggctactgttcccgtagacaaagacgtcttcgaaaaacactcaacttcaagatgggtaacagacacaaattcacagggaagaaagtgactgaagagcttctgaccgataatagatacttgcttctggttctgatggatgctgaaagagcctggagctacgccatgcagctgaaacaggaagccaacactgaaccccgaaaacggtttcacttgttatctcgcctacgcaaagccgtgaagcatgcagaggaattggaacgcttgtgtgagagcaatcgcgtggatgccaagaccaaattagaggctcaggcttacacagcttacctctcaggaatgctacgttttgaacatcaagaatggaaagctgccattgaggcttttaacaaatgcaaaactatctatgagaagctagccagtgctttcacagaggagcaggctgtgctgtataaccaacgtgtggaagagatttcacccaacatccgctattgtgcatataatattggggaccagtcagccatcaatgaactcatgcagatgagattgaggtctgggggcactgagggtctcttggctgaaaaattggaggctttgatcactcagactcgagccaaacaggcagctaccatgagtgaagtggagtggagagggagaacggttccagtgaagattgacaaagtgcgcattttcttattaggactggctgataacgaagcagctattgtccaggctgaaagcgaagaaactaaggagcgcctgtttgaatcaatgctcagcgagtgtcgggacgccatccaggtggttcgggaggagctcaagccagatcagaaacagagagattatatccttgaaggagagccagggaaggtgtctaatcttcaatacttgcatagctacctgacttacatcaagctatcaacggcaatcaagcgtaatgagaacatggccaaaggtctgcagagggctctgctgcagcagcagccagaggatgacagcaagcgctcaccccggccccaggacctgatccgactctatgacatcatcttacagaatctggtggaattgctccagcttcctggtttagaggaagacaaagccttccagaaagagataggcctcaagactctggtgttcaaagcttacaggtgttttttcattgctcagtcctatgtgctggtgaagaagtggagcgaagcccttgtcctgtatgacagagtcctgaaatatgcaaatgaagtaaattctgatgctggcgccttcaagaacagcctaaaggacctgcctgatgtgcaagagctcatcactcaagtgcggtcagagaagtgctccctgcaggccgcagccatccttgatgcaaacgacgctcatcaaacagagacctcctcctcccaagtcaaggacaataagcctctggttgaacggtttgagacattctgcctggacccttcccttgtcaccaagcaagccaaccttgtgcacttcccaccaggcttccagcccattccctgcaagcctttgttctttgacctggccctcaaccatgtggctttcccaccccttgaggacaagttggaacagaagaccaagagtggcctcactggatacatcaagggcatctttggattcaggagctaaccaggctcttcctcgggggcgggggagattctgactcttaatctgtattgtgagaaaatcccagcaagttccatgatattaaatccaggtctgcattggcccggggcaagagtttaacatcttcggccctgcattcctacatcttgtgtctgtacacgttcttaagcagcgtgtcaggagagcaccctgttgtcttctggtaaatgtgtgcagggtcatcctgtctcctgtacctcctgggaaaggggccgctgctgtctggtgccctgtgagctgtgattgattgcctttggtcagtaatgcgttcaggagtccacaccaggcacagatggggccttgaaacgctttgtcatgcttcttcagtaccatggatttgaaatgaactcatccttgctgtgagcatccaggagcccttgagaagtttatctatgactatgaaactggcaacgtcaccccagaattacggtcagccttattccccttcacctcccagtgaacgctaagaagtttcagacaagcagagagctctatttttagaagaaatatgttacactcagaaatgatgaaaccaaatcttatattaaaaggcaaagatgacgga

SEQ ID NO: 295079 - DNA, 2125 bp, Homo sapiens
ggcgcgctccagcacatggcgccctgctgcagcaagggccgacggcggcggagtccgccgctatcccatcagcccggccaggcaggtccagctctcacccgcccaggtcgtcccgcctcccctatcccgtcttgctctgcggcgcaggggcaagatggctgctgagaagcaggtcccaggcggcggcggcggcggcggcagtggcggcggcggtggcagtggcggcggcggtagcggcggtggacgtggtgccggaggggaagaaaataaagaaaacgaacgcccttcggccggatcgaaggcaaacaaagaatttggggatagcctgagtttggagattcttcagattattaaggaatcccagcagcagcatggtttacggcatggagattttcagaggtacaggggctactgttcccgtagacaaagacgtcttcgaaaaacactcaacttcaagatgggtaacagacacaaattcacagggaagaaagtgactgaagagcttctgaccgataatagatacttgcttctggttctgatggatgctgaaagagcctggagctacgccatgcagctgaaacaggaagccaacactgaaccccgaaaacggtttcacttgttatctcgcctacgcaaagccgtgaagcatgcagaggaattggaacgcttgtgtgagagcaatcgcgtggatgccaagaccaaattagaggctcaggcttacacagcttacctctcaggaatgctacgttttgaacatcaagaatggaaagctgccattgaggcttttaacaaatgcaaaactatctatgagaagctagccagtgctttcacagaggagcaggctgtgctgtataaccaacgtgtggaagagatttcacccaacatccgctattgtgcatataatattggggaccagtcagccatcaatgaactcatgcagatgagattgaggtctgggggcactgagggtctcttggctgaaaaattggaggctttgatcactcagactcgagccaaacaggcagctaccatgagtgaagtggagtggagagggagaacggttccagtgaagattgacaaagtgcgcattttcttattaggactggctgataacgaagcagctattgtccaggctgaaagcgaagaaactaaggagcgcctgtttgaatcaatgctcagcgagtgtcgggacgccatccaggtggttcgggaggagctcaagccagatcagaaacagagagattatatccttgaaggagagccagggaaggtgtctaatcttcaatacttgcatagctacctgacttacatcaagctatcaacggcaatcaagcgtaatgagaacatggccaaaggtctgcagagggctctgctgcagcagcagccagaggatgacagcaagcgctcaccccggccccaggacctgatccgactctatgacatcatcttacagaatctggtggaattgctccagcttcctggtttagaggaagacaaagccttccagaaagagataggcctcaagactctggtgttcaaagcttacaggtgttttttcattgctcagtcctatgtgctggtgaagaagtggagcgaagcccttgtcctgtatgacagagtcctgaaatatgcaaatgaagtaaattctgatgctggcgccttcaagaacagcctaaaggacctgcctgatgtgcaagagctcatcactcaagtgcggtcagagaagtgctccctgcaggccgcagccatccttgatgcaaacgacgctcatcaaacagagacctcctcctcccaagtcaaggacaataagcctttggtcagtaatgcgttcaggagtccacaccaggcacagatggggccttgaaacgctttgtcatgcttcttcagtaccatggatttgaaatgaactcatccttgctgtgagcatccaggagcccttgagaagtttatctatgactatgaaactggcaacgtcaccccagaattacggtcagccttattccccttcacctcccagtgaacgctaagaagtttcagacaagcagagagctctatttttagaagaaatatgttacactcagaaatgatgaaaccaaatcttatattaaaaggcaaagatgacgga

SEQ ID NO: 295080 - DNA, 1891 bp, Homo sapiens
ggcgcgctccagcacatggcgccctgctgcagcaagggccgacggcggcggagtccgccgctatcccatcagcccggccaggcaggtccagctctcacccgcccaggtcgtcccgcctcccctatcccgtcttgctctgcggcgcaggggcaagatggctgctgagaagcaggtcccaggcggcggcggcggcggcggcagtggcggcggcggtggcagtggcggcggcggtagcggcggtggacgtggtgccggaggggaagaaaataaagaaaacgaacgcccttcggccggatcgaaggcaaacaaagaatttggggatagcctgagtttggagattcttcagattattaaggaatcccagcagcagcatggtttacggcatggagattttcagaggtacaggggctactgttcccgtagacaaagacgtcttcgaaaaacactcaacttcaagatgggtaacagacacaaattcacagggaagaaagtgactgaagagcttctgaccgataatagatacttgcttctggttctgatggatgctgaaagagcctggagctacgccatgcagctgaaacaggaagccaacactgaaccccgaaaacggtttcacttgttatctcgcctacgcaaagccgtgaagcatgcagaggaattggaacgcttgtgtgagagcaatcgcgtggatgccaagaccaaattagaggctcaggcttacacagcttacctctcaggaatgctacgttttgaacatcaagaatggaaagctgccattgaggcttttaacaaatgcaaaactatctatgagaagctagccagtgctttcacagaggagcaggctgtgctgtataaccaacgtgtggaagagatttcacccaacatccgctattgtgcatataatattggggaccagtcagccatcaatgaactcatgcagatgagattgaggtctgggggcactgagggtctcttggctgaaaaattggaggctttgatcactcagactcgagccaaacaggcagctaccatgagtgaagtggagtggagagggagaacggttccagtgaagattgacaaagtgcgcattttcttattaggactggctgataacgaagcagctattgtccaggctgaaagcgaagaaactaaggagcgcctgtttgaatcaatgctcagcgagtgtcgggacgccatccaggtggttcgggaggagctcaagccagatcagaaacagagagattatatccttgaaggagagccagggaaggtgtctaatcttcaatacttgcatagctacctgacttacatcaagctatcaacggcaatcaagcgtaatgagaacatggccaaaggtctgcagagggctctgctgcagcagcagccagaggatgacagcaagcgctcaccccggccccaggacctgatccgactctatgacatcatcttacagaatctggtggaattgctccagcttcctggtttagaggaagacaaagccttccagaaagagataggcctcaagactctggtgttcaaagcttacaggtgttttttcattgctcagtcctatgtgctggtgaagaagtggagcgaagcccttgtcctgtatgacagaatggggccttgaaacgctttgtcatgcttcttcagtaccatggatttgaaatgaactcatccttgctgtgagcatccaggagcccttgagaagtttatctatgactatgaaactggcaacgtcaccccagaattacggtcagccttattccccttcacctcccagtgaacgctaagaagtttcagacaagcagagagctctatttttagaagaaatatgttacactcagaaatgatgaaaccaaatcttatattaaaaggcaaagatgacgga

SEQ ID NO: 295081 - DNA, 2085 bp, Homo sapiens
catcttcccccaccagaggggtgcatttgttacaattgatggccctttatagacacaccatcatctcccaaagtccatagtttacatcagggttcacgcttgatgttgtacattctatgggtttggacaaatgtttcatgatgtgtatttaccattatataccatatggagtattttcattgccccagtcaatttcattctttataaaagacttgtcttcagagaacagattgtgctgcagattcattgaagtagcatgtggagggggaagagctctttaagtctgagttgaatctagtgattctcaagaaaacagaccagacccttgaagattttcctgtctttctctcttaggggaccagtcagccatcaatgaactcatgcagatgagattgaggtctgggggcactgagggtctcttggctgaaaaattggaggctttgatcactcagactcgagccaaacaggcagctaccatgagtgaagtggagtggagagggagaacggttccagtgaagattgacaaagtgcgcattttcttattaggactggctgataacgaagcagctattgtccaggctgaaagcgaagaaactaaggagcgcctgtttgaatcaatgctcagcgagtgtcgggacgccatccaggtggttcgggaggagctcaagccagatcagaaacagagagattatatccttgaaggagagccagggaaggtgtctaatcttcaatacttgcatagctacctgacttacatcaagctatcaacggcaatcaagcgtaatgagaacatggccaaaggtctgcagagggctctgctgcagcagcagccagaggatgacagcaagcgctcaccccggccccaggacctgatccgactctatgacatcatcttacagaatctggtggaattgctccagcttcctggtttagaggaagacaaagccttccagaaagagataggcctcaagactctggtgttcaaagcttacaggtgttttttcattgctcagtcctatgtgctggtgaagaagtggagcgaagcccttgtcctgtatgacagagtcctgaaatatgcaaatgaagtaaattctgatgctggcgccttcaagaacagcctaaaggacctgcctgatgtgcaagagctcatcactcaagtgcggtcagagaagtgctccctgcaggccgcagccatccttgatgcaaacgacgctcatcaaacagagacctcctcctcccaagtcaaggacaataagcctctggttgaacggtttgagacattctgcctggacccttcccttgtcaccaagcaagccaaccttgtgcacttcccaccaggcttccagcccattccctgcaagcctttgttctttgacctggccctcaaccatgtggctttcccaccccttgaggacaagttggaacagaagaccaagagtggcctcactggatacatcaagggcatctttggattcaggagctaaccaggctcttcctcgggggcgggggagattctgactcttaatctgtattgtgagaaaatcccagcaagttccatgatattaaatccaggtctgcattggcccggggcaagagtttaacatcttcggccctgcattcctacatcttgtgtctgtacacgttcttaagcagcgtgtcaggagagcaccctgttgtcttctggtaaatgtgtgcagggtcatcctgtctcctgtacctcctgggaaaggggccgctgctgtctggtgccctgtgagctgtgattgattgcctttggtcagtaatgcgttcaggagtccacaccaggcacagatggggccttgaaacgctttgtcatgcttcttcagtaccatggatttgaaatgaactcatccttgctgtgagcatccaggagcccttgagaagtttatctatgactatgaaactggcaacgtcaccccagaattacggtcagccttattccccttcacctcccagtgaacgctaagaagtttcagacaagcagagagctctatttttagaagaaatatgttacactcagaaatgatgaaaccaaatcttatattaaaaggcaaagatgacgga

SEQ ID NO: 295082 - DNA, 1926 bp, Homo sapiens
  misc_feature (56)..(56): n is a, c, g, or t
  misc_feature (97)..(97): n is a, c, g, or t
  misc_feature (103)..(103): n is a, c, g, or t
  misc_feature (107)..(107): n is a, c, g, or t
  misc_feature (175)..(175): n is a, c, g, or t
tctaacacatctcatctccttccaacatctcatccgcgccttcaacactcaccgcncttccaacatctcatcgctccttccaacatcgcatcctccntccaanatcncatcccgccttccaacatctcatgtcccttccaacatctcatctctccttccaacatctcatcccctnccttccaacatctcatccccctcccaacatctcatgcctccttccatggccccttccaacatctcatgcctcctcccaacatctcatggccgaaaaattggaggctttgatcactcagactcgagccaaacaggcagctaccatgagtgaagtggagtggagagggagaacggttccagtgaagattgacaaagtgcgcattttcttattaggactggctgataacgaagcagctattgtccaggctgaaagcgaagaaactaaggagcgcctgtttgaatcaatgctcagcgagtgtcgggacgccatccaggtggttcgggaggagctcaagccagatcagaaacagagagattatatccttgaaggagagccagggaaggtgtctaatcttcaatacttgcatagctacctgacttacatcaagctatcaacggcaatcaagcgtaatgagaacatggccaaaggtctgcagagggctctgctgcagcagcagccagaggatgacagcaagcgctcaccccggccccaggacctgatccgactctatgacatcatcttacagaatctggtggaattgctccagcttcctggtttagaggaagacaaagccttccagaaagagataggcctcaagactctggtgttcaaagcttacaggtgttttttcattgctcagtcctatgtgctggtgaagaagtggagcgaagcccttgtcctgtatgacagagtcctgaaatatgcaaatgaagtaaattctgatgctggcgccttcaagaacagcctaaaggacctgcctgatgtgcaagagctcatcactcaagtgcggtcagagaagtgctccctgcaggccgcagccatccttgatgcaaacgacgctcatcaaacagagacctcctcctcccaagtcaaggacaataagcctctggttgaacggtttgagacattctgcctggacccttcccttgtcaccaagcaagccaaccttgtgcacttcccaccaggcttccagcccattccctgcaagcctttgttctttgacctggccctcaaccatgtggctttcccaccccttgaggacaagttggaacagaagaccaagagtggcctcactggatacatcaagggcatctttggattcaggagctaaccaggctcttcctcgggggcgggggagattctgactcttaatctgtattgtgagaaaatcccagcaagttccatgatattaaatccaggtctgcattggcccggggcaagagtttaacatcttcggccctgcattcctacatcttgtgtctgtacacgttcttaagcagcgtgtcaggagagcaccctgttgtcttctggtaaatgtgtgcagggtcatcctgtctcctgtacctcctgggaaaggggccgctgctgtctggtgccctgtgagctgtgattgattgcctttggtcagtaatgcgttcaggagtccacaccaggcacagatggggccttgaaacgctttgtcatgcttcttcagtaccatggatttgaaatgaactcatccttgctgtgagcatccaggagcccttgagaagtttatctatgactatgaaactggcaacgtcaccccagaattacggtcagccttattccccttcacctcccagtgaacgctaagaagtttcagacaagcagagagctctatttttagaagaaatatgttacactcagaaatgatgaaaccaaatcttatattaaaaggcaaagatgacgga

SEQ ID NO: 295083 - DNA, 1228 bp, Homo sapiens
tagttacttctcgtgtctgagaaccctctgcgcgtcttacagaatctggtggaattgctccagcttcctggtttagaggaagacaaagccttccagaaagagataggcctcaagactctggtgttcaaagcttacaggtgttttttcattgctcagtcctatgtgctggtgaagaagtggagcgaagcccttgtcctgtatgacagagtcctgaaatatgcaaatgaagtaaattctgatgctggcgccttcaagaacagcctaaaggacctgcctgatgtgcaagagctcatcactcaagtgcggtcagagaagtgctccctgcaggccgcagccatccttgatgcaaacgacgctcatcaaacagagacctcctcctcccaagtcaaggacaataagcctctggttgaacggtttgagacattctgcctggacccttcccttgtcaccaagcaagccaaccttgtgcacttcccaccaggcttccagcccattccctgcaagcctttgttctttgacctggccctcaaccatgtggctttcccaccccttgaggacaagttggaacagaagaccaagagtggcctcactggatacatcaagggcatctttggattcaggagctaaccaggctcttcctcgggggcgggggagattctgactcttaatctgtattgtgagaaaatcccagcaagttccatgatattaaatccaggtctgcattggcccggggcaagagtttaacatcttcggccctgcattcctacatcttgtgtctgtacacgttcttaagcagcgtgtcaggagagcaccctgttgtcttctggtaaatgtgtgcagggtcatcctgtctcctgtacctcctgggaaaggggccgctgctgtctggtgccctgtgagctgtgattgattgcctttggtcagtaatgcgttcaggagtccacaccaggcacagatggggccttgaaacgctttgtcatgcttcttcagtaccatggatttgaaatgaactcatccttgctgtgagcatccaggagcccttgagaagtttatctatgactatgaaactggcaacgtcaccccagaattacggtcagccttattccccttcacctcccagtgaacgctaagaagtttcagacaagcagagagctctatttttagaagaaatatgttacactcagaaatgatgaaaccaaatcttatattaaaaggcaaagatgacgga

SEQ ID NO: 295084 - DNA, 431 bp, Homo sapiens
tttccaggcattattacttaagccgtggcatagcttttcccatttgaaacaggctagtgttttgctttgttttgttttgttctaatagtgagaaccgtttagaaagtctaaagtcctgtgaaaataccagtggggtcggttaactcgggttagcttggtgtgcttctctgacctggccctggctcgggagtacacgttttctgaatcttacaggacctgcctgatgtgcaagagctcatcactcaagtgcggtcagagaagtgctccctgcaggccgcagccatccttggtgagccccctgcctggcctttgtatccccagacttcccttcctgccactccccttctctgtcacaccccatactactgttttaaggttgaaagggttgtcttggttcatctgtaagatgttcctggcctttacttgtgcca

SEQ ID NO: 295085 - DNA, 1613 bp, Homo sapiens
gctggtacggtcggagtttaggccccaaccggatcctggacaggcaccccggcttggcgctgtctctccccctcggctcggagaggcccttcggcctgagggagcctcgccgcccgtccccggcacacgcgcagccccggcctctcggcctctgccggagaaacaggtgaagggggtgcagggtggggccgttggggaggcctggggacccgggggctccgcagcggcagggggcctctgggaccttggggatgttgtgatggacgctgcagtggggccgggagagatgaagagacgcggagggtcgccctgagggaagactcttcgggatgacaggagcgggcctcggaagggactcggggcgctggagggaagtttcgttcttcggagaaacagaacgcgctcgagggggcaccgtggggcgagggcgcactcggttgcggcggcaggagtgagggacagtcccccgatttcctgctccctggggccctggggacgttccggccaccggagcgactgtcacgccgacggggatcaccggcgcgagtggggggtcggaaagcgcctcctccccgcccggtcggcggctcccgctgagccacttcctccgcttgccctgttcccgctccttcaggagccagctgtgcccttttggaggcaggaataggtgtgtctgtcgcctgcagccttacgggctggctggtcgtgggtaggctttattgcataagaatcaagtttcctgtagggaaattgacagaccggtactctttctaaattccctcgcatctttttctaggttaaattatgctccccccacgtccccgccttgtaaaaaagagaaaaaaagacaaaataaaatccccatcaacccgtcaagccagctctagagagagaaataaacctcttgacattgtccttttccaaatacctggtaaagtcggccagaagataaataattgagccattgcatttactggattgtggtgttgcttaattgcataggacggaatgaaccaattgagagtgggagttttctgtctcagagccaagatcttgggtaaatgcagaggagagggaaacaaagacaggctggccttgaaaaaaccatgtgtgcaaactttacatgcatttggggggtgtggttgcactgaagttaacaagattcaaaccgtcgcccaagttggtatttccatgtttggtacacatcactctgtgccatatcaggtcgttgttaagtgtggtgacaaaatcagtggttagtcatttttttaattaaaaatgtgtatagtgtgtacctgctggtcttactgtatgtgcaactaaaggtttacatagtctgtgtatgggttgtaaatttttggctggctgtgctgataaagcattgggcttgaataaagcaaagcagaaaatcatctcaatcttttatatgtggatttagactgtgttatgacttggttcagccagttttctatcttattttatattaaatatgtctgtgttctctgagtcagcacatttatttccttattacatgttccagacaggagtgctagcccagtttttgttcagtttgcacagtgggatggggaaacaagtctggaatttaaaaaaaa

SEQ ID NO: 295086 - DNA, 290 bp, Homo sapiens
cctgaggatttgggtgatgcactgcacccctaggaagggaagggctgggatggcagtagacttagctttcccattactcttttctccaggaaaacatggctggcaagggcttctccttctgggtctggctggacaatatcattgaccttgtgaaaaagtacatcctggccctttggaacgaagggtaggttggacagagtgtgcacagatgtaaccaagtccctgctctcagcaagccagtggcaggggatgatgccctgttagcaattccacaggggtcctcctccttg

SEQ ID NO: 295087 - DNA, 281 bp, Homo sapiens
gaataatggtgaagcgcgtgaagtaacaggagggcagtttgagtccctcacctttgacatggagttgacctcggagtgcgctacctcccccatgtgaggagctgagaacggaagctgcagaaagatacgactgaggcgcctacctgcattctgccacccctcacacagccaaaccccagatcatctgaaactactaactttgtggttccagattttttttaatctcctacttctgctatctttgagcaatctgggcacttttaaaaatagagaaatgagtg

SEQ ID NO: 295088 - DNA, 443 bp, Homo sapiens
ctgttacagaaatagtaacgacctccccttcgccccccgccgacagagagccttcacccaggctctgaagcctttgttccgttgtttcctagaataaatgctttccttgatgaatacattagttttaaggtgccacagttcagtccacatctccatggtctgctgctgatttttattctctttctctcctacttatagagcaggtatcttgagaagccaatggagattgcccggattgtggcccggtgcctgtgggaagaatcacgccttctacagactgcagccactgcggcccaggtgagacctgagacaaaacaaatccctggtctgggaggaatggaaaatcaaacaactttataatgagataaattattagatctactaaaaaagaaggaaaagaaattaaatagatcaataatcataaaaatacattgaaaaactct

SEQ ID NO: 295089 - DNA, 260 bp, Homo sapiens
cgattgtgaaataggtaggtttgcaaccttgcatgaagagcacccattgcatttctgtcatctttcagaaagcaccggtatctgtgtccaagggcctatacatcccggaaatttaacattctgggcacaaacacaaaagtgatgaacatggaagaatccaacaacggcagcctctctgcagaattcaaacacttggtatgtgggaggagctccccttcacaaagggcctctggctgccggagagggctagggagagcctc

SEQ ID NO: 295090 - DNA, 3727 bp, Homo sapiens
gtaattcagcggtttccggagctgcggcggcgcagactgggagggggagccgggggttccgacgtcgcagccgagggaacaagccccaaccggatcctggacaggcaccccggcttggcgctgtctctccccctcggctcggagaggcccttcggcctgagggagcctcgccgcccgtccccggcacacgcgcagccccggcctctcggcctctgccggagaaacaggatggcccaatggaatcagctacagcagcttgacacacggtacctggagcagctccatcagctctacagtgacagcttcccaatggagctgcggcagtttctggccccttggattgagagtcaagattgggcatatgcggccagcaaagaatcacatgccactttggtgtttcataatctcctgggagagattgaccagcagtatagccgcttcctgcaagagtcgaatgttctctatcagcacaatctacgaagaatcaagcagtttcttcagagcaggtatcttgagaagccaatggagattgcccggattgtggcccggtgcctgtgggaagaatcacgccttctacagactgcagccactgcggcccagcaagggggccaggccaaccaccccacagcagccgtggtgacggagaagcagcagatgctggagcagcaccttcaggatgtccggaagagagtgcaggatctagaacagaaaatgaaagtggtagagaatctccaggatgactttgatttcaactataaaaccctcaagagtcaaggagacatgcaagatctgaatggaaacaaccagtcagtgaccaggcagaagatgcagcagctggaacagatgctcactgcgctggaccagatgcggagaagcatcgtgagtgagctggcggggcttttgtcagcgatggagtacgtgcagaaaactctcacggacgaggagctggctgactggaagaggcggcaacagattgcctgcattggaggcccgcccaacatctgcctagatcggctagaaaactggataacgtcattagcagaatctcaacttcagacccgtcaacaaattaagaaactggaggagttgcagcaaaaagtttcctacaaaggggaccccattgtacagcaccggccgatgctggaggagagaatcgtggagctgtttagaaacttaatgaaaagtgcctttgtggtggagcggcagccctgcatgcccatgcatcctgaccggcccctcgtcatcaagaccggcgtccagttcactactaaagtcaggttgctggtcaaattccctgagttgaattatcagcttaaaattaaagtgtgcattgacaaagactctggggacgttgcagctctcagaggatcccggaaatttaacattctgggcacaaacacaaaagtgatgaacatggaagaatccaacaacggcagcctctctgcagaattcaaacacttgaccctgagggagcagagatgtgggaatgggggccgagccaattgtgatgcttccctgattgtgactgaggagctgcacctgatcacctttgagaccgaggtgtatcaccaaggcctcaagattgacctagagacccactccttgccagttgtggtgatctccaacatctgtcagatgccaaatgcctgggcgtccatcctgtggtacaacatgctgaccaacaatcccaagaatgtaaacttttttaccaagcccccaattggaacctgggatcaagtggccgaggtcctgagctggcagttctcctccaccaccaagcgaggactgagcatcgagcagctgactacactggcagagaaactcttgggacctggtgtgaattattcagggtgtcagatcacatgggctaaattttgcaaagaaaacatggctggcaagggcttctccttctgggtctggctggacaatatcattgaccttgtgaaaaagtacatcctggccctttggaacgaagggtacatcatgggctttatcagtaaggagcgggagcgggccatcttgagcactaagcctccaggcaccttcctgctaagattcagtgaaagcagcaaagaaggaggcgtcactttcacttgggtggagaaggacatcagcggtaagacccagatccagtccgtggaaccatacacaaagcagcagctgaacaacatgtcatttgctgaaatcatcatgggctataagatcatggatgctaccaatatcctggtgtctccactggtctatctctatcctgacattcccaaggaggaggcattcggaaagtattgtcggccagagagccaggagcatcctgaagctgacccaggtagcgctgccccatacctgaagaccaagtttatctgtgtgacaccaacgacctgcagcaataccattgacctgccgatgtccccccgcactttagattcattgatgcagtttggaaataatggtgaaggtgctgaaccctcagcaggagggcagtttgagtccctcacctttgacatggagttgacctcggagtgcgctacctcccccatgtgaggagctgagaacggaagctgcagaaagatacgactgaggcgcctacctgcattctgccacccctcacacagccaaaccccagatcatctgaaactactaactttgtggttccagattttttttaatctcctacttctgctatctttgagcaatctgggcacttttaaaaatagagaaatgagtgaatgtgggtgatctgcttttatctaaatgcaaataaggatgtgttctctgagacccatgatcaggggatgtggcggggggtggctagagggagaaaaaggaaatgtcttgtgttgttttgttcccctgccctcctttctcagcagctttttgttattgttgttgttgttcttagacaagtgcctcctggtgcctgcggcatccttctgcctgtttctgtaagcaaatgccacaggccacctatagctacatactcctggcattgcactttttaaccttgctgacatccaaatagaagataggactatctaagccctaggtttctttttaaattaagaaataataacaattaaagggcaaaaaacactgtatcagcatagcctttctgtatttaagaaacttaagcagccgggcatggtggctcacgcctgtaatcccagcactttgggaggccgaggcggatcataaggtcaggagatcaagaccatcctggctaacacggtgaaaccccgtctctactaaaagtacaaaaaattagctgggtgtggtggtgggcgcctgtagtcccagctactcgggaggctgaggcaggagaatcgcttgaacctgagaggcggaggttgcagtgagccaaaattgcaccactgcacactgcactccatcctgggcgacagtctgagactctgtctcaaaaaaaaaaaaaaaaaaaagaaacttcagttaacagcctccttggtgctttaagcattcagcttccttcaggctggtaatttatataatccctgaaacgggcttcaggtcaaacccttaagacatctgaagctgcaacctggcctttggtgttgaaataggaaggtttaaggagaatctaagcattttagacttttttttataaatagacttattttcctttgtaatgtattggccttttagtgagtaaggctgggcagagggtgcttacaaccttgactccctttctccctggacttgatctgctgtttca

SEQ ID NO: 295091 - DNA, 3681 bp, Homo sapiens
gtaattcagcggtttccggagctgcggcggcgcagactgggagggggagccgggggttccgacgtcgcagccgagggaacaagccccaaccggatcctggacaggcaccccggcttggcgctgtctctccccctcggctcggagaggcccttcggcctgagggagcctcgccgcccgtccccggcacacgcgcagccccggcctctcggcctctgccggagaaacaggatggcccaatggaatcagctacagcagcttgacacacggtacctggagcagctccatcagctctacagtgacagcttcccaatggagctgcggcagtttctggccccttggattgagagtcaagattgggcatatgcggccagcaaagaatcacatgccactttggtgtttcataatctcctgggagagattgaccagcagtatagccgcttcctgcaagagtcgaatgttctctatcagcacaatctacgaagaatcaagcagtttcttcagagcaggtatcttgagaagccaatggagattgcccggattgtggcccggtgcctgtgggaagaatcacgccttctacagactgcagccactgcggcccagcaagggggccaggccaaccaccccacagcagccgtggtgacggagaagcagcagatgctggagcagcaccttcaggatgtccggaagagagtgcaggatctagaacagaaaatgaaagtggtagagaatctccaggatgactttgatttcaactataaaaccctcaagagtcaaggagacatgcaagatctgaatggaaacaaccagtcagtgaccaggcagaagatgcagcagctggaacagatgctcactgcgctggaccagatgcggagaagcatcgtgagtgagctggcggggcttttgtcagcgatggagtacgtgcagaaaactctcacggacgaggagctggctgactggaagaggcggcaacagattgcctgcattggaggcccgcccaacatctgcctagatcggctagaaaactggataacgtcattagcagaatctcaacttcagacccgtcaacaaattaagaaactggaggagttgcagcaaaaagtttcctacaaaggggaccccattgtacagcaccggccgatgctggaggagagaatcgtggagctgtttagaaacttaatgaaaagtgcctttgtggtggagcggcagccctgcatgcccatgcatcctgaccggcccctcgtcatcaagaccggcgtccagttcactactaaagtcaggttgctggtcaaattccctgagttgaattatcagcttaaaattaaagtgtgcattgacaaagactctggggacgttgcagctctcagaggatcccggaaatttaacattctgggcacaaacacaaaagtgatgaacatggaagaatccaacaacggcagcctctctgcagaattcaaacacttgaccctgagggagcagagatgtgggaatgggggccgagccaattgtgatgcttccctgattgtgactgaggagctgcacctgatcacctttgagaccgaggtgtatcaccaaggcctcaagattgacctagagacccactccttgccagttgtggtgatctccaacatctgtcagatgccaaatgcctgggcgtccatcctgtggtacaacatgctgaccaacaatcccaagaatgtaaacttttttaccaagcccccaattggaacctgggatcaagtggccgaggtcctgagctggcagttctcctccaccaccaagcgaggactgagcatcgagcagctgactacactggcagagaaactcttgggacctggtgtgaattattcagggtgtcagatcacatgggctaaattttgcaaagaaaacatggctggcaagggcttctccttctgggtctggctggacaatatcattgaccttgtgaaaaagtacatcctggccctttggaacgaagggtacatcatgggctttatcagtaaggagcgggagcgggccatcttgagcactaagcctccaggcaccttcctgctaagattcagtgaaagcagcaaagaaggaggcgtcactttcacttgggtggagaaggacatcagcggtaagacccagatccagtccgtggaaccatacacaaagcagcagctgaacaacatgtcatttgctgaaatcatcatgggctataagatcatggatgctaccaatatcctggtgtctccactggtctatctctatcctgacattcccaaggaggaggcattcggaaagtattgtcggccagagagccaggagcatcctgaagctgacccaggtagcgctgccccatacctgaagaccaagtttatctgtgtgacaccaacgacctgcagcaataccattgacctgccgatgtccccccgcactttagattcattgatgcagtttggaaataatggtgaaggtgctgaaccctcagcaggagggcagtttgagtccctcacctttgacatggagttgacctcggagtgcgctacctcccccatgtgaggagctgagaacggaagctgcagaaagatacgactgaggcgcctacctgcattctgccacccctcacacagccaaaccccagatcatctgaaactactaactttgtggttccagattttttttaatctcctacttctgctatctttgagcaatctgggcacttttaaaaatagagaaatgagtgaatgtgggtgatctgcttttatctaaatgcaaataaggatgtgttctctgagacccatgatcaggggatgtggcggggggtggctagagggagaaaaaggaaatgtcttgtgttgttttgttcccctgccctcctttctcagcagctttttgttattgttgttgttgttcttagacaagtgcctcctggtgcctgcggcatccttctgcctgtttctgtaagcaaatgccacaggccacctatagctacatactcctggcattgcactttttaaccttgctgacatccaaatagaagataggactatctaagccctaggtttctttttaaattaagaaataataacaattaaagggcaaaaaacactgtatcagcatagcctttctgtatttaagaaacttaagcagccgggcatggtggctcacgcctgtaatcccagcactttgggaggccgaggcggatcataaggtcaggagatcaagaccatcctggctaacacggtgaaaccccgtctctactaaaagtacaaaaaattagctgggtgtggtggtgggcgcctgtagtcccagctactcgggaggctgaggcaggagaatcgcttgaacctgagaggcggaggttgcagtgagccaaaattgcaccactgcacactgcactccatcctgggcgacagtctgagactctgtctcaaaaaaaaaaaaaaaaaaaagaaaaacccggggggctcaaggggggggggggaaaaaggggaatgaaacggggccctggggccaaaagggggttcccgggacccaagcttttttgtgccacacagggggaaaactcggcgggcgtcccccctaaaaggagaggcggaaaataaattcgagaataacgccgggtaaccggggcttaagactcgcgcacaaaagaagaaagagagacgacaaaacaagaagacaagaaagaacacgggt

SEQ ID NO: 295092 - DNA, 3749 bp, Homo sapiens
gtaattcagcggtttccggagctgcggcggcgcagactgggagggggagccgggggttccgacgtcgcagccgagggaacaagccccaaccggatcctggacaggcaccccggcttggcgctgtctctccccctcggctcggagaggcccttcggcctgagggagcctcgccgcccgtccccggcacacgcgcagccccggcctctcggcctctgccggagaaacagttgggacccctgattttagcaggatggcccaatggaatcagctacagcagcttgacacacggtacctggagcagctccatcagctctacagtgacagcttcccaatggagctgcggcagtttctggccccttggattgagagtcaagattgggcatatgcggccagcaaagaatcacatgccactttggtgtttcataatctcctgggagagattgaccagcagtatagccgcttcctgcaagagtcgaatgttctctatcagcacaatctacgaagaatcaagcagtttcttcagagcaggtatcttgagaagccaatggagattgcccggattgtggcccggtgcctgtgggaagaatcacgccttctacagactgcagccactgcggcccagcaagggggccaggccaaccaccccacagcagccgtggtgacggagaagcagcagatgctggagcagcaccttcaggatgtccggaagagagtgcaggatctagaacagaaaatgaaagtggtagagaatctccaggatgactttgatttcaactataaaaccctcaagagtcaaggagacatgcaagatctgaatggaaacaaccagtcagtgaccaggcagaagatgcagcagctggaacagatgctcactgcgctggaccagatgcggagaagcatcgtgagtgagctggcggggcttttgtcagcgatggagtacgtgcagaaaactctcacggacgaggagctggctgactggaagaggcggcaacagattgcctgcattggaggcccgcccaacatctgcctagatcggctagaaaactggataacgtcattagcagaatctcaacttcagacccgtcaacaaattaagaaactggaggagttgcagcaaaaagtttcctacaaaggggaccccattgtacagcaccggccgatgctggaggagagaatcgtggagctgtttagaaacttaatgaaaagtgcctttgtggtggagcggcagccctgcatgcccatgcatcctgaccggcccctcgtcatcaagaccggcgtccagttcactactaaagtcaggttgctggtcaaattccctgagttgaattatcagcttaaaattaaagtgtgcattgacaaagactctggggacgttgcagctctcagaggatcccggaaatttaacattctgggcacaaacacaaaagtgatgaacatggaagaatccaacaacggcagcctctctgcagaattcaaacacttgaccctgagggagcagagatgtgggaatgggggccgagccaattgtgatgcttccctgattgtgactgaggagctgcacctgatcacctttgagaccgaggtgtatcaccaaggcctcaagattgacctagagacccactccttgccagttgtggtgatctccaacatctgtcagatgccaaatgcctgggcgtccatcctgtggtacaacatgctgaccaacaatcccaagaatgtaaacttttttaccaagcccccaattggaacctgggatcaagtggccgaggtcctgagctggcagttctcctccaccaccaagcgaggactgagcatcgagcagctgactacactggcagagaaactcttgggacctggtgtgaattattcagggtgtcagatcacatgggctaaattttgcaaagaaaacatggctggcaagggcttctccttctgggtctggctggacaatatcattgaccttgtgaaaaagtacatcctggccctttggaacgaagggtacatcatgggctttatcagtaaggagcgggagcgggccatcttgagcactaagcctccaggcaccttcctgctaagattcagtgaaagcagcaaagaaggaggcgtcactttcacttgggtggagaaggacatcagcggtaagacccagatccagtccgtggaaccatacacaaagcagcagctgaacaacatgtcatttgctgaaatcatcatgggctataagatcatggatgctaccaatatcctggtgtctccactggtctatctctatcctgacattcccaaggaggaggcattcggaaagtattgtcggccagagagccaggagcatcctgaagctgacccaggtagcgctgccccatacctgaagaccaagtttatctgtgtgacaccaacgacctgcagcaataccattgacctgccgatgtccccccgcactttagattcattgatgcagtttggaaataatggtgaaggtgctgaaccctcagcaggagggcagtttgagtccctcacctttgacatggagttgacctcggagtgcgctacctcccccatgtgaggagctgagaacggaagctgcagaaagatacgactgaggcgcctacctgcattctgccacccctcacacagccaaaccccagatcatctgaaactactaactttgtggttccagattttttttaatctcctacttctgctatctttgagcaatctgggcacttttaaaaatagagaaatgagtgaatgtgggtgatctgcttttatctaaatgcaaataaggatgtgttctctgagacccatgatcaggggatgtggcggggggtggctagagggagaaaaaggaaatgtcttgtgttgttttgttcccctgccctcctttctcagcagctttttgttattgttgttgttgttcttagacaagtgcctcctggtgcctgcggcatccttctgcctgtttctgtaagcaaatgccacaggccacctatagctacatactcctggcattgcactttttaaccttgctgacatccaaatagaagataggactatctaagccctaggtttctttttaaattaagaaataataacaattaaagggcaaaaaacactgtatcagcatagcctttctgtatttaagaaacttaagcagccgggcatggtggctcacgcctgtaatcccagcactttgggaggccgaggcggatcataaggtcaggagatcaagaccatcctggctaacacggtgaaaccccgtctctactaaaagtacaaaaaattagctgggtgtggtggtgggcgcctgtagtcccagctactcgggaggctgaggcaggagaatcgcttgaacctgagaggcggaggttgcagtgagccaaaattgcaccactgcacactgcactccatcctgggcgacagtctgagactctgtctcaaaaaaaaaaaaaaaaaaaagaaacttcagttaacagcctccttggtgctttaagcattcagcttccttcaggctggtaatttatataatccctgaaacgggcttcaggtcaaacccttaagacatctgaagctgcaacctggcctttggtgttgaaataggaaggtttaaggagaatctaagcattttagacttttttttataaatagacttattttcctttgtaatgtattggccttttagtgagtaaggctgggcagagggtgcttacaaccttgactccctttctccctggacttgatctgctgtttca

SEQ ID NO: 295093 - DNA, 3662 bp, Homo sapiens
  misc_feature (8)..(8): n is a, c, g, or t
  misc_feature (32)..(33): n is a, c, g, or t
  misc_feature (35)..(35): n is a, c, g, or t
aacacctnggctaggtacgaggctgggtgttnnantcggccgacccggcttggcgctgtctctccccctcggctcggagaggcccttcggcctgagggagcctcgccgcccgtccccggcacacgcgcagccccggcctctcggcctctgccggagaaacaggatggcccaatggaatcagctacagcagcttgacacacggtacctggagcagctccatcagctctacagtgacagcttcccaatggagctgcggcagtttctggccccttggattgagagtcaagattgggcatatgcggccagcaaagaatcacatgccactttggtgtttcataatctcctgggagagattgaccagcagtatagccgcttcctgcaagagtcgaatgttctctatcagcacaatctacgaagaatcaagcagtttcttcagagcaggtatcttgagaagccaatggagattgcccggattgtggcccggtgcctgtgggaagaatcacgccttctacagactgcagccactgcggcccagcaagggggccaggccaaccaccccacagcagccgtggtgacggagaagcagcagatgctggagcagcaccttcaggatgtccggaagagagtgcaggatctagaacagaaaatgaaagtggtagagaatctccaggatgactttgatttcaactataaaaccctcaagagtcaaggagacatgcaagatctgaatggaaacaaccagtcagtgaccaggcagaagatgcagcagctggaacagatgctcactgcgctggaccagatgcggagaagcatcgtgagtgagctggcggggcttttgtcagcgatggagtacgtgcagaaaactctcacggacgaggagctggctgactggaagaggcggcaacagattgcctgcattggaggcccgcccaacatctgcctagatcggctagaaaactggataacgtcattagcagaatctcaacttcagacccgtcaacaaattaagaaactggaggagttgcagcaaaaagtttcctacaaaggggaccccattgtacagcaccggccgatgctggaggagagaatcgtggagctgtttagaaacttaatgaaaagtgcctttgtggtggagcggcagccctgcatgcccatgcatcctgaccggcccctcgtcatcaagaccggcgtccagttcactactaaagtcaggttgctggtcaaattccctgagttgaattatcagcttaaaattaaagtgtgcattgacaaagactctggggacgttgcagctctcagaggatcccggaaatttaacattctgggcacaaacacaaaagtgatgaacatggaagaatccaacaacggcagcctctctgcagaattcaaacacttgaccctgagggagcagagatgtgggaatgggggccgagccaattgtgatgcttccctgattgtgactgaggagctgcacctgatcacctttgagaccgaggtgtatcaccaaggcctcaagattgacctagagacccactccttgccagttgtggtgatctccaacatctgtcagatgccaaatgcctgggcgtccatcctgtggtacaacatgctgaccaacaatcccaagaatgtaaacttttttaccaagcccccaattggaacctgggatcaagtggccgaggtcctgagctggcagttctcctccaccaccaagcgaggactgagcatcgagcagctgactacactggcagagaaactcttgggacctggtgtgaattattcagggtgtcagatcacatgggctaaattttgcaaagaaaacatggctggcaagggcttctccttctgggtctggctggacaatatcattgaccttgtgaaaaagtacatcctggccctttggaacgaagggtacatcatgggctttatcagtaaggagcgggagcgggccatcttgagcactaagcctccaggcaccttcctgctaagattcagtgaaagcagcaaagaaggaggcgtcactttcacttgggtggagaaggacatcagcggtaagacccagatccagtccgtggaaccatacacaaagcagcagctgaacaacatgtcatttgctgaaatcatcatgggctataagatcatggatgctaccaatatcctggtgtctccactggtctatctctatcctgacattcccaaggaggaggcattcggaaagtattgtcggccagagagccaggagcatcctgaagctgacccaggtagcgctgccccatacctgaagaccaagtttatctgtgtgacaccaacgacctgcagcaataccattgacctgccgatgtccccccgcactttagattcattgatgcagtttggaaataatggtgaaggtgctgaaccctcagcaggagggcagtttgagtccctcacctttgacatggagttgacctcggagtgcgctacctcccccatgtgaggagctgagaacggaagctgcagaaagatacgactgaggcgcctacctgcattctgccacccctcacacagccaaaccccagatcatctgaaactactaactttgtggttccagattttttttaatctcctacttctgctatctttgagcaatctgggcacttttaaaaatagagaaatgagtgaatgtgggtgatctgcttttatctaaatgcaaataaggatgtgttctctgagacccatgatcaggggatgtggcggggggtggctagagggagaaaaaggaaatgtcttgtgttgttttgttcccctgccctcctttctcagcagctttttgttattgttgttgttgttcttagacaagtgcctcctggtgcctgcggcatccttctgcctgtttctgtaagcaaatgccacaggccacctatagctacatactcctggcattgcactttttaaccttgctgacatccaaatagaagataggactatctaagccctaggtttctttttaaattaagaaataataacaattaaagggcaaaaaacactgtatcagcatagcctttctgtatttaagaaacttaagcagccgggcatggtggctcacgcctgtaatcccagcactttgggaggccgaggcggatcataaggtcaggagatcaagaccatcctggctaacacggtgaaaccccgtctctactaaaagtacaaaaaattagctgggtgtggtggtgggcgcctgtagtcccagctactcgggaggctgaggcaggagaatcgcttgaacctgagaggcggaggttgcagtgagccaaaattgcaccactgcacactgcactccatcctgggcgacagtctgagactctgtctcaaaaaaaaaaaaaaaaaaaagaaacttcagttaacagcctccttggtgctttaagcattcagcttccttcaggctggtaatttatataatccctgaaacgggcttcaggtcaaacccttaagacatctgaagctgcaacctggcctttggtgttgaaataggaaggtttaaggagaatctaagcattttagacttttttttataaatagacttattttcctttgtaatgtattggccttttagtgagtaaggctgggcagagggtgcttacaaccttgactccctttctccctggacttgatctgctgtttca

SEQ ID NO: 295094 - DNA, 2725 bp, Homo sapiens
gtaattcagcggtttccggagctgcggcggcgcagactgggagggggagccgggggttccgacgtcgcagccgagggaacaagccccaaccggatcctggacaggcaccccggcttggcgctgtctctccccctcggctcggagaggcccttcggcctgagggagcctcgccgcccgtccccggcacacgcgcagccccggcctctcggcctctgccggagaaacaggatggcccaatggaatcagctacagcagcttgacacacggtacctggagcagctccatcagctctacagtgacagcttcccaatggagctgcggcagtttctggccccttggattgagagtcaagattgggcatatgcggccagcaaagaatcacatgccactttggtgtttcataatctcctgggagagattgaccagcagtatagccgcttcctgcaagagtcgaatgttctctatcagcacaatctacgaagaatcaagcagtttcttcagagcaggtatcttgagaagccaatggagattgcccggattgtggcccggtgcctgtgggaagaatcacgccttctacagactgcagccactgcggcccagcaagggggccaggccaaccaccccacagcagccgtggtgacggagaagcagcagatgctggagcagcaccttcaggatgtccggaagagagtgcaggatctagaacagaaaatgaaagtggtagagaatctccaggatgactttgatttcaactataaaaccctcaagagtcaaggagacatgcaagatctgaatggaaacaaccagtcagtgaccaggcagaagatgcagcagctggaacagatgctcactgcgctggaccagatgcggagaagcatcgtgagtgagctggcggggcttttgtcagcgatggagtacgtgcagaaaactctcacggacgaggagctggctgactggaagaggcggcaacagattgcctgcattggaggcccgcccaacatctgcctagatcggctagaaaactggataacgtcattagcagaatctcaacttcagacccgtcaacaaattaagaaactggaggagttgcagcaaaaagtttcctacaaaggggaccccattgtacagcaccggccgatgctggaggagagaatcgtggagctgtttagaaacttaatgaaaagtgcctttgtggtggagcggcagccctgcatgcccatgcatcctgaccggcccctcgtcatcaagaccggcgtccagttcactactaaagtcaggttgctggtcaaattccctgagttgaattatcagcttaaaattaaagtgtgcattgacaaagactctggggacgttgcagctctcagaggatcccggaaatttaacattctgggcacaaacacaaaagtgatgaacatggaagaatccaacaacggcagcctctctgcagaattcaaacacttgaccctgagggagcagagatgtgggaatgggggccgagccaattgtgatgcttccctgattgtgactgaggagctgcacctgatcacctttgagaccgaggtgtatcaccaaggcctcaagattgacctagagacccactccttgccagttgtggtgatctccaacatctgtcagatgccaaatgcctgggcgtccatcctgtggtacaacatgctgaccaacaatcccaagaatgtaaacttttttaccaagcccccaattggaacctgggatcaagtggccgaggtcctgagctggcagttctcctccaccaccaagcgaggactgagcatcgagcagctgactacactggcagagaaactcttgggacctggtgtgaattattcagggtgtcagatcacatgggctaaattttgcaaagaaaacatggctggcaagggcttctccttctgggtctggctggacaatatcattgaccttgtgaaaaagtacatcctggccctttggaacgaagggtacatcatgggctttatcagtaaggagcgggagcgggccatcttgagcactaagcctccaggcaccttcctgctaagattcagtgaaagcagcaaagaaggaggcgtcactttcacttgggtggagaaggacatcagcggtaagacccagatccagtccgtggaaccatacacaaagcagcagctgaacaacatgtcatttgctgaaatcatcatgggctataagatcatggatgctaccaatatcctggtgtctccactggtctatctctatcctgacattcccaaggaggaggcattcggaaagtattgtcggccagagagccaggagcatcctgaagctgacccaggtagcgctgccccatacctgaagaccaagtttatctgtgtgacaccaacgacctgcagcaataccattgacctgccgatgtccccccgcactttagattcattgatgcagtttggaaataatggtgaaggtgctgaaccctcagcaggagggcagtttgagtccctcacctttgacatggagttgacctcggagtgcgctacctcccccatgtgaggagctgagaacggaagctgcagaaagatacgactgaggcgcctacctgcattctgccacccctcacacagccaaaccccagatcatctgaaactactaactttgtggttccagattttttttaatctcctacttctgctatctttgagcaatctgggcacttttaaaaatagagaaatgagtg

SEQ ID NO: 295095 - DNA, 3647 bp, Homo sapiens
gtaattcagcggtttccggagctgcggcggcgcagactgggagggggagccgggggttccgacgtcgcagccgagggaacaagccccaaccggatcctggacaggcaccccggcttggcgctgtctctccccctcggctcggagaggcccttcggcctgagggagcctcgccgcccgtccccggcacacgcgcagccccggcctctcggcctctgccggagaaacaggatggcccaatggaatcagctacagcagcttgacacacggtacctggagcagctccatcagctctacagtgacagcttcccaatggagctgcggcagtttctggccccttggattgagagtcaagattgggcatatgcggccagcaaagaatcacatgccactttggtgtttcataatctcctgggagagattgaccagcagtatagccgcttcctgcaagagtcgaatgttctctatcagcacaatctacgaagaatcacgccttctacagactgcagccactgcggcccagcaagggggccaggccaaccaccccacagcagccgtggtgacggagaagcagcagatgctggagcagcaccttcaggatgtccggaagagagtgcaggatctagaacagaaaatgaaagtggtagagaatctccaggatgactttgatttcaactataaaaccctcaagagtcaaggagacatgcaagatctgaatggaaacaaccagtcagtgaccaggcagaagatgcagcagctggaacagatgctcactgcgctggaccagatgcggagaagcatcgtgagtgagctggcggggcttttgtcagcgatggagtacgtgcagaaaactctcacggacgaggagctggctgactggaagaggcggcaacagattgcctgcattggaggcccgcccaacatctgcctagatcggctagaaaactggataacgtcattagcagaatctcaacttcagacccgtcaacaaattaagaaactggaggagttgcagcaaaaagtttcctacaaaggggaccccattgtacagcaccggccgatgctggaggagagaatcgtggagctgtttagaaacttaatgaaaagtgcctttgtggtggagcggcagccctgcatgcccatgcatcctgaccggcccctcgtcatcaagaccggcgtccagttcactactaaagtcaggttgctggtcaaattccctgagttgaattatcagcttaaaattaaagtgtgcattgacaaagactctggggacgttgcagctctcagaggatcccggaaatttaacattctgggcacaaacacaaaagtgatgaacatggaagaatccaacaacggcagcctctctgcagaattcaaacacttgaccctgagggagcagagatgtgggaatgggggccgagccaattgtgatgcttccctgattgtgactgaggagctgcacctgatcacctttgagaccgaggtgtatcaccaaggcctcaagattgacctagagacccactccttgccagttgtggtgatctccaacatctgtcagatgccaaatgcctgggcgtccatcctgtggtacaacatgctgaccaacaatcccaagaatgtaaacttttttaccaagcccccaattggaacctgggatcaagtggccgaggtcctgagctggcagttctcctccaccaccaagcgaggactgagcatcgagcagctgactacactggcagagaaactcttgggacctggtgtgaattattcagggtgtcagatcacatgggctaaattttgcaaagaaaacatggctggcaagggcttctccttctgggtctggctggacaatatcattgaccttgtgaaaaagtacatcctggccctttggaacgaagggtacatcatgggctttatcagtaaggagcgggagcgggccatcttgagcactaagcctccaggcaccttcctgctaagattcagtgaaagcagcaaagaaggaggcgtcactttcacttgggtggagaaggacatcagcggtaagacccagatccagtccgtggaaccatacacaaagcagcagctgaacaacatgtcatttgctgaaatcatcatgggctataagatcatggatgctaccaatatcctggtgtctccactggtctatctctatcctgacattcccaaggaggaggcattcggaaagtattgtcggccagagagccaggagcatcctgaagctgacccaggtagcgctgccccatacctgaagaccaagtttatctgtgtgacaccaacgacctgcagcaataccattgacctgccgatgtccccccgcactttagattcattgatgcagtttggaaataatggtgaaggtgctgaaccctcagcaggagggcagtttgagtccctcacctttgacatggagttgacctcggagtgcgctacctcccccatgtgaggagctgagaacggaagctgcagaaagatacgactgaggcgcctacctgcattctgccacccctcacacagccaaaccccagatcatctgaaactactaactttgtggttccagattttttttaatctcctacttctgctatctttgagcaatctgggcacttttaaaaatagagaaatgagtgaatgtgggtgatctgcttttatctaaatgcaaataaggatgtgttctctgagacccatgatcaggggatgtggcggggggtggctagagggagaaaaaggaaatgtcttgtgttgttttgttcccctgccctcctttctcagcagctttttgttattgttgttgttgttcttagacaagtgcctcctggtgcctgcggcatccttctgcctgtttctgtaagcaaatgccacaggccacctatagctacatactcctggcattgcactttttaaccttgctgacatccaaatagaagataggactatctaagccctaggtttctttttaaattaagaaataataacaattaaagggcaaaaaacactgtatcagcatagcctttctgtatttaagaaacttaagcagccgggcatggtggctcacgcctgtaatcccagcactttgggaggccgaggcggatcataaggtcaggagatcaagaccatcctggctaacacggtgaaaccccgtctctactaaaagtacaaaaaattagctgggtgtggtggtgggcgcctgtagtcccagctactcgggaggctgaggcaggagaatcgcttgaacctgagaggcggaggttgcagtgagccaaaattgcaccactgcacactgcactccatcctgggcgacagtctgagactctgtctcaaaaaaaaaaaaaaaaaaaagaaacttcagttaacagcctccttggtgctttaagcattcagcttccttcaggctggtaatttatataatccctgaaacgggcttcaggtcaaacccttaagacatctgaagctgcaacctggcctttggtgttgaaataggaaggtttaaggagaatctaagcattttagacttttttttataaatagacttattttcctttgtaatgtattggccttttagtgagtaaggctgggcagagggtgcttacaaccttgactccctttctccctggacttgatctgctgtttca

SEQ ID NO: 295096 - DNA, 4027 bp, Homo sapiens
gtaattcagcggtttccggagctgcggcggcgcagactgggagggggagccgggggttccgacgtcgcagccgagggaacaagccccaaccggatcctggacaggcaccccggcttggcgctgtctctccccctcggctcggagaggcccttcggcctgagggagcctcgccgcccgtccccggcacacgcgcagccccggcctctcggcctctgccggagaaacaggatggcccaatggaatcagctacagcagcttgacacacggtacctggagcagctccatcagctctacagtgacagcttcccaatggagctgcggcagtttctggccccttggattgagagtcaagattgggcatatgcggccagcaaagaatcacatgccactttggtgtttcataatctcctgggagagattgaccagcagtatagccgcttcctgcaagagtcgaatgttctctatcagcacaatctacgaagaatcaagcagtttcttcagagcaggtatcttgagaagccaatggagattgcccggattgtggcccggtgcctgtgggaagaatcacgccttctacagactgcagccactgcggcccagcaagggggccaggccaaccaccccacagcagccgtggtgacggagaagcagcagatgctggagcagcaccttcaggatgtccggaagagagtgcaggatctagaacagaaaatgaaagtggtagagaatctccaggatgactttgatttcaactataaaaccctcaagagtcaaggagacatgcaagatctgaatggaaacaaccagtcagtgaccaggcagaagatgcagcagctggaacagatgctcactgcgctggaccagatgcggagagtaagggcataggtcggaccacttcccccatgtgtctcgctcacttgcgggatttcagcgtcttgtggcagaacttgcttggtttctaagaagttcctgctctggagttgactaaagaatgtggttagagacagtctgaggaaatgttttctgactttgttttggtttccaaccagagcatcgtgagtgagctggcggggcttttgtcagcgatggagtacgtgcagaaaactctcacggacgaggagctggctgactggaagaggcggcaacagattgcctgcattggaggcccgcccaacatctgcctagatcggctagaaaactggataacgtcattagcagaatctcaacttcagacccgtcaacaaattaagaaactggaggagttgcagcaaaaagtttcctacaaaggggaccccattgtacagcaccggccgatgctggaggagagaatcgtggagctgtttagaaacttaatgaaaaggtaatttagcatccttgtccctttccctcatctaaaaaatacctaaagactcacgtggtagagtgagaggcgggctgacttctggtcatggccgtgcgcgtgagcccatcttctctttcctcagtgcctttgtggtggagcggcagccctgcatgcccatgcatcctgaccggcccctcgtcatcaagaccggcgtccagttcactactaaagtcaggttgctggtcaaattccctgagttgaattatcagcttaaaattaaagtgtgcattgacaaagactctggggacgttgcagctctcagaggatcccggaaatttaacattctgggcacaaacacaaaagtgatgaacatggaagaatccaacaacggcagcctctctgcagaattcaaacacttgaccctgagggagcagagatgtgggaatgggggccgagccaattgtgatgcttccctgattgtgactgaggagctgcacctgatcacctttgagaccgaggtgtatcaccaaggcctcaagattgacctagagacccactccttgccagttgtggtgatctccaacatctgtcagatgccaaatgcctgggcgtccatcctgtggtacaacatgctgaccaacaatcccaagaatgtaaacttttttaccaagcccccaattggaacctgggatcaagtggccgaggtcctgagctggcagttctcctccaccaccaagcgaggactgagcatcgagcagctgactacactggcagagaaactcttgggacctggtgtgaattattcagggtgtcagatcacatgggctaaattttgcaaagaaaacatggctggcaagggcttctccttctgggtctggctggacaatatcattgaccttgtgaaaaagtacatcctggccctttggaacgaagggtacatcatgggctttatcagtaaggagcgggagcgggccatcttgagcactaagcctccaggcaccttcctgctaagattcagtgaaagcagcaaagaaggaggcgtcactttcacttgggtggagaaggacatcagcggtaagacccagatccagtccgtggaaccatacacaaagcagcagctgaacaacatgtcatttgctgaaatcatcatgggctataagatcatggatgctaccaatatcctggtgtctccactggtctatctctatcctgacattcccaaggaggaggcattcggaaagtattgtcggccagagagccaggagcatcctgaagctgacccaggtagcgctgccccatacctgaagaccaagtttatctgtgtgacaccaacgacctgcagcaataccattgacctgccgatgtccccccgcactttagattcattgatgcagtttggaaataatggtgaaggtgctgaaccctcagcaggagggcagtttgagtccctcacctttgacatggagttgacctcggagtgcgctacctcccccatgtgaggagctgagaacggaagctgcagaaagatacgactgaggcgcctacctgcattctgccacccctcacacagccaaaccccagatcatctgaaactactaactttgtggttccagattttttttaatctcctacttctgctatctttgagcaatctgggcacttttaaaaatagagaaatgagtgaatgtgggtgatctgcttttatctaaatgcaaataaggatgtgttctctgagacccatgatcaggggatgtggcggggggtggctagagggagaaaaaggaaatgtcttgtgttgttttgttcccctgccctcctttctcagcagctttttgttattgttgttgttgttcttagacaagtgcctcctggtgcctgcggcatccttctgcctgtttctgtaagcaaatgccacaggccacctatagctacatactcctggcattgcactttttaaccttgctgacatccaaatagaagataggactatctaagccctaggtttctttttaaattaagaaataataacaattaaagggcaaaaaacactgtatcagcatagcctttctgtatttaagaaacttaagcagccgggcatggtggctcacgcctgtaatcccagcactttgggaggccgaggcggatcataaggtcaggagatcaagaccatcctggctaacacggtgaaaccccgtctctactaaaagtacaaaaaattagctgggtgtggtggtgggcgcctgtagtcccagctactcgggaggctgaggcaggagaatcgcttgaacctgagaggcggaggttgcagtgagccaaaattgcaccactgcacactgcactccatcctgggcgacagtctgagactctgtctcaaaaaaaaaaaaaaaaaaaagaaacttcagttaacagcctccttggtgctttaagcattcagcttccttcaggctggtaatttatataatccctgaaacgggcttcaggtcaaacccttaagacatctgaagctgcaacctggcctttggtgttgaaataggaaggtttaaggagaatctaagcattttagacttttttttataaatagacttattttcctttgtaatgtattggccttttagtgagtaaggctgggcagagggtgcttacaaccttgactccctttctccctggacttgatctgctgtttca

SEQ ID NO: 295097 - DNA, 3673 bp, Homo sapiens
gtaattcagcggtttccggagctgcggcggcgcagactgggagggggagccgggggttccgacgtcgcagccgagggaacaagccccaaccggatcctggacaggcaccccggcttggcgctgtctctccccctcggctcggagaggcccttcggcctgagggagcctcgccgcccgtccccggcacacgcgcagccccggcctctcggcctctgccggagaaacaggatggcccaatggaatcagctacagcagcttgacacacggtacctggagcagctccatcagctctacagtgacagcttcccaatggagctgcggcagtttctggccccttggattgagagtcaagattgggcatatgcggccagcaaagaatcacatgccactttggtgtttcataatctcctgggagagattgaccagcagtatagccgcttcctgcaagagtcgaatgttctctatcagcacaatctacgaagaatcaagcagtttcttcagagcaggtatcttgagaagccaatggagattgcccggattgtggcccggtgcctgtgggaagaatcacgccttctacagactgcagccactgcggcccagcaagggggccaggccaaccaccccacagcagccgtggtgacggagaagcagcagatgctggagcagcaccttcaggatgtccggaagagagtgcaggatctagaacagaaaatgaaagtggtagagaatctccaggatgactttgatttcaactataaaaccctcaagagtcaaggagacatgcaagatctgaatggaaacaaccagtcagtgaccaggcagaagatgcagcagctggaacagatgctcactgcgctggaccagatgcggagaagcatcgtgagtgagctggcggggcttttgtcagcgatggagtacgtgcagaaaactctcacggacgaggagctggctgactggaagaggcggcaacagattgcctgcattggaggcccgcccaacatctgcctagatcggctagaaaactggataacgtcattagcagaatctcaacttcagacccgtcaacaaattaagaaactggaggagttgcagcaaaaagtttcctacaaaggggaccccattgtacagcaccggccgatgctggaggagagaatcgtggagctgtttagaaacttaatgaaaagtgcctttgtggtggagcggcagccctgcatgcccatgcatcctgaccggcccctcgtcatcaagaccggcgtccagttcactactaaagtcaggttgctggtcaaattccctgagttgaattatcagcttaaaattaaagtgtgcattgacaaagactctggggacgttgcagctctcagaggatcccggaaatttaacattctgggcacaaacacaaaagtgatgaacatggaagaatccaacaacggcagcctctctgcagaattcaaacacttgaccctgagggagcagagatgtgggaatgggggccgagccaattgtgatgcttccctgattgtgactgaggagctgcacctgatcacctttgagaccgaggtgtatcaccaaggcctcaagattgacctagagacccactccttgccagttgtggtgatctccaacatctgtcagatgccaaatgcctgggcgtccatcctgtggtacaacatgctgaccaacaatcccaagaatgtaaacttttttaccaagcccccaattggaacctgggatcaagtggccgaggtcctgagctggcagttctcctccaccaccaagcgaggactgagcatcgagcagctgactacactggcagagaaactcttgggacctggtgtgaattattcagggtgtcagatcacatgggctaaattttgcaaagaaaacatggctggcaagggcttctccttctgggtctggctggacaatatcattgaccttgtgaaggagcgggagcgggccatcttgagcactaagcctccaggcaccttcctgctaagattcagtgaaagcagcaaagaaggaggcgtcactttcacttgggtggagaaggacatcagcggtaagacccagatccagtccgtggaaccatacacaaagcagcagctgaacaacatgtcatttgctgaaatcatcatgggctataagatcatggatgctaccaatatcctggtgtctccactggtctatctctatcctgacattcccaaggaggaggcattcggaaagtattgtcggccagagagccaggagcatcctgaagctgacccaggtagcgctgccccatacctgaagaccaagtttatctgtgtgacaccaacgacctgcagcaataccattgacctgccgatgtccccccgcactttagattcattgatgcagtttggaaataatggtgaaggtgctgaaccctcagcaggagggcagtttgagtccctcacctttgacatggagttgacctcggagtgcgctacctcccccatgtgaggagctgagaacggaagctgcagaaagatacgactgaggcgcctacctgcattctgccacccctcacacagccaaaccccagatcatctgaaactactaactttgtggttccagattttttttaatctcctacttctgctatctttgagcaatctgggcacttttaaaaatagagaaatgagtgaatgtgggtgatctgcttttatctaaatgcaaataaggatgtgttctctgagacccatgatcaggggatgtggcggggggtggctagagggagaaaaaggaaatgtcttgtgttgttttgttcccctgccctcctttctcagcagctttttgttattgttgttgttgttcttagacaagtgcctcctggtgcctgcggcatccttctgcctgtttctgtaagcaaatgccacaggccacctatagctacatactcctggcattgcactttttaaccttgctgacatccaaatagaagataggactatctaagccctaggtttctttttaaattaagaaataataacaattaaagggcaaaaaacactgtatcagcatagcctttctgtatttaagaaacttaagcagccgggcatggtggctcacgcctgtaatcccagcactttgggaggccgaggcggatcataaggtcaggagatcaagaccatcctggctaacacggtgaaaccccgtctctactaaaagtacaaaaaattagctgggtgtggtggtgggcgcctgtagtcccagctactcgggaggctgaggcaggagaatcgcttgaacctgagaggcggaggttgcagtgagccaaaattgcaccactgcacactgcactccatcctgggcgacagtctgagactctgtctcaaaaaaaaaaaaaaaaaaaagaaacttcagttaacagcctccttggtgctttaagcattcagcttccttcaggctggtaatttatataatccctgaaacgggcttcaggtcaaacccttaagacatctgaagctgcaacctggcctttggtgttgaaataggaaggtttaaggagaatctaagcattttagacttttttttataaatagacttattttcctttgtaatgtattggccttttagtgagtaaggctgggcagagggtgcttacaaccttgactccctttctccctggacttgatctgctgtttca

SEQ ID NO: 295098 - DNA, 5656 bp, Homo sapiens
gtaattcagcggtttccggagctgcggcggcgcagactgggagggggagccgggggttccgacgtcgcagccgagggaacaagccccaaccggatcctggacaggcaccccggcttggcgctgtctctccccctcggctcggagaggcccttcggcctgagggagcctcgccgcccgtccccggcacacgcgcagccccggcctctcggcctctgccggagaaacaggatggcccaatggaatcagctacagcagcttgacacacggtacctggagcagctccatcagctctacagtgacagcttcccaatggagctgcggcagtttctggccccttggattgagagtcaagattgggcatatgcggccagcaaagaatcacatgccactttggtgtttcataatctcctgggagagattgaccagcagtatagccgcttcctgcaagagtcgaatgttctctatcagcacaatctacgaagaatcaagcagtttcttcagagcaggtatcttgagaagccaatggagattgcccggattgtggcccggtgcctgtgggaagaatcacgccttctacagactgcagccactgcggcccagcaagggggccaggccaaccaccccacagcagccgtggtgacggagaagcagcagatgctggagcagcaccttcaggatgtccggaagagagtgcaggatctagaacagaaaatgaaagtggtagagaatctccaggatgactttgatttcaactataaaaccctcaagagtcaaggagacatgcaagatctgaatggaaacaaccagtcagtgaccaggcagaagatgcagcagctggaacagatgctcactgcgctggaccagatgcggagaagcatcgtgagtgagctggcggggcttttgtcagcgatggagtacgtgcagaaaactctcacggacgaggagctggctgactggaagaggcggcaacagattgcctgcattggaggcccgcccaacatctgcctagatcggctagaaaactggataacgtcattagcagaatctcaacttcagacccgtcaacaaattaagaaactggaggagttgcagcaaaaagtttcctacaaaggggaccccattgtacagcaccggccgatgctggaggagagaatcgtggagctgtttagaaacttaatgaaaagtgcctttgtggtggagcggcagccctgcatgcccatgcatcctgaccggcccctcgtcatcaagaccggcgtccagttcactactaaagtcaggttgctggtcaaattccctgagttgaattatcagcttaaaattaaagtgtgcattgacaaagactctggggacgttgcagctctcagaggatcccggaaatttaacattctgggcacaaacacaaaagtgatgaacatggaagaatccaacaacggcagcctctctgcagaattcaaacacttgaccctgagggagcagagatgtgggaatgggggccgagccaattgtgatgcttccctgattgtgactgaggagctgcacctgatcacctttgagaccgaggtgtatcaccaaggcctcaagattgacctagagacccactccttgccagttgtggtgatctccaacatctgtcagatgccaaatgcctgggcgtccatcctgtggtacaacatgctgaccaacaatcccaagaatgtaaacttttttaccaagcccccaattggaacctgggatcaagtggccgaggtcctgagctggcagttctcctccaccaccaagcgaggactgagcatcgagcagctgactacactggcagagaaactcttgggacctggtgtgaattattcagggtgtcagatcacatgggctaaattttgcaaagaaaacatggctggcaagggcttctccttctgggtctggctggacaatatcattgaccttgtgaaaaagtacatcctggccctttggaacgaagggtacatcatgggctttatcagtaaggagcgggagcgggccatcttgagcactaagcctccaggcaccttcctgctaagattcagtgaaagcagcaaagaaggaggcgtcactttcacttgggtggagaaggacatcagcggtaagacccagatccagtccgtggaaccatacacaaagcagcagctgaacaacatgtcatttgctgaaatcatcatgggctataagatcatggatgctaccaatatcctggtgtctccactggtctatctctatcctgacattcccaaggaggaggcattcggaaagtattgtcggccagagagccaggagcatcctgaagctgacccaggtagttgttgattttccatgttcctggcatttaatttttgggaaaagttggaaattttgggatccttggaggatagataggcaaatgcctgaataacctgggggataattatttctccttatgggaaagaattgtagtgagtgcttttgttggggtgaccgatgggatttgagaggagaatcagaatcacttagagtagtgtagttcctgctccacagagagtgcatgagtctaaagaggggatacagcctgggcaatatggtgaaacctcgtctctacaaaaaatccaaaaaaattacccggtgtggtggcacgcatttgtagtcgtagctacttgggaggctgaggtgggaggatcacctgagccaaggagttcaaggctgtagtgagcggtgatcatgccaccgcactccagcctggctgatagagtgagatactgtgtcaaaaaataaaaataaagaggggatcaatacacatacgtcccccaaaacatgcctgaaacacgagaagggaaagtgagggcagttaacaggatgccctgctggcacagtgcttcttagtagatgctagaaggtttgaggcccagatttcagcccagcatatggctttttgcctgtaactgaaccatgtcagtgtgccagatggtctgaagaaagggtttctggaggaaattattattagctgcatgggagtatggtttacactagagtagaagagctgggagcatcacgtttgaaggggaagacagtgactgggtggaggggcaagggattagtatttagagtgtgcaactattgaaaataaggtatattttaatgtgtaagaggacatgtacttatatgttatatataaattaaagtgctgggattataggtgtgagccacagtgcccagccttgtttttgtttttgttttgttttgacagtctaatcacttgaaccctggaggcagaggttgtagagagccaagatggcgctactgcactccaacctgggcgaaagagagcaagactccgtctcaaaaaaaaaaaagacaaaaattagccaggcatggtggtgccacctgtagtcccagctgcttgggagcctaaggcaggagaatcgttttgacctgggagtaggaggttgcggtaaccgagattgtgccactgcacttgagcctgggcaacagagtgagactctgtctcaaaacaataagaacaacagcaacaaaagagagagaccatgccttgctccaggtctcttagctattgaagatgtacctggacccaggtctccggtcttctagttgaagcaattgtactgccttacaaagtcacattctctttggtgctttttgattgacgtatttatccaactagaaagttactcatgccctcatccaaaaatgtggtagaggccagattagtgctggtaggaataagagatataacctttggctttggaaccacaagcattagcagtctccatgttctttaaagacttggtgatattggtatttaggctggacaccatgcaaagactacacaggctcggttcctgcatgcagagaagttatctaagagatatgaccaggccggaatagaatgctcagaccacgtggaggctgttaaacttttacataatctagggaaagaagggacacaaggtggcattagtctagggtcaggtgggaaaaggttatgctgaaaagtctctgcagctcaggacagctttgtgcaaagaactgaagttcacagctgctagtgcctgggagatcaaatagtataaatgagggcagacaaccctgaggggcagatggagctttccagacaatcttggcatgaggatgagtgagtttcaaatcagtcctgccgaggcagatggcttcctccagctctgcttactgaatgcgaagtcacagtcagtaagaaaactggttttcttcttcccaggcgctgccccatacctgaagaccaagtttatctgtgtgacaccaacgacctgcagcaataccattgacctgccgatgtccccccgcactttagattcattgatgcagtttggaaataatggtgaaggtgctgaaccctcagcaggagggcagtttgagtccctcacctttgacatggagttgacctcggagtgcgctacctcccccatgtgaggagctgagaacggaagctgcagaaagatacgactgaggcgcctacctgcattctgccacccctcacacagccaaaccccagatcatctgaaactactaactttgtggttccagattttttttaatctcctacttctgctatctttgagcaatctgggcacttttaaaaatagagaaatgagtgaatgtgggtgatctgcttttatctaaatgcaaataaggatgtgttctctgagacccatgatcaggggatgtggcggggggtggctagagggagaaaaaggaaatgtcttgtgttgttttgttcccctgccctcctttctcagcagctttttgttattgttgttgttgttcttagacaagtgcctcctggtgcctgcggcatccttctgcctgtttctgtaagcaaatgccacaggccacctatagctacatactcctggcattgcactttttaaccttgctgacatccaaatagaagataggactatctaagccctaggtttctttttaaattaagaaataataacaattaaagggcaaaaaacactgtatcagcatagcctttctgtatttaagaaacttaagcagccgggcatggtggctcacgcctgtaatcccagcactttgggaggccgaggcggatcataaggtcaggagatcaagaccatcctggctaacacggtgaaaccccgtctctactaaaagtacaaaaaattagctgggtgtggtggtgggcgcctgtagtcccagctactcgggaggctgaggcaggagaatcgcttgaacctgagaggcggaggttgcagtgagccaaaattgcaccactgcacactgcactccatcctgggcgacagtctgagactctgtctcaaaaaaaaaaaaaaaaaaaagaaacttcagttaacagcctccttggtgctttaagcattcagcttccttcaggctggtaatttatataatccctgaaacgggcttcaggtcaaacccttaagacatctgaagctgcaacctggcctttggtgttgaaataggaaggtttaaggagaatctaagcattttagacttttttttataaatagacttattttcctttgtaatgtattggccttttagtgagtaaggctgggcagagggtgcttacaaccttgactccctttctccctggacttgatctgctgtttca

SEQ ID NO: 295099 - DNA, 3161 bp, Homo sapiens
ttccctcaggtcaaggagttttttcttccttcgcagacatgcaagatctgaatggaaacaaccagtcagtgaccaggcagaagatgcagcagctggaacagatgctcactgcgctggaccagatgcggagagtaagggcataggtcggaccacttcccccatgtgtctcgctcacttgcgggatttcagcgtcttgtggcagaacttgcttggtttctaagaagttcctgctctggagttgactaaagaatgtggttagagacagtctgaggaaatgttttctgactttgttttggtttccaaccagagcatcgtgagtgagctggcggggcttttgtcagcgatggagtacgtgcagaaaactctcacggacgaggagctggctgactggaagaggcggcaacagattgcctgcattggaggcccgcccaacatctgcctagatcggctagaaaactggataacgtcattagcagaatctcaacttcagacccgtcaacaaattaagaaactggaggagttgcagcaaaaagtttcctacaaaggggaccccattgtacagcaccggccgatgctggaggagagaatcgtggagctgtttagaaacttaatgaaaagtgcctttgtggtggagcggcagccctgcatgcccatgcatcctgaccggcccctcgtcatcaagaccggcgtccagttcactactaaagtcaggttgctggtcaaattccctgagttgaattatcagcttaaaattaaagtgtgcattgacaaagactctggggacgttgcagctctcagaggatcccggaaatttaacattctgggcacaaacacaaaagtgatgaacatggaagaatccaacaacggcagcctctctgcagaattcaaacacttgaccctgagggagcagagatgtgggaatgggggccgagccaattgtgatgcttccctgattgtgactgaggagctgcacctgatcacctttgagaccgaggtgtatcaccaaggcctcaagattgacctagagacccactccttgccagttgtggtgatctccaacatctgtcagatgccaaatgcctgggcgtccatcctgtggtacaacatgctgaccaacaatcccaagaatgtaaacttttttaccaagcccccaattggaacctgggatcaagtggccgaggtcctgagctggcagttctcctccaccaccaagcgaggactgagcatcgagcagctgactacactggcagagaaactcttgggacctggtgtgaattattcagggtgtcagatcacatgggctaaattttgcaaagaaaacatggctggcaagggcttctccttctgggtctggctggacaatatcattgaccttgtgaaaaagtacatcctggccctttggaacgaagggtacatcatgggctttatcagtaaggagcgggagcgggccatcttgagcactaagcctccaggcaccttcctgctaagattcagtgaaagcagcaaagaaggaggcgtcactttcacttgggtggagaaggacatcagcggtaagacccagatccagtccgtggaaccatacacaaagcagcagctgaacaacatgtcatttgctgaaatcatcatgggctataagatcatggatgctaccaatatcctggtgtctccactggtctatctctatcctgacattcccaaggaggaggcattcggaaagtattgtcggccagagagccaggagcatcctgaagctgacccaggtagcgctgccccatacctgaagaccaagtttatctgtgtgacaccaacgacctgcagcaataccattgacctgccgatgtccccccgcactttagattcattgatgcagtttggaaataatggtgaaggtgctgaaccctcagcaggagggcagtttgagtccctcacctttgacatggagttgacctcggagtgcgctacctcccccatgtgaggagctgagaacggaagctgcagaaagatacgactgaggcgcctacctgcattctgccacccctcacacagccaaaccccagatcatctgaaactactaactttgtggttccagattttttttaatctcctacttctgctatctttgagcaatctgggcacttttaaaaatagagaaatgagtgaatgtgggtgatctgcttttatctaaatgcaaataaggatgtgttctctgagacccatgatcaggggatgtggcggggggtggctagagggagaaaaaggaaatgtcttgtgttgttttgttcccctgccctcctttctcagcagctttttgttattgttgttgttgttcttagacaagtgcctcctggtgcctgcggcatccttctgcctgtttctgtaagcaaatgccacaggccacctatagctacatactcctggcattgcactttttaaccttgctgacatccaaatagaagataggactatctaagccctaggtttctttttaaattaagaaataataacaattaaagggcaaaaaacactgtatcagcatagcctttctgtatttaagaaacttaagcagccgggcatggtggctcacgcctgtaatcccagcactttgggaggccgaggcggatcataaggtcaggagatcaagaccatcctggctaacacggtgaaaccccgtctctactaaaagtacaaaaaattagctgggtgtggtggtgggcgcctgtagtcccagctactcgggaggctgaggcaggagaatcgcttgaacctgagaggcggaggttgcagtgagccaaaattgcaccactgcacactgcactccatcctgggcgacagtctgagactctgtctcaaaaaaaaaaaaaaaaaaaagaaacttcagttaacagcctccttggtgctttaagcattcagcttccttcaggctggtaatttatataatccctgaaacgggcttcaggtcaaacccttaagacatctgaagctgcaacctggcctttggtgttgaaataggaaggtttaaggagaatctaagcattttagacttttttttataaatagacttattttcctttgtaatgtattggccttttagtgagtaaggctgggcagagggtgcttacaaccttgactccctttctccctggacttgatctgctgtttca

SEQ ID NO: 295100 - DNA, 3677 bp, Homo sapiens
gtaattcagcggtttccggagctgcggcggcgcagactgggagggggagccgggggttccgacgtcgcagccgagggaacaagccccaaccggatcctggacaggcaccccggcttggcgctgtctctccccctcggctcggagaggcccttcggcctgagggagcctcgccgcccgtccccggcacacgcgcagccccggcctctcggcctctgccggagaaacaggatggcccaatggaatcagctacagcagcttgacacacggtacctggagcagctccatcagctctacagtgacagcttcccaatggagctgcggcagtttctggccccttggattgagagtcaagattgggcatatgcggccagcaaagaatcacatgccactttggtgtttcataatctcctgggagagattgaccagcagtatagccgcttcctgcaagagtcgaatgttctctatcagcacaatctacgaagaatcaagcagtttcttcagagcaggtatcttgagaagccaatggagattgcccggattgtggcccggtgcctgtgggaagaatcacgccttctacagactgcagccactgcggcccagcaagggggccaggccaaccaccccacagcagccgtggtgacggagaagcagcagatgctggagcagcaccttcaggatgtccggaagagagtgcaggatctagaacagaaaatgaaagtggtagagaatctccaggatgactttgatttcaactataaaaccctcaagagtcaaggagacatgcaagatctgaatggaaacaaccagtcagtgaccaggcagaagatgcagcagctggaacagatgctcactgcgctggaccagatgcggagaagcatcgtgagtgagctggcggggcttttgtcagcgatggagtacgtgcagaaaactctcacggacgaggagctggctgactggaagaggcggcaacagattgcctgcattggaggcccgcccaacatctgcctagatcggctagaaaactggataacgtcattagcagaatctcaacttcagacccgtcaacaaattaagaaactggaggagttgcagcaaaaagtttcctacaaaggggaccccattgtacagcaccggccgatgctggaggagagaatcgtggagctgtttagaaacttaatgaaaagtgcctttgtggtggagcggcagccctgcatgcccatgcatcctgaccggcccctcgtcatcaagaccggcgtccagttcactactaaagtcaggttgctggtcaaattccctgagttgaattatcagcttaaaattaaagtgtgcattgacaaagactctggggacgttgcagctctcagaggatcccggaaatttaacattctgggcacaaacacaaaagtgatgaacatggaagaatccaacaacggcagcctctctgcagaattcaaacacttgaccctgagggagcagagatgtgggaatgggggccgagccaattgtgatgcttccctgattgtgactgaggagctgcacctgatcacctttgagaccgaggtgtatcaccaaggcctcaagattgacctagagacccactccttgccagttgtggtgatctccaacatctgtcagatgccaaatgcctgggcgtccatcctgtggtacaacatgctgaccaacaatcccaagaatgtaaacttttttaccaagcccccaattggaacctgggatcaagtggccgaggtcctgagctggcagttctcctccaccaccaagcgaggactgagcatcgagcagctgactacactggcagagaaactcttgggacctggtgtgaattattcagggtgtcagatcacatgggctaaattttgcaaagaaaacatggctggcaagggcttctccttctgggtctggctggacaatatcattgaccttgtgaaaaagtacatcctggccctttggaacgaagggtacatcatgggctttatcagtaaggagcgggagcgggccatcttgagcactaagcctccaggcaccttcctgctaagattcagtgaaagcagcaaagaaggaggcgtcactttcacttgggtggagaaggacatcagcggtaagacccagatccagtccgtggaaccatacacaaagcagcagctgaacaacatgtcatttgctgaaatcatcatgggctataagatcatggatgctaccaatatcctggtgtctccactggtctatctctatcctgacattcccaaggaggaggcattcggaaagtattgtcggccagagagccaggagcatcctgaagctgacccaggtagcgctgccccatacctgaagaccaagtttatctgtgtgacaccattcattgatgcagtttggaaataatggtgaaggtgctgaaccctcagcaggagggcagtttgagtccctcacctttgacatggagttgacctcggagtgcgctacctcccccatgtgaggagctgagaacggaagctgcagaaagatacgactgaggcgcctacctgcattctgccacccctcacacagccaaaccccagatcatctgaaactactaactttgtggttccagattttttttaatctcctacttctgctatctttgagcaatctgggcacttttaaaaatagagaaatgagtgaatgtgggtgatctgcttttatctaaatgcaaataaggatgtgttctctgagacccatgatcaggggatgtggcggggggtggctagagggagaaaaaggaaatgtcttgtgttgttttgttcccctgccctcctttctcagcagctttttgttattgttgttgttgttcttagacaagtgcctcctggtgcctgcggcatccttctgcctgtttctgtaagcaaatgccacaggccacctatagctacatactcctggcattgcactttttaaccttgctgacatccaaatagaagataggactatctaagccctaggtttctttttaaattaagaaataataacaattaaagggcaaaaaacactgtatcagcatagcctttctgtatttaagaaacttaagcagccgggcatggtggctcacgcctgtaatcccagcactttgggaggccgaggcggatcataaggtcaggagatcaagaccatcctggctaacacggtgaaaccccgtctctactaaaagtacaaaaaattagctgggtgtggtggtgggcgcctgtagtcccagctactcgggaggctgaggcaggagaatcgcttgaacctgagaggcggaggttgcagtgagccaaaattgcaccactgcacactgcactccatcctgggcgacagtctgagactctgtctcaaaaaaaaaaaaaaaaaaaagaaacttcagttaacagcctccttggtgctttaagcattcagcttccttcaggctggtaatttatataatccctgaaacgggcttcaggtcaaacccttaagacatctgaagctgcaacctggcctttggtgttgaaataggaaggtttaaggagaatctaagcattttagacttttttttataaatagacttattttcctttgtaatgtattggccttttagtgagtaaggctgggcagagggtgcttacaaccttgactccctttctccctggacttgatctgctgtttca

SEQ ID NO: 295101 - DNA, 5606 bp, Homo sapiens
gtaattcagcggtttccggagctgcggcggcgcagactgggagggggagccgggggttccgacgtcgcagccgagggaacaagccccaaccggatcctggacaggcaccccggcttggcgctgtctctccccctcggctcggagaggcccttcggcctgagggagcctcgccgcccgtccccggcacacgcgcagccccggcctctcggcctctgccggagaaacaggatggcccaatggaatcagctacagcagcttgacacacggtacctggagcagctccatcagctctacagtgacagcttcccaatggagctgcggcagtttctggccccttggattgagagtcaagattgggcatatgcggccagcaaagaatcacatgccactttggtgtttcataatctcctgggagagattgaccagcagtatagccgcttcctgcaagagtcgaatgttctctatcagcacaatctacgaagaatcaagcagtttcttcagagcaggtatcttgagaagccaatggagattgcccggattgtggcccggtgcctgtgggaagaatcacgccttctacagactgcagccactgcggcccagcaagggggccaggccaaccaccccacagcagccgtggtgacggagaagcagcagatgctggagcagcaccttcaggatgtccggaagagagtgcaggatctagaacagaaaatgaaagtggtagagaatctccaggatgactttgatttcaactataaaaccctcaagagtcaaggagacatgcaagatctgaatggaaacaaccagtcagtgaccaggcagaagatgcagcagctggaacagatgctcactgcgctggaccagatgcggagaagcatcgtgagtgagctggcggggcttttgtcagcgatggagtacgtgcagaaaactctcacggacgaggagctggctgactggaagaggcggcaacagattgcctgcattggaggcccgcccaacatctgcctagatcggctagaaaactggataacgtcattagcagaatctcaacttcagacccgtcaacaaattaagaaactggaggagttgcagcaaaaagtttcctacaaaggggaccccattgtacagcaccggccgatgctggaggagagaatcgtggagctgtttagaaacttaatgaaaagtgcctttgtggtggagcggcagccctgcatgcccatgcatcctgaccggcccctcgtcatcaagaccggcgtccagttcactactaaagtcaggttgctggtcaaattccctgagttgaattatcagcttaaaattaaagtgtgcattgacaaagactctggggacgttgcagctctcagaggatcccggaaatttaacattctgggcacaaacacaaaagtgatgaacatggaagaatccaacaacggcagcctctctgcagaattcaaacacttgaccctgagggagcagagatgtgggaatgggggccgagccaattgtgatgcttccctgattgtgactgaggagctgcacctgatcacctttgagaccgaggtgtatcaccaaggcctcaagattgacctagagacccactccttgccagttgtggtgatctccaacatctgtcagatgccaaatgcctgggcgtccatcctgtggtacaacatgctgaccaacaatcccaagaatgtaaacttttttaccaagcccccaattggaacctgggatcaagtggccgaggtcctgagctggcagttctcctccaccaccaagcgaggactgagcatcgagcagctgactacactggcagagaaactcttgggacctggtgtgaattattcagggtgtcagatcacatgggctaaattttgcaaagaaaacatggctggcaagggcttctccttctgggtctggctggacaatatcattgaccttgtgaaaaagtacatcctggccctttggaacgaagggtacatcatgggctttatcagtaaggagcgggagcgggccatcttgagcactaagcctccaggcaccttcctgctaagattcagtgaaagcagcaaagaaggaggcgtcactttcacttgggtggagaaggacatcagcggtaagacccagatccagtccgtggaaccatacacaaagcagcagctgaacaacatgtcatttgctgaaatcatcatgggctataagatcatggatgctaccaatatcctggtgtctccactggtctatctctatcctgacattcccaaggaggaggcattcggaaagtattgtcggccagagagccaggagcatcctgaagctgacccaggtagttgttgattttccatgttcctggcatttaatttttgggaaaagttggaaattttgggatccttggaggatagataggcaaatgcctgaataacctgggggataattatttctccttatgggaaagaattgtagtgagtgcttttgttggggtgaccgatgggatttgagaggagaatcagaatcacttagagtagtgtagttcctgctccacagagagtgcatgagtctaaagaggggatacagcctgggcaatatggtgaaacctcgtctctacaaaaaatccaaaaaaattacccggtgtggtggcacgcatttgtagtcgtagctacttgggaggctgaggtgggaggatcacctgagccaaggagttcaaggctgtagtgagcggtgatcatgccaccgcactccagcctggctgatagagtgagatactgtgtcaaaaaataaaaataaagaggggatcaatacacatacgtcccccaaaacatgcctgaaacacgagaagggaaagtgagggcagttaacaggatgccctgctggcacagtgcttcttagtagatgctagaaggtttgaggcccagatttcagcccagcatatggctttttgcctgtaactgaaccatgtcagtgtgccagatggtctgaagaaagggtttctggaggaaattattattagctgcatgggagtatggtttacactagagtagaagagctgggagcatcacgtttgaaggggaagacagtgactgggtggaggggcaagggattagtatttagagtgtgcaactattgaaaataaggtatattttaatgtgtaagaggacatgtacttatatgttatatataaattaaagtgctgggattataggtgtgagccacagtgcccagccttgtttttgtttttgttttgttttgacagtctaatcacttgaaccctggaggcagaggttgtagagagccaagatggcgctactgcactccaacctgggcgaaagagagcaagactccgtctcaaaaaaaaaaaagacaaaaattagccaggcatggtggtgccacctgtagtcccagctgcttgggagcctaaggcaggagaatcgttttgacctgggagtaggaggttgcggtaaccgagattgtgccactgcacttgagcctgggcaacagagtgagactctgtctcaaaacaataagaacaacagcaacaaaagagagagaccatgccttgctccaggtctcttagctattgaagatgtacctggacccaggtctccggtcttctagttgaagcaattgtactgccttacaaagtcacattctctttggtgctttttgattgacgtatttatccaactagaaagttactcatgccctcatccaaaaatgtggtagaggccagattagtgctggtaggaataagagatataacctttggctttggaaccacaagcattagcagtctccatgttctttaaagacttggtgatattggtatttaggctggacaccatgcaaagactacacaggctcggttcctgcatgcagagaagttatctaagagatatgaccaggccggaatagaatgctcagaccacgtggaggctgttaaacttttacataatctagggaaagaagggacacaaggtggcattagtctagggtcaggtgggaaaaggttatgctgaaaagtctctgcagctcaggacagctttgtgcaaagaactgaagttcacagctgctagtgcctgggagatcaaatagtataaatgagggcagacaaccctgaggggcagatggagctttccagacaatcttggcatgaggatgagtgagtttcaaatcagtcctgccgaggcagatggcttcctccagctctgcttactgaatgcgaagtcacagtcagtaagaaaactggttttcttcttcccaggcgctgccccatacctgaagaccaagtttatctgtgtgacaccattcattgatgcagtttggaaataatggtgaaggtgctgaaccctcagcaggagggcagtttgagtccctcacctttgacatggagttgacctcggagtgcgctacctcccccatgtgaggagctgagaacggaagctgcagaaagatacgactgaggcgcctacctgcattctgccacccctcacacagccaaaccccagatcatctgaaactactaactttgtggttccagattttttttaatctcctacttctgctatctttgagcaatctgggcacttttaaaaatagagaaatgagtgaatgtgggtgatctgcttttatctaaatgcaaataaggatgtgttctctgagacccatgatcaggggatgtggcggggggtggctagagggagaaaaaggaaatgtcttgtgttgttttgttcccctgccctcctttctcagcagctttttgttattgttgttgttgttcttagacaagtgcctcctggtgcctgcggcatccttctgcctgtttctgtaagcaaatgccacaggccacctatagctacatactcctggcattgcactttttaaccttgctgacatccaaatagaagataggactatctaagccctaggtttctttttaaattaagaaataataacaattaaagggcaaaaaacactgtatcagcatagcctttctgtatttaagaaacttaagcagccgggcatggtggctcacgcctgtaatcccagcactttgggaggccgaggcggatcataaggtcaggagatcaagaccatcctggctaacacggtgaaaccccgtctctactaaaagtacaaaaaattagctgggtgtggtggtgggcgcctgtagtcccagctactcgggaggctgaggcaggagaatcgcttgaacctgagaggcggaggttgcagtgagccaaaattgcaccactgcacactgcactccatcctgggcgacagtctgagactctgtctcaaaaaaaaaaaaaaaaaaaagaaacttcagttaacagcctccttggtgctttaagcattcagcttccttcaggctggtaatttatataatccctgaaacgggcttcaggtcaaacccttaagacatctgaagctgcaacctggcctttggtgttgaaataggaaggtttaaggagaatctaagcattttagacttttttttataaatagacttattttcctttgtaatgtattggccttttagtgagtaaggctgggcagagggtgcttacaaccttgactccctttctccctggacttgatctgctgtttca

SEQ ID NO: 295102 - DNA, 1978 bp, Homo sapiens
ccaaaggatccccgctcgtgcagatatcagcgaggactgagcatcgagcagctgactacactggcagagaaactcttgggacctggtgtgaattattcagggtgtcagatcacatgggctaaattttgcaaagaaaacatggctggcaagggcttctccttctgggtctggctggacaatatcattgaccttgtgaaaaagtacatcctggccctttggaacgaagggtacatcatgggctttatcagtaaggagcgggagcgggccatcttgagcactaagcctccaggcaccttcctgctaagattcagtgaaagcagcaaagaaggaggcgtcactttcacttgggtggagaaggacatcagcggtaagacccagatccagtccgtggaaccatacacaaagcagcagctgaacaacatgtcatttgctgaaatcatcatgggctataagatcatggatgctaccaatatcctggtgtctccactggtctatctctatcctgacattcccaaggaggaggcattcggaaagtattgtcggccagagagccaggagcatcctgaagctgacccaggtagcgctgccccatacctgaagaccaagtttatctgtgtgacaccaacgacctgcagcaataccattgacctgccgatgtccccccgcactttagattcattgatgcagtttggaaataatggtgaaggtgctgaaccctcagcaggagggcagtttgagtccctcacctttgacatggagttgacctcggagtgcgctacctcccccatgtgaggagctgagaacggaagctgcagaaagatacgactgaggcgcctacctgcattctgccacccctcacacagccaaaccccagatcatctgaaactactaactttgtggttccagattttttttaatctcctacttctgctatctttgagcaatctgggcacttttaaaaatagagaaatgagtgaatgtgggtgatctgcttttatctaaatgcaaataaggatgtgttctctgagacccatgatcaggggatgtggcggggggtggctagagggagaaaaaggaaatgtcttgtgttgttttgttcccctgccctcctttctcagcagctttttgttattgttgttgttgttcttagacaagtgcctcctggtgcctgcggcatccttctgcctgtttctgtaagcaaatgccacaggccacctatagctacatactcctggcattgcactttttaaccttgctgacatccaaatagaagataggactatctaagccctaggtttctttttaaattaagaaataataacaattaaagggcaaaaaacactgtatcagcatagcctttctgtatttaagaaacttaagcagccgggcatggtggctcacgcctgtaatcccagcactttgggaggccgaggcggatcataaggtcaggagatcaagaccatcctggctaacacggtgaaaccccgtctctactaaaagtacaaaaaattagctgggtgtggtggtgggcgcctgtagtcccagctactcgggaggctgaggcaggagaatcgcttgaacctgagaggcggaggttgcagtgagccaaaattgcaccactgcacactgcactccatcctgggcgacagtctgagactctgtctcaaaaaaaaaaaaaaaaaaaagaaacttcagttaacagcctccttggtgctttaagcattcagcttccttcaggctggtaatttatataatccctgaaacgggcttcaggtcaaacccttaagacatctgaagctgcaacctggcctttggtgttgaaataggaaggtttaaggagaatctaagcattttagacttttttttataaatagacttattttcctttgtaatgtattggccttttagtgagtaaggctgggcagagggtgcttacaaccttgactccctttctccctggacttgatctgctgtttca

SEQ ID NO: 295103 - DNA, 1984 bp, Homo sapiens
  misc_feature (8)..(8): n is a, c, g, or t
  misc_feature (32)..(33): n is a, c, g, or t
  misc_feature (35)..(35): n is a, c, g, or t
aacacctnggctaggtacgaggctgggtgttnnantcggccgagggagcatcgagcagctgactacactggcagagaaactctgggacctggtgtgaattattcagggtgtcagatcacatgggctaaattttgcaaagaaaacatggctggcaagggcttctccttctgggtctggctggacaatatcattgaccttgtgaaaaagtacatcctggccctttggaacgaagggtacatcatgggctttatcagtaaggagcgggagcgggccatcttgagcactaagcctccaggcaccttcctgctaagattcagtgaaagcagcaaagaaggaggcgtcactttcacttgggtggagaaggacatcagcggtaagacccagatccagtccgtggaaccatacacaaagcagcagctgaacaacatgtcatttgctgaaatcatcatgggctataagatcatggatgctaccaatatcctggtgtctccactggtctatctctatcctgacattcccaaggaggaggcattcggaaagtattgtcggccagagagccaggagcatcctgaagctgacccaggtagcgctgccccatacctgaagaccaagtttatctgtgtgacaccaacgacctgcagcaataccattgacctgccgatgtccccccgcactttagattcattgatgcagtttggaaataatggtgaaggtgctgaaccctcagcaggagggcagtttgagtccctcacctttgacatggagttgacctcggagtgcgctacctcccccatgtgaggagctgagaacggaagctgcagaaagatacgactgaggcgcctacctgcattctgccacccctcacacagccaaaccccagatcatctgaaactactaactttgtggttccagattttttttaatctcctacttctgctatctttgagcaatctgggcacttttaaaaatagagaaatgagtgaatgtgggtgatctgcttttatctaaatgcaaataaggatgtgttctctgagacccatgatcaggggatgtggcggggggtggctagagggagaaaaaggaaatgtcttgtgttgttttgttcccctgccctcctttctcagcagctttttgttattgttgttgttgttcttagacaagtgcctcctggtgcctgcggcatccttctgcctgtttctgtaagcaaatgccacaggccacctatagctacatactcctggcattgcactttttaaccttgctgacatccaaatagaagataggactatctaagccctaggtttctttttaaattaagaaataataacaattaaagggcaaaaaacactgtatcagcatagcctttctgtatttaagaaacttaagcagccgggcatggtggctcacgcctgtaatcccagcactttgggaggccgaggcggatcataaggtcaggagatcaagaccatcctggctaacacggtgaaaccccgtctctactaaaagtacaaaaaattagctgggtgtggtggtgggcgcctgtagtcccagctactcgggaggctgaggcaggagaatcgcttgaacctgagaggcggaggttgcagtgagccaaaattgcaccactgcacactgcactccatcctgggcgacagtctgagactctgtctcaaaaaaaaaaaaaaaaaaaagaaacttcagttaacagcctccttggtgctttaagcattcagcttccttcaggctggtaatttatataatccctgaaacgggcttcaggtcaaacccttaagacatctgaagctgcaacctggcctttggtgttgaaataggaaggtttaaggagaatctaagcattttagacttttttttataaatagacttattttcctttgtaatgtattggccttttagtgagtaaggctgggcagagggtgcttacaaccttgactccctttctccctggacttgatctgctgtttca

SEQ ID NO: 295104 - DNA, 2675 bp, Homo sapiens
gtaattcagcggtttccggagctgcggcggcgcagactgggagggggagccgggggttccgacgtcgcagccgagggaacaagccccaaccggatcctggacaggcaccccggcttggcgctgtctctccccctcggctcggagaggcccttcggcctgagggagcctcgccgcccgtccccggcacacgcgcagccccggcctctcggcctctgccggagaaacaggatggcccaatggaatcagctacagcagcttgacacacggtacctggagcagctccatcagctctacagtgacagcttcccaatggagctgcggcagtttctggccccttggattgagagtcaagattgggcatatgcggccagcaaagaatcacatgccactttggtgtttcataatctcctgggagagattgaccagcagtatagccgcttcctgcaagagtcgaatgttctctatcagcacaatctacgaagaatcaagcagtttcttcagagcaggtatcttgagaagccaatggagattgcccggattgtggcccggtgcctgtgggaagaatcacgccttctacagactgcagccactgcggcccagcaagggggccaggccaaccaccccacagcagccgtggtgacggagaagcagcagatgctggagcagcaccttcaggatgtccggaagagagtgcaggatctagaacagaaaatgaaagtggtagagaatctccaggatgactttgatttcaactataaaaccctcaagagtcaaggagacatgcaagatctgaatggaaacaaccagtcagtgaccaggcagaagatgcagcagctggaacagatgctcactgcgctggaccagatgcggagaagcatcgtgagtgagctggcggggcttttgtcagcgatggagtacgtgcagaaaactctcacggacgaggagctggctgactggaagaggcggcaacagattgcctgcattggaggcccgcccaacatctgcctagatcggctagaaaactggataacgtcattagcagaatctcaacttcagacccgtcaacaaattaagaaactggaggagttgcagcaaaaagtttcctacaaaggggaccccattgtacagcaccggccgatgctggaggagagaatcgtggagctgtttagaaacttaatgaaaagtgcctttgtggtggagcggcagccctgcatgcccatgcatcctgaccggcccctcgtcatcaagaccggcgtccagttcactactaaagtcaggttgctggtcaaattccctgagttgaattatcagcttaaaattaaagtgtgcattgacaaagactctggggacgttgcagctctcagaggatcccggaaatttaacattctgggcacaaacacaaaagtgatgaacatggaagaatccaacaacggcagcctctctgcagaattcaaacacttgaccctgagggagcagagatgtgggaatgggggccgagccaattgtgatgcttccctgattgtgactgaggagctgcacctgatcacctttgagaccgaggtgtatcaccaaggcctcaagattgacctagagacccactccttgccagttgtggtgatctccaacatctgtcagatgccaaatgcctgggcgtccatcctgtggtacaacatgctgaccaacaatcccaagaatgtaaacttttttaccaagcccccaattggaacctgggatcaagtggccgaggtcctgagctggcagttctcctccaccaccaagcgaggactgagcatcgagcagctgactacactggcagagaaactcttgggacctggtgtgaattattcagggtgtcagatcacatgggctaaattttgcaaagaaaacatggctggcaagggcttctccttctgggtctggctggacaatatcattgaccttgtgaaaaagtacatcctggccctttggaacgaagggtacatcatgggctttatcagtaaggagcgggagcgggccatcttgagcactaagcctccaggcaccttcctgctaagattcagtgaaagcagcaaagaaggaggcgtcactttcacttgggtggagaaggacatcagcggtaagacccagatccagtccgtggaaccatacacaaagcagcagctgaacaacatgtcatttgctgaaatcatcatgggctataagatcatggatgctaccaatatcctggtgtctccactggtctatctctatcctgacattcccaaggaggaggcattcggaaagtattgtcggccagagagccaggagcatcctgaagctgacccaggtagcgctgccccatacctgaagaccaagtttatctgtgtgacaccattcattgatgcagtttggaaataatggtgaaggtgctgaaccctcagcaggagggcagtttgagtccctcacctttgacatggagttgacctcggagtgcgctacctcccccatgtgaggagctgagaacggaagctgcagaaagatacgactgaggcgcctacctgcattctgccacccctcacacagccaaaccccagatcatctgaaactactaactttgtggttccagattttttttaatctcctacttctgctatctttgagcaatctgggcacttttaaaaatagagaaatgagtg

SEQ ID NO: 295105 - DNA, 2433 bp, Homo sapiens
acgacccagacaggtggtgctttcctatagtccctcttggaaaactgaggtgagaggatttcttgagcccaggagttcaagcccagcctgggcaacatagcaagacctccctgccccaatctgtacaaacagattttttaaaatagctggcatggtggtgccacctgtagtcccagctgcttgggagcctaaggcaggagaatcgttttgacctgggagtaggaggttgcggtaaccgagattgtgccactgcacttgagcctgggcaacagagtgagactctgtctcaaaacaataagaacaacagcaacaaaagagagagaccatgccttgctccaggtctcttagctattgaagatgtacctggacccaggtctccggtcttctagttgaagcaattgtactgccttacaaagtcacattctctttggtgctttttgattgacgtatttatccaactagaaagttactcatgccctcatccaaaaatgtggtagaggccagattagtgctggtaggaataagagatataacctttggctttggaaccacaagcattagcagtctccatgttctttaaagacttggtgatattggtatttaggctggacaccatgcaaagactacacaggctcggttcctgcatgcagagaagttatctaagagatatgaccaggccggaatagaatgctcagaccacgtggaggctgttaaacttttacataatctagggaaagaagggacacaaggtggcattagtctagggtcaggtgggaaaaggttatgctgaaaagtctctgcagctcaggacagctttgtgcaaagaactgaagttcacagctgctagtgcctgggagatcaaatagtataaatgagggcagacaaccctgaggggcagatggagctttccagacaatcttggcatgaggatgagtgagtttcaaatcagtcctgccgaggcagatggcttcctccagctctgcttactgaatgcgaagtcacagtcagtaagaaaactggttttcttcttcccaggcgctgccccatacctgaagaccaagtttatctgtgtgacaccaacgacctgcagcaataccattgacctgccgatgtccccccgcactttagattcattgatgcagtttggaaataatggtgaaggtgctgaaccctcagcaggagggcagtttgagtccctcacctttgacatggagttgacctcggagtgcgctacctcccccatgtgaggagctgagaacggaagctgcagaaagatacgactgaggcgcctacctgcattctgccacccctcacacagccaaaccccagatcatctgaaactactaactttgtggttccagattttttttaatctcctacttctgctatctttgagcaatctgggcacttttaaaaatagagaaatgagtgaatgtgggtgatctgcttttatctaaatgcaaataaggatgtgttctctgagacccatgatcaggggatgtggcggggggtggctagagggagaaaaaggaaatgtcttgtgttgttttgttcccctgccctcctttctcagcagctttttgttattgttgttgttgttcttagacaagtgcctcctggtgcctgcggcatccttctgcctgtttctgtaagcaaatgccacaggccacctatagctacatactcctggcattgcactttttaaccttgctgacatccaaatagaagataggactatctaagccctaggtttctttttaaattaagaaataataacaattaaagggcaaaaaacactgtatcagcatagcctttctgtatttaagaaacttaagcagccgggcatggtggctcacgcctgtaatcccagcactttgggaggccgaggcggatcataaggtcaggagatcaagaccatcctggctaacacggtgaaaccccgtctctactaaaagtacaaaaaattagctgggtgtggtggtgggcgcctgtagtcccagctactcgggaggctgaggcaggagaatcgcttgaacctgagaggcggaggttgcagtgagccaaaattgcaccactgcacactgcactccatcctgggcgacagtctgagactctgtctcaaaaaaaaaaaaaaaaaaaagaaacttcagttaacagcctccttggtgctttaagcattcagcttccttcaggctggtaatttatataatccctgaaacgggcttcaggtcaaacccttaagacatctgaagctgcaacctggcctttggtgttgaaataggaaggtttaaggagaatctaagcattttagacttttttttataaatagacttattttcctttgtaatgtattggccttttagtgagtaaggctgggcagagggtgcttacaaccttgactccctttctccctggacttgatctgctgtttca

SEQ ID NO: 295106 - DNA, 1540 bp, Homo sapiens
tggaagcccctgggctatgtttagtactcaaagtgaccttgtgtgtttaaaaagcttgagcttttatttttctgttggagaccagagtttgatggcttgtgtgtgtgtgttttgttcttttttttttttccattgtgtcttgtcaaccccccgtttcccctcctgctgccccccatttcctacagaacgacctgcagcaataccattgacctgccgatgtccccccgcactttagattcattgatgcagtttggaaataatggtgaaggtgctgaaccctcagcaggagggcagtttgagtccctcacctttgacatggagttgacctcggagtgcgctacctcccccatgtgaggagctgagaacggaagctgcagaaagatacgactgaggcgcctacctgcattctgccacccctcacacagccaaaccccagatcatctgaaactactaactttgtggttccagattttttttaatctcctacttctgctatctttgagcaatctgggcacttttaaaaatagagaaatgagtgaatgtgggtgatctgcttttatctaaatgcaaataaggatgtgttctctgagacccatgatcaggggatgtggcggggggtggctagagggagaaaaaggaaatgtcttgtgttgttttgttcccctgccctcctttctcagcagctttttgttattgttgttgttgttcttagacaagtgcctcctggtgcctgcggcatccttctgcctgtttctgtaagcaaatgccacaggccacctatagctacatactcctggcattgcactttttaaccttgctgacatccaaatagaagataggactatctaagccctaggtttctttttaaattaagaaataataacaattaaagggcaaaaaacactgtatcagcatagcctttctgtatttaagaaacttaagcagccgggcatggtggctcacgcctgtaatcccagcactttgggaggccgaggcggatcataaggtcaggagatcaagaccatcctggctaacacggtgaaaccccgtctctactaaaagtacaaaaaattagctgggtgtggtggtgggcgcctgtagtcccagctactcgggaggctgaggcaggagaatcgcttgaacctgagaggcggaggttgcagtgagccaaaattgcaccactgcacactgcactccatcctgggcgacagtctgagactctgtctcaaaaaaaaaaaaaaaaaaaagaaacttcagttaacagcctccttggtgctttaagcattcagcttccttcaggctggtaatttatataatccctgaaacgggcttcaggtcaaacccttaagacatctgaagctgcaacctggcctttggtgttgaaataggaaggtttaaggagaatctaagcattttagacttttttttataaatagacttattttcctttgtaatgtattggccttttagtgagtaaggctgggcagagggtgcttacaaccttgactccctttctccctggacttgatctgctgtttca

SEQ ID NO: 295107 - DNA, 1384 bp, Homo sapiens
atacggctgtacatctgtgtacacgttgaaacgacctgcagcaataccattgacctgccgatgtccccccgcactttagattcattgatgcagtttggaaataatggtgaaggtgctgaaccctcagcaggagggcagtttgagtccctcacctttgacatggagttgacctcggagtgcgctacctcccccatgtgaggagctgagaacggaagctgcagaaagatacgactgaggcgcctacctgcattctgccacccctcacacagccaaaccccagatcatctgaaactactaactttgtggttccagattttttttaatctcctacttctgctatctttgagcaatctgggcacttttaaaaatagagaaatgagtgaatgtgggtgatctgcttttatctaaatgcaaataaggatgtgttctctgagacccatgatcaggggatgtggcggggggtggctagagggagaaaaaggaaatgtcttgtgttgttttgttcccctgccctcctttctcagcagctttttgttattgttgttgttgttcttagacaagtgcctcctggtgcctgcggcatccttctgcctgtttctgtaagcaaatgccacaggccacctatagctacatactcctggcattgcactttttaaccttgctgacatccaaatagaagataggactatctaagccctaggtttctttttaaattaagaaataataacaattaaagggcaaaaaacactgtatcagcatagcctttctgtatttaagaaacttaagcagccgggcatggtggctcacgcctgtaatcccagcactttgggaggccgaggcggatcataaggtcaggagatcaagaccatcctggctaacacggtgaaaccccgtctctactaaaagtacaaaaaattagctgggtgtggtggtgggcgcctgtagtcccagctactcgggaggctgaggcaggagaatcgcttgaacctgagaggcggaggttgcagtgagccaaaattgcaccactgcacactgcactccatcctgggcgacagtctgagactctgtctcaaaaaaaaaaaaaaaaaaaagaaacttcagttaacagcctccttggtgctttaagcattcagcttccttcaggctggtaatttatataatccctgaaacgggcttcaggtcaaacccttaagacatctgaagctgcaacctggcctttggtgttgaaataggaaggtttaaggagaatctaagcattttagacttttttttataaatagacttattttcctttgtaatgtattggccttttagtgagtaaggctgggcagagggtgcttacaaccttgactccctttctccctggacttgatctgctgtttca

SEQ ID NO: 295108 - DNA, 1388 bp, Homo sapiens
gagctcggtacccgatctgactacgcggctaccaacgacctgcagcaataccattgacctgccgatgtccccccgcactttagattcattgatgcagtttggaaataatggtgaaggtgctgaaccctcagcaggagggcagtttgagtccctcacctttgacatggagttgacctcggagtgcgctacctcccccatgtgaggagctgagaacggaagctgcagaaagatacgactgaggcgcctacctgcattctgccacccctcacacagccaaaccccagatcatctgaaactactaactttgtggttccagattttttttaatctcctacttctgctatctttgagcaatctgggcacttttaaaaatagagaaatgagtgaatgtgggtgatctgcttttatctaaatgcaaataaggatgtgttctctgagacccatgatcaggggatgtggcggggggtggctagagggagaaaaaggaaatgtcttgtgttgttttgttcccctgccctcctttctcagcagctttttgttattgttgttgttgttcttagacaagtgcctcctggtgcctgcggcatccttctgcctgtttctgtaagcaaatgccacaggccacctatagctacatactcctggcattgcactttttaaccttgctgacatccaaatagaagataggactatctaagccctaggtttctttttaaattaagaaataataacaattaaagggcaaaaaacactgtatcagcatagcctttctgtatttaagaaacttaagcagccgggcatggtggctcacgcctgtaatcccagcactttgggaggccgaggcggatcataaggtcaggagatcaagaccatcctggctaacacggtgaaaccccgtctctactaaaagtacaaaaaattagctgggtgtggtggtgggcgcctgtagtcccagctactcgggaggctgaggcaggagaatcgcttgaacctgagaggcggaggttgcagtgagccaaaattgcaccactgcacactgcactccatcctgggcgacagtctgagactctgtctcaaaaaaaaaaaaaaaaaaaagaaacttcagttaacagcctccttggtgctttaagcattcagcttccttcaggctggtaatttatataatccctgaaacgggcttcaggtcaaacccttaagacatctgaagctgcaacctggcctttggtgttgaaataggaaggtttaaggagaatctaagcattttagacttttttttataaatagacttattttcctttgtaatgtattggccttttagtgagtaaggctgggcagagggtgcttacaaccttgactccctttctccctggacttgatctgctgtttca

SEQ ID NO: 295109 - DNA, 1203 bp, Homo sapiens
gcggccgcctactattactaaattcgcggccgcgtcgacgaaagatacgactgaggcgcctacctgcattctgccacccctcacacagccaaaccccagatcatctgaaactactaactttgtggttccagattttttttaatctcctacttctgctatctttgagcaatctgggcacttttaaaaatagagaaatgagtgaatgtgggtgatctgcttttatctaaatgcaaataaggatgtgttctctgagacccatgatcaggggatgtggcggggggtggctagagggagaaaaaggaaatgtcttgtgttgttttgttcccctgccctcctttctcagcagctttttgttattgttgttgttgttcttagacaagtgcctcctggtgcctgcggcatccttctgcctgtttctgtaagcaaatgccacaggccacctatagctacatactcctggcattgcactttttaaccttgctgacatccaaatagaagataggactatctaagccctaggtttctttttaaattaagaaataataacaattaaagggcaaaaaacactgtatcagcatagcctttctgtatttaagaaacttaagcagccgggcatggtggctcacgcctgtaatcccagcactttgggaggccgaggcggatcataaggtcaggagatcaagaccatcctggctaacacggtgaaaccccgtctctactaaaagtacaaaaaattagctgggtgtggtggtgggcgcctgtagtcccagctactcgggaggctgaggcaggagaatcgcttgaacctgagaggcggaggttgcagtgagccaaaattgcaccactgcacactgcactccatcctgggcgacagtctgagactctgtctcaaaaaaaaaaaaaaaaaaaagaaacttcagttaacagcctccttggtgctttaagcattcagcttccttcaggctggtaatttatataatccctgaaacgggcttcaggtcaaacccttaagacatctgaagctgcaacctggcctttggtgttgaaataggaaggtttaaggagaatctaagcattttagacttttttttataaatagacttattttcctttgtaatgtattggccttttagtgagtaaggctgggcagagggtgcttacaaccttgactccctttctccctggacttgatctgctgtttca

SEQ ID NO: 295110 - DNA, 1433 bp, Homo sapiens
gagacagagtcttgctctgttgccaggctggagtgcagtggcgtgatctcagctcactgcaacttctgcctcccaggttcaagctattcccctgcctcagcctcccaagtagctgggactacaggcgcgcgccaccacacccagctaattttttgtgtttttagtagagatggggtttcactgtgttagccaggatggtctcgatctcttgacctcgtgatccgcccgcctcggcctcccaaagtgctgggattacaggcgtgagcaaccaaagatacgactgaggcgcctacctgcattctgccacccctcacacagccaaaccccagatcatctgaaactactaactttgtggttccagattttttttaatctcctacttctgctatctttgagcaatctgggcacttttaaaaatagagaaatgagtgaatgtgggtgatctgcttttatctaaatgcaaataaggatgtgttctctgagacccatgatcaggggatgtggcggggggtggctagagggagaaaaaggaaatgtcttgtgttgttttgttcccctgccctcctttctcagcagctttttgttattgttgttgttgttcttagacaagtgcctcctggtgcctgcggcatccttctgcctgtttctgtaagcaaatgccacaggccacctatagctacatactcctggcattgcactttttaaccttgctgacatccaaatagaagataggactatctaagccctaggtttctttttaaattaagaaataataacaattaaagggcaaaaaacactgtatcagcatagcctttctgtatttaagaaacttaagcagccgggcatggtggctcacgcctgtaatcccagcactttgggaggccgaggcggatcataaggtcaggagatcaagaccatcctggctaacacggtgaaaccccgtctctactaaaagtacaaaaaattagctgggtgtggtggtgggcgcctgtagtcccagctactcgggaggctgaggcaggagaatcgcttgaacctgagaggcggaggttgcagtgagccaaaattgcaccactgcacactgcactccatcctgggcgacagtctgagactctgtctcaaaaaaaaaaaaaaaaaaaagaaacttcagttaacagcctccttggtgctttaagcattcagcttccttcaggctggtaatttatataatccctgaaacgggcttcaggtcaaacccttaagacatctgaagctgcaacctggcctttggtgttgaaataggaaggtttaaggagaatctaagcattttagacttttttttataaatagacttattttcctttgtaatgtattggccttttagtgagtaaggctgggcagagggtgcttacaaccttgactccctttctccctggacttgatctgctgtttca

SEQ ID NO: 295111 - DNA, 1459 bp, Homo sapiens
gtaattcagcggtttccggagctgcggcggcgcagactgggagggggagccgggggttccgacgtcgcagccgagggaacaagccccaaccggatcctggacaggcaccccggcttggcgctgtctctccccctcggctcggagaggcccttcggcctgagggagcctcgccgcccgtccccggcacacgcgcagccccggcctctcggcctctgccggagaaacaggatggcccaatggaatcagctacagcagcttgacacacggtacctggagcagctccatcagctctacagtgacagcttcccaatggagctgcggcagtttctggccccttggattgagagtcaagattgggcatatgcggccagcaaagaatcacatgccactttggtgtttcataatctcctgggagagattgaccagcagtatagccgcttcctgcaagagtcgaatgttctctatcagcacaatctacgaagaatcaagcagtttcttcagagcaggtatcttgagaagccaatggagattgcccggattgtggcccggtgcctgtgggaagaatcacgccttctacagactgcagccactgcggcccagcaagggggccaggccaaccaccccacagcagccgtggtgacggagaagcagcagatgctggagcagcaccttcaggatgtccggaagagagtgcaggatctagaacagaaaatgaaagtggtagagaatctccaggatgactttgatttcaactataaaaccctcaagagtcaaggagacatgcaagatctgaatggaaacaaccagtcagtgaccaggcagaagatgcagcagctggaacagatgctcactgcgctggaccagatgcggagaagcatcgtgagtgagctggcggggcttttgtcagcgatggagtacgtgcagaaaactctcacggacgaggagctggctgactggaagaggcggcaacagattgcctgcattggaggcccgcccaacatctgcctagatcggctagaaaactggataacgtcattagcagaatctcaacttcagacccgtcaacaaattaagaaactggaggagttgcagcaaaaagtttcctacaaaggggaccccattgtacagcaccggccgatgctggaggagagaatcgtggagctgtttagaaacttaatgaaaagtgcctttgtggtggagcggcagccctgcatgcccatgcatcctgaccggcccctcgtcatcaagaccggcgtccagttcactactaaagtcaggttgctggtcaaattccctgagttgaattatcagcttaaaattaaagtgtgcattgacaaagactctggggacgttgcagctctcagagggtaagttcagcctagaggcttccttttgttccgtttaacctaacttcatcctccggctacttggtcacctacataagtgattgttccccgct

SEQ ID NO: 295112 - DNA, 746 bp, Homo sapiens
gtaattcagcggtttccggagctgcggcggcgcagactgggagggggagccgggggttccgacgtcgcagccgagggaacaagccccaaccggatcctggacaggcaccccggcttggcgctgtctctccccctcggctcggagaggcccttcggcctgagggagcctcgccgcccgtccccggcacacgcgcagccccggcctctcggcctctgccggagaaacaggatggcccaatggaatcagctacagcagcttgacacacggtacctggagcagctccatcagctctacagtgacagcttcccaatggagctgcggcagtttctggccccttggattgagagtcaagattgggcatatgcggccagcaaagaatcacatgccactttggtgtttcataatctcctgggagagattgaccagcagtatagccgcttcctgcaagagtcgaatgttctctatcagcacaatctacgaagaatcaagcagtttcttcagagcaggtatcttgagaagccaatggagattgcccggattgtggcccggtgcctgtgggaagaatcacgccttctacagactgcagccactgcggcccaggtgagacctgagacaaaacaaatccctggtctgggaggaatggaaaatcaaacaactttataatgagataaattattagatctactaaaaaagaaggaaaagaaattaaatagatcaataatcataaaaatacattgaaaaactct

SEQ ID NO: 295113 - DNA, 314 bp, Homo sapiens
ggatgaatgtgtgtgtgttctgttttaagaaataacctcttgaccccaagctgaaaatgtactacttgactctttttctttccttcaggacctggtgtgaattattcagggtgtcagatcacatgggctaaattttgcaaagtaagcaatcttgttaaattctcgtgggaatgggaatgctcacctgcacggctgtcgttgagggctctggcttgaaggccctgaactcttggtccagcggccagtaggacctgcctgaaggtagacgggcctgaggatttgggtgatgcactgcacccctaggaagggaaggg

SEQ ID NO: 295114 - DNA, 659 bp, Homo sapiens
gcctcttcttaattagaagccagcctgaatatttccacagtgccaggccactgaacagggtgttcagggtctcaacactagggtggcttaagtcttttccccttcgaggaaagaaaaaatgggcagttttctctgagatgacctagctgtaggttccatgatctttccttcccatgtcctgtgacaggtaagacccagatccagtccgtggaaccatacacaaagcagcagctgaacaacatgtcatttgctgaaatcatcatgggctataagatcatggatgctaccaatatcctggtgtctccactggtctatctctatcctgacattcccaaggaggaggcattcggaaagtattgtcggccagagagccaggagcatcctgaagctgacccaggtagttgttgattttccatgttcctggcatttaatttttgggaaaagttggaaattttgggatccttggaggatagataggcaaatgcctgaataacctgggggataattatttctccttatgggaaagaattgtagtgagtgcttttgttggggtgaccgatgggatttgagaggagaatcagaatcacttagagtagtgtagttcctgctccacagagagtgcatgagtctaaagaggggatacagcctgggcaatatgg

SEQ ID NO: 295115 - DNA, 754 bp, Homo sapiens
gggggtctccctgtgttgtccaggctgatcatgaactcctgggctcaagtgatcctcccaactcagcctctcaaagtgctggcattacaggcgtgagccactgcacctggccaacagggagccttctcttggggatactgcctgcaggtcctgcatgtatcttttttgaggttttggcttcatttgaattctcctcagaaactttatattttctgttcccaaggaaatctttctttacttctgtttttttgtttgcttattttaaacaggatctagaacagaaaatgaaagtggtagagaatctccaggatgactttgatttcaactataaaaccctcaagagtcaaggaggcaagtgaatattagagatgttaaaatctctagaaagtgagtttgtgttgttgagttgaaagactcatttgtcttaactctgtttagatcttaaggcgggcggggcgcaagggaggtacgggtcctcaaaggagcctggtcattaaggacaggagtattccctcaggtccaggagtattccctcaggtccaggagtattccctcaggtcaaggagtattccctcaggtcaaggagtattccctcaggtccaggagtattccctcaggtccaggagtattccctcaggtccaggagtattccctcaggtccaggagtattccctcaggtccaggagtattccctcaggtcaaggagtattccctcaggtccaggagtattccctcaggtccaggagtattccct

SEQ ID NO: 295116 - DNA, 1642 bp, Homo sapiens
gttacccagcacttgggtgcgaaggttagcggtaagacccagatccagtccgtggaaccatacacaaagcagcagctgaacaacatgtcatttgctgaaatcatcatgggctataagatcatggatgctaccaatatcctggtgtctccactggtctatctctatcctgacattcccaaggaggaggcattcggaaagtattgtcggccagagagccaggagcatcctgaagctgacccaggtagcgctgccccatacctgaagaccaagtttatctgtgtgacaccaacgacctgcagcaataccattgacctgccgatgtccccccgcactttagattcattgatgcagtttggaaataatggtgaaggtgctgaaccctcagcaggagggcagtttgagtccctcacctttgacatggagttgacctcggagtgcgctacctcccccatgtgaggagctgagaacggaagctgcagaaagatacgactgaggcgcctacctgcattctgccacccctcacacagccaaaccccagatcatctgaaactactaactttgtggttccagattttttttaatctcctacttctgctatctttgagcaatctgggcacttttaaaaatagagaaatgagtgaatgtgggtgatctgcttttatctaaatgcaaataaggatgtgttctctgagacccatgatcaggggatgtggcggggggtggctagagggagaaaaaggaaatgtcttgtgttgttttgttcccctgccctcctttctcagcagctttttgttattgttgttgttgttcttagacaagtgcctcctggtgcctgcggcatccttctgcctgtttctgtaagcaaatgccacaggccacctatagctacatactcctggcattgcactttttaaccttgctgacatccaaatagaagataggactatctaagccctaggtttctttttaaattaagaaataataacaattaaagggcaaaaaacactgtatcagcatagcctttctgtatttaagaaacttaagcagccgggcatggtggctcacgcctgtaatcccagcactttgggaggccgaggcggatcataaggtcaggagatcaagaccatcctggctaacacggtgaaaccccgtctctactaaaagtacaaaaaattagctgggtgtggtggtgggcgcctgtagtcccagctactcgggaggctgaggcaggagaatcgcttgaacctgagaggcggaggttgcagtgagccaaaattgcaccactgcacactgcactccatcctgggcgacagtctgagactctgtctcaaaaaaaaaaaaaaaaaaaagaaacttcagttaacagcctccttggtgctttaagcattcagcttccttcaggctggtaatttatataatccctgaaacgggcttcaggtcaaacccttaagacatctgaagctgcaacctggcctttggtgttgaaataggaaggtttaaggagaatctaagcattttagacttttttttataaatagacttattttcctttgtaatgtattggccttttagtgagtaaggctgggcagagggtgcttacaaccttgactccctttctccctggacttgatctgctgtttca

SEQ ID NO: 295117 - DNA, 1645 bp, Homo sapiens
gtaattcagcggtttccggagctgcggcggcgcagactgggagggggagccgggggttccgacgtcgcagccgagggaacaagccccaaccggatcctggacaggcaccccggcttggcgctgtctctccccctcggctcggagaggcccttcggcctgagggagcctcgccgcccgtccccggcacacgcgcagccccggcctctcggcctctgccggagaaacaggatggcccaatggaatcagctacagcagcttgacacacggtacctggagcagctccatcagctctacagtgacagcttcccaatggagctgcggcagtttctggccccttggattgagagtcaagattgggcatatgcggccagcaaagaatcacatgccactttggtgtttcataatctcctgggagagattgaccagcagtatagccgcttcctgcaagagtcgaatgttctctatcagcacaatctacgaagaatcaagcagtttcttcagagcaggtatcttgagaagccaatggagattgcccggattgtggcccggtgcctgtgggaagaatcacgccttctacagactgcagccactgcggcccagcaagggggccaggccaaccaccccacagcagccgtggtgacggagaagcagcagatgctggagcagcaccttcaggatgtccggaagagagtgcaggatctagaacagaaaatgaaagtggtagagaatctccaggatgactttgatttcaactataaaaccctcaagagtcaaggagacatgcaagatctgaatggaaacaaccagtcagtgaccaggcagaagatgcagcagctggaacagatgctcactgcgctggaccagatgcggagaagcatcgtgagtgagctggcggggcttttgtcagcgatggagtacgtgcagaaaactctcacggacgaggagctggctgactggaagaggcggcaacagattgcctgcattggaggcccgcccaacatctgcctagatcggctagaaaactggataacgtcattagcagaatctcaacttcagacccgtcaacaaattaagaaactggaggagttgcagcaaaaagtttcctacaaaggggaccccattgtacagcaccggccgatgctggaggagagaatcgtggagctgtttagaaacttaatgaaaagtgcctttgtggtggagcggcagccctgcatgcccatgcatcctgaccggcccctcgtcatcaagaccggcgtccagttcactactaaagtcaggttgctggtcaaattccctgagttgaattatcagcttaaaattaaagtgtgcattgacaaagactctggggacgttgcagctctcagaggatcccggaaatttaacattctgggcacaaacacaaaagtgatgaacatggaagaatccaacaacggcagcctctctgcagaattcaaacacttgaccctgagggagcagagatgtgggaatgggggccgagccaattgtgatgcttccctgattgtgactgaggagctgcacctgatcacctttgagaccgaggtgtatcaccaaggcctcaagattgacctagagagattcacgtcgtttaacacttctggtgattaataacatctctctgattgta

SEQ ID NO: 295118 - DNA, 968 bp, Homo sapiens
gtaattcagcggtttccggagctgcggcggcgcagactgggagggggagccgggggttccgacgtcgcagccgagggaacaagccccaaccggatcctggacaggcaccccggcttggcgctgtctctccccctcggctcggagaggcccttcggcctgagggagcctcgccgcccgtccccggcacacgcgcagccccggcctctcggcctctgccggagaaacaggatggcccaatggaatcagctacagcagcttgacacacggtacctggagcagctccatcagctctacagtgacagcttcccaatggagctgcggcagtttctggccccttggattgagagtcaagattgggcatatgcggccagcaaagaatcacatgccactttggtgtttcataatctcctgggagagattgaccagcagtatagccgcttcctgcaagagtcgaatgttctctatcagcacaatctacgaagaatcaagcagtttcttcaggtatgatgagaaactgaggacaaggagaaacaggacccgcagagtcgggtgttagtgttctttcctggaagcatctcttttctcatttggctaagtaacgagaatctatcttgtattttcaatcacaggagaagtaattagccctttctcaaagctctgtatacttacccgtgagcatcattacctgagaatcacttctcttgtcacagttgaagtaataaagtgattgttatgttaatcatacatgttagcatgttaacgcggtccactgataggaagatgactctcactgttacatgttaaatgtttgaccataatgggatacttcttgactaagtcagtagcttccctgcaagaccaggatagtatactgtgtaaagactcagacaaggccaggcatggtggctcacgcctgtaatcccaacaccttaggaggttgaggtgggaggattgcttgagcctgggag

SEQ ID NO: 295119 - DNA, 732 bp, Homo sapiens
cccccccccccgcgagtccgtccgctgcacagccaatcagcggtcggcgcgcgcggcatcacgggagttgtagtcctgtaagcgcgcggagcccgtcgggcgcctatggaactcgacccgcaggccaaaggggctccgttgcaaggaagaagtgcggggtcccgccgcctcctagaccgagatcgcggtgagctggccgcggcgcacaatgggcacggcctgggcggcggcgtccgtactatcgccctgtgcctgcggatcccggtaacattgcgcggcaggccccaggccggcctccctcagcttcgcggactgtctgggccgggggtctcaaccttgacttcagggccgggccgctggggcagacccttagtgatgttcaggtcctctgggcccctgccagtcaagggacgctcgtcgcgcgccaattgttaagtctttcattgtttctgtaaacctgctgacgccctcccagcgcatagggagactgcgcacgtgagtccgcccccgcgcgcactgcggagaggtagaggcacgaatgtagtacaaggagccagctggtccaccagaagtctgtgttctgcctgtccctgcagcacggagggctgggctttatacctgtgccaaggacaccaacggcagcatcagcaagtccgtgttgtctcccaaataagtggtgttctccaacaagcttttagcagtaataaagctgacatttttattctcaaaaat

SEQ ID NO: 295120 - DNA, 514 bp, Homo sapiens
ccacagagagatgggcaggtccccctggctggggtcaggaagggcttgcaggagggtttactgctcactgtctctctctctttctatctctctccatctctctcatcacacacatacacactcagtcttgctgagggagaattctgagaaggtggagttctctgtagggaagggatacatatttcctactagtcatgtttccctgaaaatgggacttctgttaataatactcctggcctctctctacctggggaagaggaaacgtgagttacctgagagaagctgggaagaaagaaccaagcatacatgatttagtcccctctcctctttaggagccagctggtccaccagaagtctgtgttctgcctgtccctgcagcacggagggctgggctttatacctgtgccaaggacaccaacggcagcatcagcaagtccgtgttgtctcccaaataagtggtgttctccaacaagcttttagcagtaataaagctgacatttttattctcaaaaat

SEQ ID NO: 295121 - DNA, 446 bp, Homo sapiens
cccccccccccgcgagtccgtccgctgcacagccaatcagcggtcggcgcgcgcggcatcacgggagttgtagtcctgtaagcgcgcggagcccgtcgggcgcctatggaactcgacccgcaggccaaaggggctccgttgcaaggaagaagtgcggggtcccgccgcctcctagaccgagatcgcggtgagctggccgcggcgcacaatgggcacggcctgggcggcggcgtccgtactatcgccctgtgcctgcggatcccggagccagctggtccaccagaagtctgtgttctgcctgtccctgcagcacggagggctgggctttatacctgtgccaaggacaccaacggcagcatcagcaagtccgtgttgtctcccaaataagtggtgttctccaacaagcttttagcagtaataaagctgacatttttattctcaaaaat

SEQ ID NO: 295122 - DNA, 4832 bp, Homo sapiens
  misc_feature (3262)..(3263): n is a, c, g, or t
  misc_feature (3309)..(3309): n is a, c, g, or t
ccagaggcctcagcggccctgcaggtccgggcgaccaaggattattgcaacaattacgacctgaccagcctcaacgtgaaggcaggggacatcatcacagtcctcgagcagcatccggatggccggtggaagggctgcatccatgacaaccggacgggcaatgaccgggtgggctacttcccgtcctccctgggcgaggccattgtcaagcgagcaggttcccgagcaggcactgaaccaagcctgccccagggaagcagctcatcgggaccctctgcacccccagaggagatctgggtgctgaggaagccttttgcaggtggggaccgaagcggcagcattagcggcatggctggcggccggggcagcgggggtcacgccctacacgcgggctctgaaggcgtcaagctcctggcaacggtgctttcccagaagtccgtctctgagtccggcccgggggacagccccgccaagcctccggaaggctctgcaggtgtggcccggtcccagcctccagtggcccacgccgggcaggtctatggggagcagccgcccaagaagctggagccagcatcggagggcaagagctctgaggccgtgagccagtggctcaccgcgttccagctgcagctctacgcccccaacttcatcagcgccggctacgacctgcccaccatcagccgcatgactcccgaggacctcacggccattggtgtcaccaagccgggccaccggaagaagatcgcggcagagatcagcggcctaagcatccctgactggctgcctgagcacaaacccgctaacctggccgtgtggctgtccatgatcggcctggcccagtactacaaggtgttggtggacaatggctacgagaacattgatttcatcaccgacatcacctgggaggacctgcaggagatcggcatcaccaagctggggcaccagaagaagctgatgctcgctgtgaggaagctggcagagctgcagaaggctgaatacgccaagtatgaggggggccccctgcgccggaaggcgccccagtctcttgaagtgatggccatcgagtcgccgcccccgcctgagcccacaccggccgactgccagtcccctaaaatgaccaccttccaggacagcgagctcagtgacgagctgcaggctgccatgactggcccggctgaggtggggcccaccactgagaagccctccagccacctgccacccaccccgagggccaccacgcggcaggactccagcctgggtggtcgggcacggcacatgagcagctcgcaggagctgctgggagatgggccccctgggcccagcagccccatgtctcgaagccaggagtacctcctggatgagggccccgcccccggcaccccgcccagggaggcccggcccggccgccacggccacagcatcaagagggccagcgtgccccccgtgcctggcaagccacggcaggtcctcccaccaggcactagccacttcacgcccccccagacgcccaccaaaacccgaccaggctctccccaggcccttgggggacctcatggtccagccccagctacggccaaggtgaagcccaccccgcagctgctgccgccgacagagcgccccatgtcaccccgctccctgcctcagtcaccgacgcaccgcggctttgcctacgtgctgccccagcccgtggagggcgaggtggggccggctgccccggggcctgcgcccccacccgtgccgacggctgtgcccacactgtgcctgccccctgaggccgacgcggagccggggcggcccaagaagcgggcccacagcctgaatcgctatgcggcgtccgacagcgagccggagcgggacgagctgctggtgcctgcggctgccggcccctatgccacggtccagcggcgcgtgggccgcagccactcagtgagggcgcccgcaggtgccgacaagaacgtcaaccgcagccagtcctttgccgtgcggccccgaaagaaggggcccccgccgcccccacccaagcgctccagctcggccctggctagtgccaacctggcggatgagccggtgcctgacgccgagcctgaggatggcctgctgggggtccgggcacagtgccggcgggccagtgacctggccggcagcgtggacacgggtagtgccggcagtgtgaagagcatcgcggccatgctggagctgtcctccattgggggtgggggccgggctgcccgcaggcctcctgagggccaccccactccccgccctgccagcccagagccgggccgggtggccaccgtgctggcctcagtgaaacacaaagaggccatcgggcctggcggggaggtggtgaaccggcgccgcacgctcagcgggccagtcaccggacttctggccactgcccgccgggggcctggggagtcggcagacccaggcccctttgtggaggatggcactggccggcagcggcctcggggtccctccaagggcgaggcgggtgtcgaaggcccgcccttggccaaggtggaagccagcgccacactcaagaggcgcatccgggccaagcagaaccagcaggagaacgtcaagttcatcctgaccgagtctgacacggtcaagcgcaggcccaaggccaaggagcgggaggccgggcctgagccaccaccgccactgtccgtgtaccataatggcactggcaccgtgcgccgccgaccggcctcggagcaggctgggcctccggagctgcctccaccgcccccgcctgccgaacccccgcccaccgacctggcgcacctacccccattgcccccgcccgagggcgaagcccggaagccggccaagccgcctgtctctcccaagcccgtcctgacgcagcctgtgcccaagctccagggctcgcccacacccacctccaagaaggtgccgctgccaggccctggcagcccagaggtgaagcgcgcccacggcacgccaccgcccgtgtctcccaagccgccgccgccgcccacagcgcccaagcccgtcaaggcggtcgcggggctgccttcgggcagcgccggcccttcacccgcaccctcgcccgcgcgacagccgcccgccgccctcgccaagccgcccggtacgccgccctcgctgggcgccagccccgccaagcccccgtcccccggcgcgcccgcgctgcacgtgcccgccaagcccccgcgagccgccgccgccgccgccgccgccgccgccgcgccccccgccccgcccgaaggcgcctcgnnaggggacagcgcccggcagaaactggaggagacaagcgcgtgcctngccgcggcgctgcaggcggtggaggagaagatccggcaggaggacgcgcagggcccgcgcgactcggcggcggaaaagagcactggcagcatcctggacgacatcggcagcatgttcgacgacctggccgaccagctggatgccatgctggagtgaacgccgcctggccgggccctcccgcgccgcccgggccctccccgcacactgacctatacctcaggatgggcgcgtctgggcgcggcgcgagcggccgggcagggccctgcagaagcacaactccggcccctggacccgggccggggcgcccaccggggaccgcctggccgggggctccaagggctctaggcagaccctgcgcccgcgggtcctccccacctgctgctccccgtgcaatacctgctgggcctcctgcccgcgcgggaggggagggcgccccgggaccagggatggggcagcgcacaggcccgggcccagcacagaactgcccatcgggacgcccggccagccgctcgggcgcagcacaagggacaggggaccaaggtcagggcccccctgccccaccgcacccccagaatataagctatcaagagtattaatttattgggaatgagctgaggcggatttccccagagaaacaaaaaggtataactttaacaaatatatatttaaagaaagaaatattattgattctatagaaaaccatttaccaactgaaaggacacgaagtctagctccggacaaaagctgttagaggcccaggctgtctgcctgcggtccttcctccggccagagtggaggccccaggctgctagcacaggtggaaggctggggcccgggggcgggtgctctgccgggggctcctccgtgcttctctcctaagttctctgcgccccaagaactcgaggttgtgccttgctctcggcggccgtgtcctcctcctggcgtggctgcgtcccagggcgcgggtgggtttggtgaatgtgggtgtgtcagcgtggcagccacgtggaagcagggcatgtagcaggccaggccacgggcttgcagctcctctgagggtgtgcctggccccctctccaggggctgtgcaggcagcccatccaccccagtggagttcccacggacgcttctgctcatggtccaaggctgtgttgtgtggtcattctcgccctcccttttcctctctcctcctgccccctccaagaagtactgactggtctcctctatcgtgtttgctgatccacagtgttgggcacaactttgacgtttcttaaaaaaaaaatttaaaaaatgccgaaaaccagcgattgtggtgtggggcgggtggaggcggctggcggaggtggcgtcccggcgtgcagggccccttcctgctgtctcaccccgtgtttccctgcgagtggacgtgcccagctgtccccccaggcctctcctcagagggcggcacaggctgggctccagcaggtgggcaggggaggtctgggcaaggcgctgccgtcggctgtcaataaacagcaggaaac

SEQ ID NO: 295123 - DNA, 4007 bp, Homo sapiens
  misc_feature (3262)..(3263): n is a, c, g, or t
  misc_feature (3309)..(3309): n is a, c, g, or t
ccagaggcctcagcggccctgcaggtccgggcgaccaaggattattgcaacaattacgacctgaccagcctcaacgtgaaggcaggggacatcatcacagtcctcgagcagcatccggatggccggtggaagggctgcatccatgacaaccggacgggcaatgaccgggtgggctacttcccgtcctccctgggcgaggccattgtcaagcgagcaggttcccgagcaggcactgaaccaagcctgccccagggaagcagctcatcgggaccctctgcacccccagaggagatctgggtgctgaggaagccttttgcaggtggggaccgaagcggcagcattagcggcatggctggcggccggggcagcgggggtcacgccctacacgcgggctctgaaggcgtcaagctcctggcaacggtgctttcccagaagtccgtctctgagtccggcccgggggacagccccgccaagcctccggaaggctctgcaggtgtggcccggtcccagcctccagtggcccacgccgggcaggtctatggggagcagccgcccaagaagctggagccagcatcggagggcaagagctctgaggccgtgagccagtggctcaccgcgttccagctgcagctctacgcccccaacttcatcagcgccggctacgacctgcccaccatcagccgcatgactcccgaggacctcacggccattggtgtcaccaagccgggccaccggaagaagatcgcggcagagatcagcggcctaagcatccctgactggctgcctgagcacaaacccgctaacctggccgtgtggctgtccatgatcggcctggcccagtactacaaggtgttggtggacaatggctacgagaacattgatttcatcaccgacatcacctgggaggacctgcaggagatcggcatcaccaagctggggcaccagaagaagctgatgctcgctgtgaggaagctggcagagctgcagaaggctgaatacgccaagtatgaggggggccccctgcgccggaaggcgccccagtctcttgaagtgatggccatcgagtcgccgcccccgcctgagcccacaccggccgactgccagtcccctaaaatgaccaccttccaggacagcgagctcagtgacgagctgcaggctgccatgactggcccggctgaggtggggcccaccactgagaagccctccagccacctgccacccaccccgagggccaccacgcggcaggactccagcctgggtggtcgggcacggcacatgagcagctcgcaggagctgctgggagatgggccccctgggcccagcagccccatgtctcgaagccaggagtacctcctggatgagggccccgcccccggcaccccgcccagggaggcccggcccggccgccacggccacagcatcaagagggccagcgtgccccccgtgcctggcaagccacggcaggtcctcccaccaggcactagccacttcacgcccccccagacgcccaccaaaacccgaccaggctctccccaggcccttgggggacctcatggtccagccccagctacggccaaggtgaagcccaccccgcagctgctgccgccgacagagcgccccatgtcaccccgctccctgcctcagtcaccgacgcaccgcggctttgcctacgtgctgccccagcccgtggagggcgaggtggggccggctgccccggggcctgcgcccccacccgtgccgacggctgtgcccacactgtgcctgccccctgaggccgacgcggagccggggcggcccaagaagcgggcccacagcctgaatcgctatgcggcgtccgacagcgagccggagcgggacgagctgctggtgcctgcggctgccggcccctatgccacggtccagcggcgcgtgggccgcagccactcagtgagggcgcccgcaggtgccgacaagaacgtcaaccgcagccagtcctttgccgtgcggccccgaaagaaggggcccccgccgcccccacccaagcgctccagctcggccctggctagtgccaacctggcggatgagccggtgcctgacgccgagcctgaggatggcctgctgggggtccgggcacagtgccggcgggccagtgacctggccggcagcgtggacacgggtagtgccggcagtgtgaagagcatcgcggccatgctggagctgtcctccattgggggtgggggccgggctgcccgcaggcctcctgagggccaccccactccccgccctgccagcccagagccgggccgggtggccaccgtgctggcctcagtgaaacacaaagaggccatcgggcctggcggggaggtggtgaaccggcgccgcacgctcagcgggccagtcaccggacttctggccactgcccgccgggggcctggggagtcggcagacccaggcccctttgtggaggatggcactggccggcagcggcctcggggtccctccaagggcgaggcgggtgtcgaaggcccgcccttggccaaggtggaagccagcgccacactcaagaggcgcatccgggccaagcagaaccagcaggagaacgtcaagttcatcctgaccgagtctgacacggtcaagcgcaggcccaaggccaaggagcgggaggccgggcctgagccaccaccgccactgtccgtgtaccataatggcactggcaccgtgcgccgccgaccggcctcggagcaggctgggcctccggagctgcctccaccgcccccgcctgccgaacccccgcccaccgacctggcgcacctacccccattgcccccgcccgagggcgaagcccggaagccggccaagccgcctgtctctcccaagcccgtcctgacgcagcctgtgcccaagctccagggctcgcccacacccacctccaagaaggtgccgctgccaggccctggcagcccagaggtgaagcgcgcccacggcacgccaccgcccgtgtctcccaagccgccgccgccgcccacagcgcccaagcccgtcaaggcggtcgcggggctgccttcgggcagcgccggcccttcacccgcaccctcgcccgcgcgacagccgcccgccgccctcgccaagccgcccggtacgccgccctcgctgggcgccagccccgccaagcccccgtcccccggcgcgcccgcgctgcacgtgcccgccaagcccccgcgagccgccgccgccgccgccgccgccgccgccgcgccccccgccccgcccgaaggcgcctcgnnaggggacagcgcccggcagaaactggaggagacaagcgcgtgcctngccgcggcgctgcaggcggtggaggagaagatccggcaggaggacgcgcagggcccgcgcgactcggcggcggaaaagagcactggcagcatcctggacgacatcggcagcatgttcgacgacctggccgaccagctggatgccatgctggagtgaacgccgcctggccgggccctcccgcgccgcccgggccctccccgcacactgacctatacctcaggatgggcgcgtctgggcgcggcgcgagcggccgggcagggccctgcagaagcacaactccggcccctggacccgggccggggcgcccaccggggaccgcctggccgggggctccaagggctctaggcagaccctgcgcccgcgggtcctccccacctgctgctccccgtgcaatacctgctgggcctcctgcccgcgcgggaggggagggcgccccgggaccagggatggggcagcgcacaggcccgggcccagcacagaactgcccatcgggacgcccggccagccgctcgggcgcagcacaagggacaggggaccaaggtcagggcccccctgccccaccgcacccccagaatataagctatcaagagtattaatttattgggaatgagctgaggcggatttccccagagaaacaaaaaggtataactttaacaaatatatatttaaagaaagaaaaaacaaaagggcgcccgctc

SEQ ID NO: 295124 - DNA, 5043 bp, Homo sapiens
cttggctgttcctgaggcctggcctggctccccgctgaccccttcccagacctgggatggcggaggccggcctgaggggctggctgctgtgggccctgctcctgcgcttggcccagagtgagccttacacaaccatccaccagcctggctactgcgccttctatgacgaatgtgggaagaacccagagctgtctggaagcctcatgacactctccaacgtgtcctgcctgtccaacacgccggcccgcaagatcacaggtgatcacctgatcctattacagaagatctgcccccgcctctacaccggccccaacacccaagcctgctgctccgccaagcagctggtatcactggaagcgagtctgtcgatcaccaaggccctcctcacccgctgcccagcctgctctgacaattttgtgaacctgcactgccacaacacgtgcagccccaatcagagcctcttcatcaatgtgacccgcgtggcccagctaggggctggacaactcccagctgtggtggcctatgaggccttctaccagcatagctttgccgagcagagctatgactcctgcagccgtgtgcgcgtccctgcagctgccacgctggctgtgggcaccatgtgtggcgtgtatggctctgccctttgcaatgcccagcgctggctcaacttccagggagacacaggcaatggtctggccccactggacatcaccttccacctcttggagcctggccaggccgtggggagtgggattcagcctctgaatgagggggttgcacgttgcaatgagtcccaaggtgacgacgtggcgacctgctcctgccaagactgtgctgcatcctgtcctgccatagcccgcccccaggccctcgactccaccttctacctgggccagatgccgggcagtctggtcctcatcatcatcctctgctctgtcttcgctgtggtcaccatcctgcttgtgggattccgtgtggcccccgccagggacaaaagcaagatggtggaccccaagaagggcaccagcctctctgacaagctcagcttctccacccacaccctccttggccagttcttccagggctggggcacgtgggtggcttcgtggcctctgaccatcttggtgctatctgtcatcccggtggtggccttggcagcgggcctggtctttacagaactcactacggaccccgtggagctgtggtcggcccccaacagccaagcccggagtgagaaagctttccatgaccagcatttcggccccttcttccgaaccaaccaggtgatcctgacggctcctaaccggtccagctacaggtatgactctctgctgctggggcccaagaacttcagcggaatcctggacctggacttgctgctggagctgctagagctgcaggagaggctgcggcacctccaggtatggtcgcccgaagcacagcgcaacatctccctgcaggacatctgctacgcccccctcaatccggacaataccagtctctacgactgctgcatcaacagcctcctgcagtatttccagaacaaccgcacgctcctgctgctcacagccaaccagacactgatggggcagacctcccaagtcgactggaaggaccattttctgtactgtgccaatgccccgctcaccttcaaggatggcacagccctggccctgagctgcatggctgactacggggcccctgtcttccccttccttgccattggggggtacaaaggaaaggactattctgaggcagaggccctgatcatgacgttctccctcaacaattaccctgccggggacccccgtctggcccaggccaagctgtgggaggaggccttcttagaggaaatgcgagccttccagcgtcggatggctggcatgttccaggtcacgttcatggctgagcgctctctggaagacgagatcaatcgcaccacagctgaagacctgcccatctttgccaccagctacattgtcatattcctgtacatctctctggccctgggcagctattccagctggagccgagtgatggtggactccaaggccacgctgggcctcggcggggtggccgtggtcctgggagcagtcatggctgccatgggcttcttctcctacttgggtatccgctcctccctggtcatcctgcaagtggttcctttcctggtgctgtccgtgggggctgataacatcttcatctttgttctcgagtaccagaggctgccccggaggcctggggagccacgagaggtccacattgggcgagccctaggcagggtggctcccagcatgctgttgtgcagcctctctgaggccatctgcttcttcctaggggccctgacccccatgccagctgtgcggacctttgccctgacctctggccttgcagtgatccttgacttcctcctgcagatgtcagcctttgtggccctgctctccctggacagcaagaggcaggaggcctcccggttggacgtctgctgctgtgtcaagccccaggagctgcccccgcctggccagggagaggggctcctgcttggcttcttccaaaaggcttatgcccccttcctgctgcactggatcactcgaggtgttgtgctgctgctgtttctcgccctgttcggagtgagcctctactccatgtgccacatcagcgtgggactggaccaggagctggccctgcccaaggactcgtacctgcttgactatttcctctttctgaaccgctacttcgaggtgggggccccggtgtactttgttaccaccttgggctacaacttctccagcgaggctgggatgaatgccatctgctccagtgcaggctgcaacaacttctccttcacccagaagatccagtatgccacagagttccctgagcagtcttacctggccatccctgcctcctcctgggtggatgacttcattgactggctgaccccgtcctcctgctgccgcctttatatatctggccccaataaggacaagttctgcccctcgaccgtcaactctctgaactgcctaaagaactgcatgagcatcacgatgggctctgtgaggccctcggtggagcagttccataagtatcttccctggttcctgaacgaccggcccaacatcaaatgtcccaaaggcggcctggcagcatacagcacctctgtgaacttgacttcagatggccaggttttagacacagttgccattctgtcacccaggctggagtacagtggcacaatctcggctcactgcaacctctacctcctggattcagcctccaggttcatggcctatcacaagcccctgaaaaactcacaggattacacagaagctctgcgggcagctcgagagctggcagccaacatcactgctgacctgcggaaagtgcctggaacagacccggcttttgaggtcttcccctacacgatcaccaatgtgttttatgagcagtacctgaccatcctccctgaggggctcttcatgctcagcctctgccttgtgcccaccttcgctgtctcctgcctcctgctgggcctggacctgcgctccggcctcctcaacctgctctccattgtcatgatcctcgtggacactgtcggcttcatggccctgtggggcatcagttacaatgctgtgtccctcatcaacctggtctcggcggtgggcatgtctgtggagtttgtgtcccacattacccgctcctttgccatcagcaccaagcccacctggctggagagggccaaagaggccaccatctctatgggaagtgcggtgtttgcaggtgtggccatgaccaacctgcctggcatccttgtcctgggcctcgccaaggcccagctcattcagatcttcttcttccgcctcaacctcctgatcactctgctgggcctgctgcatggcttggtcttcctgcccgtcatcctcagctacgtggggcctgacgttaacccggctctggcactggagcagaagcgggctgaggaggcggtggcagcagtcatggtggcctcttgcccaaatcacccctcccgagtctccacagctgacaacatctatgtcaaccacagctttgaaggttctatcaaaggtgctggtgccatcagcaacttcttgcccaacaatgggcggcagttctgatacagccagaggccctgtctaggctctatggccctgaaccaaagggttatggggatcttccttgtgactgccccttgacacacgccctcctcaaatcctaggggaggccattcccatgagactgcctgtcactggaggatggcctgctcttgaggtatccaggcagcaccactgatggctcctctgctcccatagtgggtccccagtttccaagtcacctaggccttgggcagtgcctcctcctgggcctgggtctggaagttggcaggaacagacacactccatgtttgtcccacactcactcactttcctaggagcccacttctcatccaacttttcccttctcagttcctctctcgaaagtcttaattctgtgtcagtaagtctttaacacgtagcagtgtccctgagaacacagacaatgaccactaccctgggtgtgatatcacaggaggccagagagaggcaaaggctcaggccaagagccaacgctgtgggaggccggtcggcagccactccctccagggcgcacctgcaggtctgccatccacggccttttctggcaagagaagggcccaggaaggatgctctcataaggcccaggaaggatgctctcataagcaccttggtcatggattagcccctcctggaaaatggtgttgggtttggtctccagctccaatacttattaaggctgttgctgccagtcaaggccacccaggagtctgaaggctgggagctcttggggctgggctggtcctcccatcttcacctcgggcctggatcccaggcctcaaaccagcccaacccgagcttttggacagctctccagaagcatgaactgcagtggagatgaagatcctggctctgtgctgtgcacataggtgtttaataaacatttgttggc

SEQ ID NO: 295125 - DNA, 2552 bp, Homo sapiens
cttggctgttcctgaggcctggcctggctccccgctgaccccttcccagacctgggatggcggaggccggcctgaggggctggctgctgtgggccctgctcctgcgcttggcccagagtgagccttacacaaccatccaccagcctggctactgcgccttctatgacgaatgtgggaagaacccagagctgtctggaagcctcatgacactctccaacgtgtcctgcctgtccaacacgccggcccgcaagatcacaggtgatcacctgatcctattacagaagatctgcccccgcctctacaccggccccaacacccaagcctgctgctccgccaagcagctggtatcactggaagcgagtctgtcgatcaccaaggccctcctcacccgctgcccagcctgctctgacaattttgtgaacctgcactgccacaacacgtgcagccccaatcagagcctcttcatcaatgtgacccgcgtggcccagctaggggctggacaactcccagctgtggtggcctatgaggccttctaccagcatagctttgccgagcagagctatgactcctgcagccgtgtgcgcgtccctgcagctgccacgctggctgtgggcaccatgtgtggcgtgtatggctctgccctttgcaatgcccagcgctggctcaacttccagggagacacaggcaatggtctggccccactggacatcaccttccacctcttggagcctggccaggccgtggggagtgggattcagcctctgaatgagggggttgcacgttgcaatgagtcccaaggtgacgacgtggcgacctgctcctgccaagactgtgctgcatcctgtcctgccatagcccgcccccaggccctcgactccaccttctacctgggccagatgccgggcagtctggtcctcatcatcatcctctgctctgtcttcgctgtggtcaccatcctgcttgtgggattccgtgtggcccccgccagggacaaaagcaagatggtggaccccaagaagggcaccagcctctctgacaagctcagcttctccacccacaccctccttggccagttcttccagggctggggcacgtgggtggcttcgtggcctctgaccatcttggtgctatctgtcatcccggtggtggccttggcagcgggcctggtctttacagaactcactacggaccccgtggagctgtggtcggcccccaacagccaagcccggagtgagaaagctttccatgaccagcatttcggccccttcttccgaaccaaccaggtgatcctgacggctcctaaccggtccagctacaggtatgactctctgctgctggggcccaagaacttcagcggaatcctggacctggacttgctgctggagctgctagagctgcaggagaggctgcggcacctccaggtatggtcgcccgaagcacagcgcaacatctccctgcaggacatctgctacgcccccctcaatccggacaataccagtctctacgactgctgcatcaacagcctcctgcagtatttccagaacaaccgcacgctcctgctgctcacagccaaccagacactgatggggcagacctcccaagtcgactggaaggaccattttctgtactgtgccaatgccccgctcaccttcaaggatggcacagccctggccctgagctgcatggctgactacggggcccctgtcttccccttccttgccattggggggtacaaaggaaaggactattctgaggcagaggccctgatcatgacgttctccctcaacaattaccctgccggggacccccgtctggcccaggccaagctgtgggaggaggccttcttagaggaaatgcgagccttccagcgtcggatggctggcatgttccaggtcacgttcatggctgagcgctctctggaagacgagatcaatcgcaccacagctgaagacctgcccatctttgccaccagctacattgtcatattcctgtacatctctctggccctgggcagctattccagctggagccgagtgatggtggactccaaggccacgctgggcctcggcggggtggccgtggtcctgggagcagtcatggctgccatgggcttcttctcctacttgggtatccgctcctccctggtcatcctgcaagtggttcctttcctggtgctgtccgtgggggctgataacatcttcatctttgttctcgagtaccaggggccctgacccccatgccagctgtgcggacctttgccctgacctctggccttgcagtgatccttgacttcctcctgcagatgtcagcctttgtggccctgctctccctggacagcaagaggcaggaggtaggggcagctgggccagtactgagggacctgcccctgggttcccaccatggcagggagatggggtggctttaccaccacagagatggcccagagaatggggtgggggacaggggcattgtgccaggagagtaatatttaggccatgtattctccaatttcctacagaaaaataaatttgttttgacaattttttaaatat

SEQ ID NO: 295126 - DNA, 400 bp, Homo sapiens
tttatagtccattatagggtattatctttattttgacttcggatgctcacaacaactctcgggtggtccaattatctccattttacagacaggaaaactgaggttcagaggggtgtggtaagctgctcaaggtcacacagcaaccagcactcgcttgctgagattgccccgctcaccttcaaggatggcacagccctggccctgagctgcatggctgactacggggcccctgtcttccccttccttgccattggggggtacaaaggtaagctaagtgggccctgagaggaagccaaggaagatgcagtattggggcaggaaccatagacgggagggtgggagtggtgctggggattctcgcggcctgggggtagcctggcttctggaagctgtaggccaa

SEQ ID NO: 295127 - DNA, 255 bp, Homo sapiens
  misc_feature (27)..(27): n is a, c, g, or t
agagctttaccctggggttttcggggnccctccagagcaaccgatttatgtcctgccctcggtggagcagttccataagtatcttccctggttcctgaacgaccggcccaacatcaaatgtcccaaaggcggcctggcagcatacagcacctctgtgaacttgacttcagatggccaggttttaggtaagcatggccttgcctggaggggaggacataaatcggttgctctggagggcccccgaaaaccccaggg

SEQ ID NO: 295128 - DNA, 4481 bp, Homo sapiens
cttggctgttcctgaggcctggcctggctccccgctgaccccttcccagacctgggatggcggaggccggcctgaggggctggctgctgtgggccctgctcctgcgcttggcccagagtgagccttacacaaccatccaccagcctggctactgcgccttctatgacgaatgtgggaagaacccagagctgtctggaagcctcatgacactctccaacgtgtcctgcctgtccaacacgccggcccgcaagatcacaggtgatcacctgatcctattacagaagatctgcccccgcctctacaccggccccaacacccaagcctgctgctccgccaagcagctggtatcactggaagcgagtctgtcgatcaccaaggccctcctcacccgctgcccagcctgctctgacaattttgtgaacctgcactgccacaacacgtgcagccccaatcagagcctcttcatcaatgtgacccgcgtggcccagctaggggctggacaactcccagctgtggtggcctatgaggccttctaccagcatagctttgccgagcagagctatgactcctgcagccgtgtgcgcgtccctgcagctgccacgctggctgtgggcaccatgtgtggcgtgtatggctctgccctttgcaatgcccagcgctggctcaacttccagggagacacaggcaatggtctggccccactggacatcaccttccacctcttggagcctggccaggccgtggggagtgggattcagcctctgaatgagggggttgcacgttgcaatgagtcccaaggtgacgacgtggcgacctgctcctgccaagactgtgctgcatcctgtcctgccatagcccgcccccaggccctcgactccaccttctacctgggccagatgccgggcagtctggtcctcatcatcatcctctgctctgtcttcgctgtggtcaccatcctgcttgtgggattccgtgtggcccccgccagggacaaaagcaagatggtggaccccaagaagggcaccagcctctctgacaagctcagcttctccacccacaccctccttggccagttcttccagggctggggcacgtgggtggcttcgtggcctctgaccatcttggtgctatctgtcatcccggtggtggccttggcagcgggcctggtctttacagaactcactacggaccccgtggagctgtggtcggcccccaacagccaagcccggagtgagaaagctttccatgaccagcatttcggccccttcttccgaaccaaccaggtgatcctgacggctcctaaccggtccagctacaggtatgactctctgctgctggggcccaagaacttcagcggaatcctggacctggacttgctgctggagctgctagagctgcaggagaggctgcggcacctccaggtatggtcgcccgaagcacagcgcaacatctccctgcaggacatctgctacgcccccctcaatccggacaataccagtctctacgactgctgcatcaacagcctcctgcagtatttccagaacaaccgcacgctcctgctgctcacagccaaccagacactgatggggcagacctcccaagtcgactggaaggaccattttctgtactgtgccaatgccccgctcaccttcaaggatggcacagccctggccctgagctgcatggctgactacggggcccctgtcttccccttccttgccattggggggtacaaaggaaaggactattctgaggcagaggccctgatcatgacgttctccctcaacaattaccctgccggggacccccgtctggcccaggccaagctgtgggaggaggccttcttagaggaaatgcgagccttccagcgtcggatggctggcatgttccaggtcacgttcatggctgagcgctctctggaagacgagatcaatcgcaccacagctgaagacctgcccatctttgccaccagctacattgtcatattcctgtacatctctctggccctgggcagctattccagctggagccgagtgatggtggactccaaggccacgctgggcctcggcggggtggccgtggtcctgggagcagtcatggctgccatgggcttcttctcctacttgggtatccgctcctccctggtcatcctgcaagtggttcctttcctggtgctgtccgtgggggctgataacatcttcatctttgttctcgagtaccagaggctgccccggaggcctggggagccacgagaggtccacattgggcgagccctaggcagggtggctcccagcatgctgttgtgcagcctctctgaggccatctgcttcttcctaggggccctgacccccatgccagctgtgcggacctttgccctgacctctggccttgcagtgatccttgacttcctcctgcagatgtcagcctttgtggccctgctctccctggacagcaagaggcaggaggcctcccggttggacgtctgctgctgtgtcaagccccaggagctgcccccgcctggccagggagaggggctcctgcttggcttcttccaaaaggcttatgcccccttcctgctgcactggatcactcgaggtgttgtgctgctgctgtttctcgccctgttcggagtgagcctctactccatgtgccacatcagcgtgggactggaccaggagctggccctgcccaaggactcgtacctgcttgactatttcctctttctgaaccgctacttcgaggtgggggccccggtgtactttgttaccaccttgggctacaacttctccagcgaggctgggatgaatgccatctgctccagtgcaggctgcaacaacttctccttcacccagaagatccagtatgccacagagttccctgagcagtcttacctggccatccctgcctcctcctgggtggatgacttcattgactggctgaccccgtcctcctgctgccgcctttatatatctggccccaataaggacaagttctgcccctcgaccgtcaactctctgaactgcctaaagaactgcatgagcatcacgatgggctctgtgaggccctcggtggagcagttccataagtatcttccctggttcctgaacgaccggcccaacatcaaatgtcccaaaggcggcctggcagcatacagcacctctgtgaacttgacttcagatggccaggttttagacacagttgccattctgtcacccaggctggagtacagtggcacaatctcggctcactgcaacctctacctcctggattcagcctccaggttcatggcctatcacaagcccctgaaaaactcacaggattacacagaagctctgcgggcagctcgagagctggcagccaacatcactgctgacctgcggaaagtgcctggaacagacccggcttttgaggtcttcccctacacgatcaccaatgtgttttatgagcagtacctgaccatcctccctgaggggctcttcatgctcagcctctgccttgtgcccaccttcgctgtctcctgcctcctgctgggcctggacctgcgctccggcctcctcaacctgctctccattgtcatgatcctcgtggacactgtcggcttcatggccctgtggggcatcagttacaatgctgtgtccctcatcaacctggtctcggcggtgggcatgtctgtggagtttgtgtcccacattacccgctcctttgccatcagcaccaagcccacctggctggagagggccaaagaggccaccatctctatgggaagtgcggtgtttgcaggtgtggccatgaccaacctgcctggcatccttgtcctgggcctcgccaaggcccagctcattcagatcttcttcttccgcctcaacctcctgatcactctgctgggcctgctgcatggcttggtcttcctgcccgtcatcctcagctacgtggggcctgacgttaacccggctctggcactggagcagaagcgggctgaggaggcggtggcagcagtcatggtggcctcttgcccaaatcacccctcccgagtctccacagctgacaacatctatgtcaaccacagctttgaaggttctatcaaaggtgctggtgccatcagcaacttcttgcccaacaatgggcggcagttctgatacagccagaggccctgtctaggctctatggccctgaaccaaagggttatggggatcttccttgtgactgccccttgacacacgccctcctcaaatcctaggggaggccattcccatgagactgcctgtcactggaggatggcctgctcttgaggtatccaggcagcaccactgatgctcttggggctgggctggtcctcccatcttcacctcgggcctggatcccaggcctcaaaccagcccaacccgagcttttggacagctctccagaagcatgaactgcagtggagatgaagatcctggctctgtgctgtgcacataggtgtttaataaacatttgttggc

SEQ ID NO: 295129 - DNA, 1146 bp, Homo sapiens
aaaaccctgtctctacacctccattcccagggcaagctcactctctggcaacaagctccctggggtgatttttcttctagaagagtccacggggacaggtaaggagtaggaggcagggagtccagttctgggacggggattccgtgatgcaaagtgaagagagagggacggggcccattccgagggtttctccctggtttctcagacagctcctgggccaagactcagggaaacattgagacagagcgcttggcacagaagtagcggggtcagggcgaagtcccagggcctcaggcgtggctctcaggatctcaggccccaaaggcggtgtatggattggggaggcccagcgctgggcattccccatctttgcagggtttctcttctccctctcccaacctgtgtcgggtccttcttcctgggtactcaccgggctgccccagttctcactcccattgagtgtcgggtttctagagaagccaatcaatgtagccgcggtcccggttctaaagttcccacgcacccaccgggactccgattcttcccagtcgccgaggatggtgtcatggcgccccgaaccctgcttctgctgctctcgggggccctggtcctgacccagacctgggcaggcttccactccttgaggtatttccacaccaccatgtcccggcccggccgcgcggatccccgcttcctctccgtgggcgacgtggacgacacgcagtgcgtgcggctcgacagcgacgccacgagtcccaggatggagccgcgggcgccgtggatggagcaggaggggccggaatattgggaagaggagacagggaccgccaaggccaaagcacagttttaccgagtgaacctgcggaccctgagcggctactacaaccagagtgaggcctgtgagtgacaccggccgggggcgcagatcactacccctccacatcccccacggaccgcccgggtctccccgagtctctgggtccgagatccacgccgaggcagcgggacctggagacccttgacccgggagaggcccaggagccgttacccggtttcattttcagccaaaatccccgcaggggctgccagccacacagagtcatggacaggtctctacagacacaacttagtgccagcttggatgaa

SEQ ID NO: 295130 - DNA, 810 bp, Homo sapiens
attaggagatgtcctggactcacacagaaactcagggctatggaatgaagggcaagctcactctctggcaacaagctccctggggtgatttttcttctagaagagtccacggggacaggctgccccagttctcactcccattgagtgtcgggtttctagagaagccaatcaatgtagccgcggtcccggttctaaagttcccacgcacccaccgggactccgattcttcccagtcgccgaggatggtgtcatggcgccccgaaccctgcttctgctgctctcgggggccctggtcctgacccagacctgggcaggcttccactccttgaggtatttccacaccaccatgtcccggcccggccgcgcggatccccgcttcctctccgtgggcgacgtggacgacacgcagtgcgtgcggctcgacagcgacgccacgagtcccaggatggagccggaggggccggaatattgggaagaggagacagggaccgccaaggccaaagcacagttttaccgagtgaacctgcggaccctgagcggctactacaaccagagtgaggcctgtgagtgacaccggccgggggcgcagatcactacccctccacatcccccacggaccgcccgggtctccccgagtctctgggtccgagatccacgccgaggcagcgggacctggagacccttgacccgggagaggcccaggagccgttacccggtttcattttcagccaaaatccccgcaggggctgccagccacacagagtcatggacaggtctctacagacacaacttagtgccagcttggatgaa

SEQ ID NO: 295131 - DNA, 868 bp, Homo sapiens
attaggagatgtcctggactcacacagaaactcagggctatggaatgaagggcaagctcactctctggcaacaagctccctggggtgatttttcttctagaagagtccacggggacagggtttctcttctccctctcccaacctgtgtcgggtccttcttcctgggtactcaccgggctgccccagttctcactcccattgagtgtcgggtttctagagaagccaatcaatgtagccgcggtcccggttctaaagttcccacgcacccaccgggactccgattcttcccagtcgccgaggatggtgtcatggcgccccgaaccctgcttctgctgctctcgggggccctggtcctgacccagacctgggcaggcttccactccttgaggtatttccacaccaccatgtcccggcccggccgcgcggatccccgcttcctctccgtgggcgacgtggacgacacgcagtgcgtgcggctcgacagcgacgccacgagtcccaggatggagccggaggggccggaatattgggaagaggagacagggaccgccaaggccaaagcacagttttaccgagtgaacctgcggaccctgagcggctactacaaccagagtgaggcctgtgagtgacaccggccgggggcgcagatcactacccctccacatcccccacggaccgcccgggtctccccgagtctctgggtccgagatccacgccgaggcagcgggacctggagacccttgacccgggagaggcccaggagccgttacccggtttcattttcagccaaaatccccgcaggggctgccagccacacagagtcatggacaggtctctacagacacaacttagtgccagcttggatgaa

SEQ ID NO: 295132 - DNA, 924 bp, Homo sapiens
gtaccaggccccagaggcagcggaaagggagactgtggggaactaggagcaacagcaggcatggaccaaagcagtgaaggatgtatgaaaaagattagcagtgtgaatcttgacaaacttataaatgacttctcacagatagaaaagaaaatggtagaaaccaatggaaagaacaatatactggatattcagttggaaaaaagtaattgcctattaaaagtaatgcaagcaaaggaggtctccattaaagaagaatgtgctactcttcataatataataaaagggctacaacagaccattgaatatcaacagaatttgaaaggtgaaaatgaacaactaaaaataagtgctgatcttataaaagagaagttaaagtctcatgaacaggaatataagaataatattgccaaacttgtaagtgaaatgaaaatcaaagaggagggatataagaaagaaataagcaaactttatcaggacatgcagagaaaagttgaattaaatgaagaaaagcacaaagaactaatagagaaaaaggagatggaaatttcagagttaaatgcaaagctaagaagtcaagaaaaagaaaaacaaaatgaaataatcaagctacaactagaatttgatgccaaactagcaagagttcagactaaatcaaaatcatatcaggattctactgttttgccacaaagtatctacagaaggaaacttcagcattttcaagaagaaaaaacaaggagattgcaattcttcgtaataccattcgcgatttagagcaacgcctttctgttggcaaagattctcaccttaagcgtagacggttttgagcttagcagtaaattcattagttggtatttatttaaaagcaatcgaaagtttcacttctgttttcaatatatgcatacagcctacataacaaacgaagtc

SEQ ID NO: 295133 - DNA, 423 bp, Homo sapiens
aatagatatggataattatttattcaatggagctgactcacaattcagaacacccaatgtgatttattctttggttggggaaacaattattgatccggtgttgattcatgttctggaaaccacatgaaaatacctaagcagccgcagatgctgagcggagctgggccaagttggtaagaactgctggtggtaggagctccagcatagcgcacagggcgggcccagagaaaggcgggcccattgttgggggattcggcttccggaggaggggacagcattcaggggtgtaccaggccccagaggcagcggaaagggagactgtggggaactaggagcaacagcaggtacactccaaattctattgacggttcgaaattcccgctttctccatagagattcctttcttcatatttcattacagtg

SEQ ID NO: 295134 - DNA, 431 bp, Homo sapiens
gaaatttttaacaaatgaattttatttatttcattttattcagttgaattaaatgaagaaaagcacaaagaactaatagagaaaaaggagatggaaatttcagagttaaatgcaaagctaagaagtcaagaaaaagaaaaacaaaatgaaataatcaagctacaactagaagtaagtgtttaagagtctgctaaacttgaggacacatcccttagtctaaactgtactttgattgtttttcatcacagtgagatacattttaggattagaagcaattctgtgagagggcttcacacatgctcattctccaccaaatgattgcagtaatcacataccatacaactgtcatctgcattgcctttcagcacttgacctgaaagtggacccttgagttgttcgaaagttcctggtttttagggaggatattgctt

SEQ ID NO: 295135 - DNA, 452 bp, Homo sapiens
aacaatatactggatattcagttggaaaaaagtaattgcctattaaaagtaatgcaagcaaaggaggtctccattaaagaaggttagttatttgctgcctgaggaatgctaattctaatgaaagtgtttttcagttcaacagtgattaatattacaccatatatttgtaaagtgttttaagtccacatagaattttccagattatcatctcatttatatccttactatagccctgaaagacatgtaagatgggtattattactctacctcaccaatgaagaaacatagaatgagacaagttaaataatctttctgagactgctcaactttctgaggccaataagaaatggccaattgaagtctcaatacaggcctataaaaaccatagggaaaaaaattaagttgaatttctaccttataattacatcaaaataaatgtcaaatgtgtcaaa

SEQ ID NO: 295136 - DNA, 534 bp, Homo sapiens
tcagctcggtaccatatttgataatttctaaggagtgtttttcccccccgcctccaacactttcaggggcagacagcatccgtgttctaagcaaacgtgcccgctacagggtctggggggatattaccctctagtcaacttagtctcactgaagatatgacccagtcagtgggtcagggagagtattccatgtaacaggtatcacaagtgcagggagaaaaggctgctgcagcttgcctgtgatgtcagagcaatgggctttagggtccagagcaggaggtgagcagggcttctggtggtgcttgccaggccacacaccctgctgatggctccacaaggcaagggatgagcgggcttccagatttcttctgggcctcagctggaacagctgatggcttggaacagctgctccaaaggagagctccgcttgactcattgcatgcgatcctattcatttgccctaactctccccatgttaggaatcaaccgtcttcccagtaaggaaacaggctcaagttttactcaaggtcacag

SEQ ID NO: 295137 - DNA, 848 bp, Homo sapiens
ctcccggcctcgcctcgcagacgcgacgggccggggaggaagcgctcggagcagtgcaggtttcgttatcctgtgttaggtcactccggagaggggaaagcggcccacagcgtcgcgcgacccggaaacgacacaacgaggcccaatcttttagactcgagtttaggccccggggtggagtctccggaccgggtccccccacccccgctacaggggcagtgcgcaggcgcgagggacgcacaaccccagcccctgtcccagtgagcccgtcgccatggaatccctgcagactccccagcaccgcgaaaatcaagataaaagggagaaggagtatggggtaaaacacatgcctatgggcaataatgcagggaatcttgagcccgaaaagagaaaggcagtaagagttgccttgagttcagcaacagctgcacagaatatcccgtccagtgtccactgtggctgctccaagcaatggagactcaggctaccatcggagtcgctgcaaagtcggggacaagtgatgaagcggccgaataacattttaaagctcaggaatctggatctgttgatctacccttggccagaacttagaagacggcaggttgcttctgacctaatgagcctcctccttctccccgctttttccggccttacttgggcccccttccttttcctctttacgtatctgcctccttttctcaatctcctcactgttggttttgtatcctattttctggtatagtttctgtgatttctttcttttatttattattattattgttgttgagaccgagttttgcccttgttgcccaggctggagtgcaatggcgcgaacctggctcactcca

SEQ ID NO: 295138 - DNA, 799 bp, Homo sapiens
agacgctcaggacttggaccgtccagttgttcggaggccagcctatagccaatggtatcccgagggctcgctctctccgggcgtttgtgctcccctctctcttctaacccagtttctacctttcagtgctttggaatcttagccctctgtctctattcgcttttctgtatttgccttgcctcagggacgcacaaccccagcccctgtcccagtgagcccgtcgccatggaatccctgcagactccccagcaccgcgaaaatcaagataaaagggagaaggagtatggggtaaaacacatgcctatgggcaataatgcagggaatcttgagcccgaaaagagaaaggcagtaagagttgccttgagttcagcaacagctgcacagaatatcccgtccagtgtccactgtggctgctccaagcaatggagactcaggctaccatcggagtcgctgcaaagtcggggacaagtgatgaagcggccgaataacattttaaagctcaggaatctggatctgttgatctacccttggccagaacttagaagacggcaggttgcttctgacctaatgagcctcctccttctccccgctttttccggccttacttgggcccccttccttttcctctttacgtatctgcctccttttctcaatctcctcactgttggttttgtatcctattttctggtatagtttctgtgatttctttcttttatttattattattattgttgttgagaccgagttttgcccttgttgcccaggctggagtgcaatggcgcgaacctggctcactcca

SEQ ID NO: 295139 - DNA, 519 bp, Homo sapiens
tcaggcctgcctagatgttgtaggggatcatgagactatcctgtgtatcccacaaagaagacaggcaagattccttggctgatgcacctccacagaggtctccttctcagccaagcctcagggaattgtggcattcatgctgtacccgtgatctgttcccactggaggaggagatgtctagactgtgatggggtctctgagaactgctcttctgactttattcctgaaagaggctgtgtgcaagaattgagtcccagggggactggaatgttgtctggtgaatgtgtgggaccgcatccacccctcaccagcttgtatcctcacctttatctgatgttatggctgctcaaagtatctgtcccaaaatgaaattccaagacaatgaaggagtgacgtgaaggtcctgctcagctaggaactgaatatgaagtaaattcaaggggccctgaggactggactgctagtgtttctccatgggatgtacactggagaataaagcagtgaaatatttctgttcct

SEQ ID NO: 295140 - DNA, 820 bp, Homo sapiens
gaaataaaaggttagtacatgacatttaattgattcggtttactcctacttgctggtgtgtttggagcctcagtgacttcctatttttcaaaaaatcaagaaaggctaaatttaagtggagaaaactaactagtctagtgtcattgcagaggagggctggatgaagttgagtgcttttgagattctcttccacagctagagaactgttccctgtgttctcacacatcagtctggaggttaaatgtctccggctagtcgtttcctgtgagttgagagttttcctttggtcatgccctgtgtactccttcactccgaaatgctgttccacactgttagataacaacagagcaaagctcacttgatgattcaagtgtgagaaatatgactgggggcttatccgaggggttcaggagaacaggagagcaccgtgcagttctgctcccggaggggaaggagaggcagcgtccgcatttcagctggtccttgaagaaggaggaggagctgcttagggtaaggaaaaggcatttcagttggaaaacacaggccagggaggcgttagaggatgtgagacattcatccagaagacgtggagttggttctcttctccgttggggagtccctcactcgtactcaaatttatttgtttgtttgtttatttatttatttaatttattttgagacagggtcttgctctgtagcccaggctaggctggagtgcagtggtgtgatcacagctcactacagccttgaactcctgggctcaagtgctcttcctgccttagcctccctagtagctcctgggagtacaggtgtgctccac

SEQ ID NO: 295141 - DNA, 368 bp, Homo sapiens
ggcttttccactgaggttcaggacttttccggaagttaccgtgctgtcaaatccctccgccccctgcaggaaacggaatccttccgcagctgcacgacgcctgtgtgtctggcctttccttcttcttctcttccccggcagcacagtgtggctgtttgtctccttgcccgccaaagttctgcccagtccaacgactccacgcagctcgcccttggacgcagcagctctcctgaattaccagccagtatcgtctagctacctgcaggacatctcactttgataactcaaagtactttaattgttcactgtttcttcagtgttcctggtttccattaatgacttcatctattcagttgcctgagcaaaaa

SEQ ID NO: 295142 - DNA, 2482 bp, Homo sapiens
aatacagtttccaaatatgagactgtttttactataaaaatacaactggccaggtgcagtggctcacgcctaaaatcccagctctttggatggccaaggcaggcggatcacttgaagtcaggagtttgagaccagcctggccaacagggtgaaatcttctctactaaaaatacaaaaattagccaggtgtggtgatggattcctgtaatcccagctactcaggaggctgaggcaggagaatcacttgaacctgggaggcagaagtttcagtgagctgagatcgtgccactgcaatccagcctgggtgacagagcaagactttgtctcaaaaaaaacaaacaaacaaacaaacaaaaaacaaactacaacttccttacaagacataatgacttcttttctccataaatgtctctagtattagttacatgattgtataatcttctaccttattttaacttgtcatagctatatatctgtgaagaaaatagaagagctaatgaatatgatttcaagaaagctttggacttgttggaatatattgatgaggaagaagatataaatataaatgatctaaaactggaaatcctttgcaaagctcttcagagagataactggtccagttctgatggcaaagatgatccaattgaagtatctaaagacagtatatttgtgaagatcttacagaaacttttaaaagatggcattcagctcagtgagtacttaccggaggtgaaagacctgctacaagcggatcagcttggaagcttaaagtccaatccttacttcgagtttgttttgaaagcaaattatgaatattatgttcagggacaaatataactttttctaaaaatggccattgtttatgaaatctgtataagtgtgtccttatacaaattttaggccataaacaagtgtaagtttgtacaatttcataacatgtatagctgagtttttatactttatatgtaggaagctaatataaaatagttatgtaactgtgattttggttttcagttatgtgacttgttttttccacctgaaatgtgtcagttgttgttcctgtactcggtgccctttctttttactctcacgtggtcccaggttctggagttcttgtcctggttctagctgctcacatgtacaaatcacttctaggcctcagtttctgcgactatgaaaattactagattgcactagcttgtctctaaaattgctgtgactccagatactttgcactgaagagaatctagggtgtttgatatctgtttcagttagggctaatgggaaatgtctagtaagataaatgtcaacttttgctgacttattatgagatgaaaaaccaaaggagagtgggcctaactcatgtgagcttgataactgatgaactcattgggagcattttaaacttttctacataaataataaatgagcactaatgaaagtattttagtgaatgaaacgtttatgtggttttctaacctatctagaaattactgttgatgtttagttctaatctttcagtgtggggattcagccagcctcatgtattttcagaatgactcatgaatctttaccacagtctgcctagctagtcaaaagcatgaatgatactagaaaccattataggttttcctaatatggcaattgatgtgactgaaaggtactgtactctcagagctttgtcctgaccagtgtcatcactcactcaatgtttatctgggttttaaataaaggccagaggttggacagggagttgctggcatgtccgcggcttggcccagtagaatgcccactaaccatcttgctccagcagctgaaaaggtcagaagttaaacatggtgaagagtccggttcctggattcacagagcccagcatcaggccgtctcccccgcaggctgcaaggccagcccttgagtatgtttggaagagcaggttaatggagctgtttgtaaatcaaagggaagaaattagcagcctgttctttttctctttgcagcttgtatgttaggacagcattagggtctgggttaggaacatgttggaaggtactaagagaagttaggaagagcagcttgtcagatggccagtaagaaaccgctgagtacttgtatcgtaagatgaggctttgcttttacgtggaggtcagctgtcagtgttcacgtctcacctgtaggaccctgtcgggtgataatgtgctgcgagacacacaggctcccatctccctcccgtgctgctgcaaacctggtgatccctggtgtatgggacagtaccgcaggaaagcccatctgatcatgccccagaacccactgatcgcgtggacgtagaacgactgctcttaccgtgtgaagtagagtcatcctgttcaagggaagaaaaagctccctcttttaatcctgtttctctctaagttagtagctattacacccaaatggttgagtttttaaaaattattttaacagtaaaaatgaaattaagacctag

SEQ ID NO: 295143 - DNA, 5236 bp, Homo sapiens
tgcgtttgacgtcatcatcgcgcgccatctcttcccttaggtgtttaagttccgcgcgcaggccaggctgcaacctgacggccagatccctcgctgtcctagtcgctgctccttggagtcatgttcccagccgccccttctccgcggaccccgggtaccgggtcccgaaggggcccgctggccggactcgggcccggctccacgccccggacggctagcaggaagggtctgcccctggggtctgcagtcagctccccagtgctcttctcgccggtcggccggcgtagctcgctaagctcgcggggaacaccaacacgaatgttcccacaccactccataactgagtctgtgaactatgatgtgaaaacgtttggatcttctcttcctgttaaagtcatggaagccctaacattggctgaagtcgatgaccagctgaccattaacatagatgaaggtggatgggcttgtctggtgtgcaaagagaagctcattatttggaagattgctctgtcacctattactaagttatccgtttgcaaagaacttcagctgccacctagtgatttccactggagtgccgacttagtggctctttcttactcttctccctcaggtgaagcacattctactcaggctgttgctgtcatggttgccaccagagaaggatctatccgctattggccaagccttgctggtgaagatacctacacagaggcttttgtagattcgggaggtgataagacttacagtttcctaacagcagtgcagggaggaagttttattttgtcttcatcaggaagccaactaattcggttgatacctgagagctcaggaaagattcatcagcatatcctgcctcaggggcaaggcatgctttcaggaattggtcgaaaagtttcttctctttttggaattttatctcctagtagtgatctcacactttcaagtgttctctgggatagagagagatcaagcttttatagcctgacgagttcaaacatcagtaaatgggaattagatgattcttcagaaaagcatgcatacagttgggatataaatagagccctgaaggaaaacattaccgatgctatttggggatctgaaagtaactatgaagctattaaagaaggagtcaacattcgatatttggacttgaagcaaaactgtgatgggctggtgattttggcagcagcatggcactcagcagacaatccatgtctcatctattactctctgataacaatagaagataatggttgccaaatgtcagatgcagttactgtagaagtcactcaatataatccaccttttcagtctgaagacctgattttgtgtcagttgacggtcccaaacttttcaaaccagactgcctatctgtataacgaaagtgctgtctatgtgtgctccacaggaactgggaaattttctcttccccaggagaaaattgtctttaatgcacaaggagatagtgttttaggtgctggtgcctgtggtggtgttcctatcattttttctagaaacagtggactggtgtctattacttcaagggaaaatgtgtctatattggcagaagacttggaagggtctttagcatcttcagttgctggaccaaacagtgagagtatgatttttgagaccactacaaagaatgaaactatagcccaggaagataaaatcaagttgctgaaagctgcctttctgcaatactgcagaaaagatttaggtcatgctcaaatggtggttgatgagctcttttcctctcactctgatttggattctgattctgaactagacagggcagttacccaaatcagtgtagacctgatggatgactacccagcatctgacccacggtgggctgagtctgtccctgaggaagcacctgggttcagcaatacgtcactgattatccttcaccagctagaagacaagatgaaagctcactcttttcttatggactttattcatcaagttggcttatttggacgtctaggcagttttccagttagagggacaccgatggccactcgactgttgctctgtgagcatgccgaaaagctgtcagccgccattgttctcaagaaccaccactcccggctttctgaccttgtcaacacagccatattgattgctttgaacaagagggagtatgaaatcccatccaacctgactcctgcagatgtctttttcagggaggtatcccaagtagataccatctgtgagtgcttactggagcatgaggagcaagtcttgagggatgcacctatggattccattgaatgggctgaagtggtgatcaatgtgaacaatattctcaaggatatgctgcaggctgctagtcattatcgccaaaatagaaactctttgtatagaagagaagaatcactagaaaaagaacctgaatatgttccatggacggcaacaagtggtcctggtggcatccgaacggtaataatacgccagcatgagattgtcctgaaggtggcttatccacaggcagacagcaacctccgaaacatcgtgaccgagcagctggtagccctgatcgattgcttcctggatggttatgtttctcagcttaagtctgtggataaatccagtaatcgggaaagatatgacaatctggagatggaatacctacagaaaagatcagatctcttatctcctcttctttcactaggccagtacctgtgggctgcttctctagcagagaaatactgtgactttgatatattggtacaaatgtgtgagcagactgacaaccagagccgactccagcgctacatgacccagtttgctgatcagaatttttcagactttctcttccgttggtatctggagaaaggaaagcgaggcaaattattatctcagcccatttctcagcatggacagttggcaaattttttgcaagctcatgaacatctcagctggttacatgaaattaatagccaagaattagaaaaggctcatgcaacacttctgggtttggcaaatatggaaactcgttactttgcaaagaagaaaacccttcttggcttgagtaaattggctgcattagcttcagacttttcagaggatatgctacaagaaaaaattgaagaaatggctgagcaggagcgctttctactgcatcaggagaccctacctgaacagctgctggcggagaaacagctaaatctcagtgcgatgccagtattgactgcaccacaactcattggtctatatatctgtgaagaaaatagaagagctaatgaatatgatttcaagaaagctttggacttgttggaatatattgatgaggaagaagatataaatataaatgatctaaaactggaaatcctttgcaaagctcttcagagagataactggtccagttctgatggcaaagatgatccaattgaagtatctaaagacagtatatttgtgaagatcttacagaaacttttaaaagatggcattcagctcagtgagtacttaccggaggtgaaagacctgctacaagcggatcagcttggaagcttaaagtccaatccttacttcgagtttgttttgaaagcaaattatgaatattatgttcagggacaaatataactttttctaaaaatggccattgtttatgaaatctgtataagtgtgtccttatacaaattttaggccataaacaagtgtaagtttgtacaatttcataacatgtatagctgagtttttatactttatatgtaggaagctaatataaaatagttatgtaactgtgattttggttttcagttatgtgacttgttttttccacctgaaatgtgtcagttgttgttcctgtactcggtgccctttctttttactctcacgtggtcccaggttctggagttcttgtcctggttctagctgctcacatgtacaaatcacttctaggcctcagtttctgcgactatgaaaattactagattgcactagcttgtctctaaaattgctgtgactccagatactttgcactgaagagaatctagggtgtttgatatctgtttcagttagggctaatgggaaatgtctagtaagataaatgtcaacttttgctgacttattatgagatgaaaaaccaaaggagagtgggcctaactcatgtgagcttgataactgatgaactcattgggagcattttaaacttttctacataaataataaatgagcactaatgaaagtattttagtgaatgaaacgtttatgtggttttctaacctatctagaaattactgttgatgtttagttctaatctttcagtgtggggattcagccagcctcatgtattttcagaatgactcatgaatctttaccacagtctgcctagctagtcaaaagcatgaatgatactagaaaccattataggttttcctaatatggcaattgatgtgactgaaaggtactgtactctcagagctttgtcctgaccagtgtcatcactcactcaatgtttatctgggttttaaataaaggccagaggttggacagggagttgctggcatgtccgcggcttggcccagtagaatgcccactaaccatcttgctccagcagctgaaaaggtcagaagttaaacatggtgaagagtccggttcctggattcacagagcccagcatcaggccgtctcccccgcaggctgcaaggccagcccttgagtatgtttggaagagcaggttaatggagctgtttgtaaatcaaagggaagaaattagcagcctgttctttttctctttgcagcttgtatgttaggacagcattagggtctgggttaggaacatgttggaaggtactaagagaagttaggaagagcagcttgtcagatggccagtaagaaaccgctgagtacttgtatcgtaagatgaggctttgcttttacgtggaggtcagctgtcagtgttcacgtctcacctgtaggaccctgtcgggtgataatgtgctgcgagacacacaggctcccatctccctcccgtgctgctgcaaacctggtgatccctggtgtatgggacagtaccgcaggaaagcccatctgatcatgccccagaacccactgatcgcgtggacgtagaacgactgctcttaccgtgtgaagtagagtcatcctgttcaagggaagaaaaagctccctcttttaatcctgtttctctctaagttagtagctattacacccaaatggttgagtttttaaaaattattttaacagtaaaaatgaaattaagacctag

SEQ ID NO: 295144 - DNA, 2131 bp, Homo sapiens
tctgtttgttacagcttagatacactactctcttctaccagtcattacttccttggccatgttccgttggaactcagggctcctgcttacctcaattcttcacttctgctgaactctgtgttactgctgcctagaaaagggtgtatgtggttaggagtaataggtgagggtgaattcctgggggacatactgagttagctgcgggatcctgatatttggctgagagtctaagaaattgtttcctaggtaacttggtataattactctttggtcatgctaattttaaatgtcagatgaacaaatcaagagtaaattgggaaagttccataggaagcctaagcactcatcttaaccttacttagtcttctcttaactggacttttctagcccaggaagaggttaggatagttgttcttcagagtttggtctacctttaagttttcatgattcaatactcttaagatactttgttttaaaattactgaaagcctgattaaaaggagatgtgagaagaaagaatatttgtagaatggtgtttccagcagtgagtcagaatctaaaatatgcagagaagggaaatcagatgcatcttcaaaatactggatttgatgtgaaagattttctgtttgggtttgttctacagttatccgtttgcaaagaacttcagctgccacctagtgatttccactggagtgccgacttagtggctctttcttactcttctccctcaggtgaagcacattctactcaggtaggtgacttaaaagcttatttaaataaactttttacaacaaggacatcctaaagttagaggaatcatcctctttgattttgagatataactataaacctatagaaatcaagatattgtggtattggcaaagagagctacacacataggtcagtgtaacagaatagagaatacagttatagatccacataaaggcacccatttggtctttgatgaaggtgcaaaagcaattcagaaaggatggtttttgacgatgatttttctctgtatcaatgcatagtgtaggaacatttgtaattttaaaattacaaatgaccaatttgtattgtattgtattgaattttcccttaaacctcataccttgttacaaagattaatttgaaatgggtcatagatctaaatgtaaaacagtaaaacttttagaagaaaacagaagaaaatcatcatgacctgagattagacagagttcttggaaatcaccaaaagcatgatccataaaagaaaagtttgataaaattaataataaaattaaaataaaataaaaatttaaagcgttgctttgccaaagacaagaaaatgaagagacaagttacagagtaagaagaatttgcaaatcatgtatccagcaaaggacttgtatccagaatattttttaaaattctaaacttgataagaaaacaatgcagtttaaaaacaggggctaggacttgaacagacacttagtgaggatataaggatggcacataagcacatgaagagatgttcagcatcattagccattagaaaaatgcaaaccaaaacactggtgagttcttatttctgatttttcttgatcaaatagtaaattgtcctgtttctttgtatcattgccatcagactgctggtttttgggttcctcttttattgtgattgctgattgttgtgatcttgttttgaggctgttgctgtcatggttgccaccagagaaggatctatccgctattggccaagccttgctggtgaagatacctacacagaggcttttgtagattcgggaggtgataagacttacagtttcctaacagcagtgcaggttcacaaagaaacaaaatctggctgagcatggtggctcatgcgtgcagtctcaccactttgaatggtcttgaactcctggtctcaagcagtcttcccgcttcggcctcccaaagtgctgagattatagacatgagccactgctccggccaggtctggtggactcttaagcacctaaagctagatgagcttaaatctcatctaagccaatatttataaaatgtatttgaccacaacatatggtaaaagctgatgttttatattctgtctttcaaaaatgttgagatctgcaaaatgacccgctgtttg

SEQ ID NO: 295145 - DNA, 786 bp, Homo sapiens
aatacagtttccaaatatgagactgtttttactataaaaatacaactggccaggtgcagtggctcacgcctaaaatcccagctctttggatggccaaggcaggcggatcacttgaagtcaggagtttgagaccagcctggccaacagggtgaaatcttctctactaaaaatacaaaaattagccaggtgtggtgatggattcctgtaatcccagctactcaggaggctgaggcaggagaatcacttgaacctgggaggcagaagtttcagtgagctgagatcgtgccactgcaatccagcctgggtgacagagcaagactttgtctcaaaaaaaacaaacaaacaaacaaacaaaaaacaaactacaacttccttacaagacataatgacttcttttctccataaatgtctctagtattagttacatgattgtataatcttctaccttattttaacttgtcatagctatatatctgtgaagaaaatagaagagctaatgaatatgatttcaagaaagctttggacttgttggaatatattgatgaggaagaagatataaatataaatgatctaaaactggaaatcctttgcaaagctcttcagagagataagtaagtgctcgtggcattgcttctttggaaagtatagaaactgcttttcctctgctctcaccacatgacagtcaataacagaagacttctgtgaccagacgtgttgggatttcccacctcctacactgggcaaccagtgagttctgttggtgggcaccagctgaatgtcctttaa

SEQ ID NO: 295146 - DNA, 6173 bp, Homo sapiens
tgcgtttgacgtcatcatcgcgcgccatctcttcccttaggtgtttaagttccgcgcgcaggccaggctgcaacctgacggccagatccctcgctgtcctagtcgctgctccttggagtcatgttcccagccgccccttctccgcggaccccgggtaccgggtcccgaaggggcccgctggccggactcgggcccggctccacgccccggacggctagcaggaagggtctgcccctggggtctgcagtcagctccccagtgctcttctcgccggtcggccggcgtagctcgctaagctcgcggggaacaccaacacgaatgttcccacaccactccataactgagtctgtgaactatgatgtgaaaacgtttggatcttctcttcctgttaaagtcatggaagccctaacattggctgaagtcgatgaccagctgaccattaacatagatgaaggtggatgggcttgtctggtgtgcaaagagaagctcattatttggaagattgctctgtcacctattactaagttatccgtttgcaaagaacttcagctgccacctagtgatttccactggagtgccgacttagtggctctttcttactcttctccctcaggtgaagcacattctactcaggtaggtgacttaaaagcttatttaaataaactttttacaacaaggacatcctaaagttagaggaatcatcctctttgattttgagatataactataaacctatagaaatcaagatattgtggtattggcaaagagagctacacacataggtcagtgtaacagaatagagaatacagttatagatccacataaaggcacccatttggtctttgatgaaggtgcaaaagcaattcagaaaggatggtttttgacgatgatttttctctgtatcaatgcatagtgtaggaacatttgtaattttaaaattacaaatgaccaatttgtattgtattgtattgaattttcccttaaacctcataccttgttacaaagattaatttgaaatgggtcatagatctaaatgtaaaacagtaaaacttttagaagaaaacagaagaaaatcatcatgacctgagattagacagagttcttggaaatcaccaaaagcatgatccataaaagaaaagtttgataaaattaataataaaattaaaataaaataaaaatttaaagcgttgctttgccaaagacaagaaaatgaagagacaagttacagagtaagaagaatttgcaaatcatgtatccagcaaaggacttgtatccagaatattttttaaaattctaaacttgataagaaaacaatgcagtttaaaaacaggggctaggacttgaacagacacttagtgaggatataaggatggcacataagcacatgaagagatgttcagcatcattagccattagaaaaatgcaaaccaaaacactggtgagttcttatttctgatttttcttgatcaaatagtaaattgtcctgtttctttgtatcattgccatcagactgctggtttttgggttcctcttttattgtgattgctgattgttgtgatcttgttttgaggctgttgctgtcatggttgccaccagagaaggatctatccgctattggccaagccttgctggtgaagatacctacacagaggcttttgtagattcgggaggtgataagacttacagtttcctaacagcagtgcagggaggaagttttattttgtcttcatcaggaagccaactaattcggttgatacctgagagctcaggaaagattcatcagcatatcctgcctcaggggcaaggcatgctttcaggaattggtcgaaaagtttcttctctttttggaattttatctcctagtagtgatctcacactttcaagtgttctctgggatagagagagatcaagcttttatagcctgacgagttcaaacatcagtaaatgggaattagatgattcttcagaaaagcatgcatacagttgggatataaatagagccctgaaggaaaacattaccgatgctatttggggatctgaaagtaactatgaagctattaaagaaggagtcaacattcgatatttggacttgaagcaaaactgtgatgggctggtgattttggcagcagcatggcactcagcagacaatccatgtctcatctattactctctgataacaatagaagataatggttgccaaatgtcagatgcagttactgtagaagtcactcaatataatccaccttttcagtctgaagacctgattttgtgtcagttgacggtcccaaacttttcaaaccagactgcctatctgtataacgaaagtgctgtctatgtgtgctccacaggaactgggaaattttctcttccccaggagaaaattgtctttaatgcacaaggagatagtgttttaggtgctggtgcctgtggtggtgttcctatcattttttctagaaacagtggactggtgtctattacttcaagggaaaatgtgtctatattggcagaagacttggaagggtctttagcatcttcagttgctggaccaaacagtgagagtatgatttttgagaccactacaaagaatgaaactatagcccaggaagataaaatcaagttgctgaaagctgcctttctgcaatactgcagaaaagatttaggtcatgctcaaatggtggttgatgagctcttttcctctcactctgatttggattctgattctgaactagacagggcagttacccaaatcagtgtagacctgatggatgactacccagcatctgacccacggtgggctgagtctgtccctgaggaagcacctgggttcagcaatacgtcactgattatccttcaccagctagaagacaagatgaaagctcactcttttcttatggactttattcatcaagttggcttatttggacgtctaggcagttttccagttagagggacaccgatggccactcgactgttgctctgtgagcatgccgaaaagctgtcagccgccattgttctcaagaaccaccactcccggctttctgaccttgtcaacacagccatattgattgctttgaacaagagggagtatgaaatcccatccaacctgactcctgcagatgtctttttcagggaggtatcccaagtagataccatctgtgagtgcttactggagcatgaggagcaagtcttgagggatgcacctatggattccattgaatgggctgaagtggtgatcaatgtgaacaatattctcaaggatatgctgcaggctgctagtcattatcgccaaaatagaaactctttgtatagaagagaagaatcactagaaaaagaacctgaatatgttccatggacggcaacaagtggtcctggtggcatccgaacggtaataatacgccagcatgagattgtcctgaaggtggcttatccacaggcagacagcaacctccgaaacatcgtgaccgagcagctggtagccctgatcgattgcttcctggatggttatgtttctcagcttaagtctgtggataaatccagtaatcgggaaagatatgacaatctggagatggaatacctacagaaaagatcagatctcttatctcctcttctttcactaggccagtacctgtgggctgcttctctagcagagaaatactgtgactttgatatattggtacaaatgtgtgagcagactgacaaccagagccgactccagcgctacatgacccagtttgctgatcagaatttttcagactttctcttccgttggtatctggagaaaggaaagcgaggcaaattattatctcagcccatttctcagcatggacagttggcaaattttttgcaagctcatgaacatctcagctggttacatgaaattaatagccaagaattagaaaaggctcatgcaacacttctgggtttggcaaatatggaaactcgttactttgcaaagaagaaaacccttcttggcttgagtaaattggctgcattagcttcagacttttcagaggatatgctacaagaaaaaattgaagaaatggctgagcaggagcgctttctactgcatcaggagaccctacctgaacagctgctggcggagaaacagctaaatctcagtgcgatgccagtattgactgcaccacaactcattggtctatatatctgtgaagaaaatagaagagctaatgaatatgatttcaagaaagctttggacttgttggaatatattgatgaggaagaagatataaatataaatgatctaaaactggaaatcctttgcaaagctcttcagagagataactggtccagttctgatggcaaagatgatccaattgaagtatctaaagacagtatatttgtgaagatcttacagaaacttttaaaagatggcattcagctcagtgagtacttaccggaggtgaaagacctgctacaagcggatcagcttggaagcttaaagtccaatccttacttcgagtttgttttgaaagcaaattatgaatattatgttcagggacaaatataactttttctaaaaatggccattgtttatgaaatctgtataagtgtgtccttatacaaattttaggccataaacaagtgtaagtttgtacaatttcataacatgtatagctgagtttttatactttatatgtaggaagctaatataaaatagttatgtaactgtgattttggttttcagttatgtgacttgttttttccacctgaaatgtgtcagttgttgttcctgtactcggtgccctttctttttactctcacgtggtcccaggttctggagttcttgtcctggttctagctgctcacatgtacaaatcacttctaggcctcagtttctgcgactatgaaaattactagattgcactagcttgtctctaaaattgctgtgactccagatactttgcactgaagagaatctagggtgtttgatatctgtttcagttagggctaatgggaaatgtctagtaagataaatgtcaacttttgctgacttattatgagatgaaaaaccaaaggagagtgggcctaactcatgtgagcttgataactgatgaactcattgggagcattttaaacttttctacataaataataaatgagcactaatgaaagtattttagtgaatgaaacgtttatgtggttttctaacctatctagaaattactgttgatgtttagttctaatctttcagtgtggggattcagccagcctcatgtattttcagaatgactcatgaatctttaccacagtctgcctagctagtcaaaagcatgaatgatactagaaaccattataggttttcctaatatggcaattgatgtgactgaaaggtactgtactctcagagctttgtcctgaccagtgtcatcactcactcaatgtttatctgggttttaaataaaggccagaggttggacagggagttgctggcatgtccgcggcttggcccagtagaatgcccactaaccatcttgctccagcagctgaaaaggtcagaagttaaacatggtgaagagtccggttcctggattcacagagcccagcatcaggccgtctcccccgcaggctgcaaggccagcccttgagtatgtttggaagagcaggttaatggagctgtttgtaaatcaaagggaagaaattagcagcctgttctttttctctttgcagcttgtatgttaggacagcattagggtctgggttaggaacatgttggaaggtactaagagaagttaggaagagcagcttgtcagatggccagtaagaaaccgctgagtacttgtatcgtaagatgaggctttgcttttacgtggaggtcagctgtcagtgttcacgtctcacctgtaggaccctgtcgggtgataatgtgctgcgagacacacaggctcccatctccctcccgtgctgctgcaaacctggtgatccctggtgtatgggacagtaccgcaggaaagcccatctgatcatgccccagaacccactgatcgcgtggacgtagaacgactgctcttaccgtgtgaagtagagtcatcctgttcaagggaagaaaaagctccctcttttaatcctgtttctctctaagttagtagctattacacccaaatggttgagtttttaaaaattattttaacagtaaaaatgaaattaagacctag

SEQ ID NO: 295147 - DNA, 6291 bp, Homo sapiens
tctgtttgttacagcttagatacactactctcttctaccagtcattacttccttggccatgttccgttggaactcagggctcctgcttacctcaattcttcacttctgctgaactctgtgttactgctgcctagaaaagggtgtatgtggttaggagtaataggtgagggtgaattcctgggggacatactgagttagctgcgggatcctgatatttggctgagagtctaagaaattgtttcctaggtaacttggtataattactctttggtcatgctaattttaaatgtcagatgaacaaatcaagagtaaattgggaaagttccataggaagcctaagcactcatcttaaccttacttagtcttctcttaactggacttttctagcccaggaagaggttaggatagttgttcttcagagtttggtctacctttaagttttcatgattcaatactcttaagatactttgttttaaaattactgaaagcctgattaaaaggagatgtgagaagaaagaatatttgtagaatggtgtttccagcagtgagtcagaatctaaaatatgcagagaagggaaatcagatgcatcttcaaaatactggatttgatgtgaaagattttctgtttgggtttgttctacagttatccgtttgcaaagaacttcagctgccacctagtgatttccactggagtgccgacttagtggctctttcttactcttctccctcaggtgaagcacattctactcaggtaggtgacttaaaagcttatttaaataaactttttacaacaaggacatcctaaagttagaggaatcatcctctttgattttgagatataactataaacctatagaaatcaagatattgtggtattggcaaagagagctacacacataggtcagtgtaacagaatagagaatacagttatagatccacataaaggcacccatttggtctttgatgaaggtgcaaaagcaattcagaaaggatggtttttgacgatgatttttctctgtatcaatgcatagtgtaggaacatttgtaattttaaaattacaaatgaccaatttgtattgtattgtattgaattttcccttaaacctcataccttgttacaaagattaatttgaaatgggtcatagatctaaatgtaaaacagtaaaacttttagaagaaaacagaagaaaatcatcatgacctgagattagacagagttcttggaaatcaccaaaagcatgatccataaaagaaaagtttgataaaattaataataaaattaaaataaaataaaaatttaaagcgttgctttgccaaagacaagaaaatgaagagacaagttacagagtaagaagaatttgcaaatcatgtatccagcaaaggacttgtatccagaatattttttaaaattctaaacttgataagaaaacaatgcagtttaaaaacaggggctaggacttgaacagacacttagtgaggatataaggatggcacataagcacatgaagagatgttcagcatcattagccattagaaaaatgcaaaccaaaacactggtgagttcttatttctgatttttcttgatcaaatagtaaattgtcctgtttctttgtatcattgccatcagactgctggtttttgggttcctcttttattgtgattgctgattgttgtgatcttgttttgaggctgttgctgtcatggttgccaccagagaaggatctatccgctattggccaagccttgctggtgaagatacctacacagaggcttttgtagattcgggaggtgataagacttacagtttcctaacagcagtgcagggaggaagttttattttgtcttcatcaggaagccaactaattcggttgatacctgagagctcaggaaagattcatcagcatatcctgcctcaggggcaaggcatgctttcaggaattggtcgaaaagtttcttctctttttggaattttatctcctagtagtgatctcacactttcaagtgttctctgggatagagagagatcaagcttttatagcctgacgagttcaaacatcagtaaatgggaattagatgattcttcagaaaagcatgcatacagttgggatataaatagagccctgaaggaaaacattaccgatgctatttggggatctgaaagtaactatgaagctattaaagaaggagtcaacattcgatatttggacttgaagcaaaactgtgatgggctggtgattttggcagcagcatggcactcagcagacaatccatgtctcatctattactctctgataacaatagaagataatggttgccaaatgtcagatgcagttactgtagaagtcactcaatataatccaccttttcagtctgaagacctgattttgtgtcagttgacggtcccaaacttttcaaaccagactgcctatctgtataacgaaagtgctgtctatgtgtgctccacaggaactgggaaattttctcttccccaggagaaaattgtctttaatgcacaaggagatagtgttttaggtgctggtgcctgtggtggtgttcctatcattttttctagaaacagtggactggtgtctattacttcaagggaaaatgtgtctatattggcagaagacttggaagggtctttagcatcttcagttgctggaccaaacagtgagagtatgatttttgagaccactacaaagaatgaaactatagcccaggaagataaaatcaagttgctgaaagctgcctttctgcaatactgcagaaaagatttaggtcatgctcaaatggtggttgatgagctcttttcctctcactctgatttggattctgattctgaactagacagggcagttacccaaatcagtgtagacctgatggatgactacccagcatctgacccacggtgggctgagtctgtccctgaggaagcacctgggttcagcaatacgtcactgattatccttcaccagctagaagacaagatgaaagctcactcttttcttatggactttattcatcaagttggcttatttggacgtctaggcagttttccagttagagggacaccgatggccactcgactgttgctctgtgagcatgccgaaaagctgtcagccgccattgttctcaagaaccaccactcccggctttctgaccttgtcaacacagccatattgattgctttgaacaagagggagtatgaaatcccatccaacctgactcctgcagatgtctttttcagggaggtatcccaagtagataccatctgtgagtgcttactggagcatgaggagcaagtcttgagggatgcacctatggattccattgaatgggctgaagtggtgatcaatgtgaacaatattctcaaggatatgctgcaggctgctagtcattatcgccaaaatagaaactctttgtatagaagagaagaatcactagaaaaagaacctgaatatgttccatggacggcaacaagtggtcctggtggcatccgaacggtaataatacgccagcatgagattgtcctgaaggtggcttatccacaggcagacagcaacctccgaaacatcgtgaccgagcagctggtagccctgatcgattgcttcctggatggttatgtttctcagcttaagtctgtggataaatccagtaatcgggaaagatatgacaatctggagatggaatacctacagaaaagatcagatctcttatctcctcttctttcactaggccagtacctgtgggctgcttctctagcagagaaatactgtgactttgatatattggtacaaatgtgtgagcagactgacaaccagagccgactccagcgctacatgacccagtttgctgatcagaatttttcagactttctcttccgttggtatctggagaaaggaaagcgaggcaaattattatctcagcccatttctcagcatggacagttggcaaattttttgcaagctcatgaacatctcagctggttacatgaaattaatagccaagaattagaaaaggctcatgcaacacttctgggtttggcaaatatggaaactcgttactttgcaaagaagaaaacccttcttggcttgagtaaattggctgcattagcttcagacttttcagaggatatgctacaagaaaaaattgaagaaatggctgagcaggagcgctttctactgcatcaggagaccctacctgaacagctgctggcggagaaacagctaaatctcagtgcgatgccagtattgactgcaccacaactcattggtctatatatctgtgaagaaaatagaagagctaatgaatatgatttcaagaaagctttggacttgttggaatatattgatgaggaagaagatataaatataaatgatctaaaactggaaatcctttgcaaagctcttcagagagataactggtccagttctgatggcaaagatgatccaattgaagtatctaaagacagtatatttgtgaagatcttacagaaacttttaaaagatggcattcagctcagtgagtacttaccggaggtgaaagacctgctacaagcggatcagcttggaagcttaaagtccaatccttacttcgagtttgttttgaaagcaaattatgaatattatgttcagggacaaatataactttttctaaaaatggccattgtttatgaaatctgtataagtgtgtccttatacaaattttaggccataaacaagtgtaagtttgtacaatttcataacatgtatagctgagtttttatactttatatgtaggaagctaatataaaatagttatgtaactgtgattttggttttcagttatgtgacttgttttttccacctgaaatgtgtcagttgttgttcctgtactcggtgccctttctttttactctcacgtggtcccaggttctggagttcttgtcctggttctagctgctcacatgtacaaatcacttctaggcctcagtttctgcgactatgaaaattactagattgcactagcttgtctctaaaattgctgtgactccagatactttgcactgaagagaatctagggtgtttgatatctgtttcagttagggctaatgggaaatgtctagtaagataaatgtcaacttttgctgacttattatgagatgaaaaaccaaaggagagtgggcctaactcatgtgagcttgataactgatgaactcattgggagcattttaaacttttctacataaataataaatgagcactaatgaaagtattttagtgaatgaaacgtttatgtggttttctaacctatctagaaattactgttgatgtttagttctaatctttcagtgtggggattcagccagcctcatgtattttcagaatgactcatgaatctttaccacagtctgcctagctagtcaaaagcatgaatgatactagaaaccattataggttttcctaatatggcaattgatgtgactgaaaggtactgtactctcagagctttgtcctgaccagtgtcatcactcactcaatgtttatctgggttttaaataaaggccagaggttggacagggagttgctggcatgtccgcggcttggcccagtagaatgcccactaaccatcttgctccagcagctgaaaaggtcagaagttaaacatggtgaagagtccggttcctggattcacagagcccagcatcaggccgtctcccccgcaggctgcaaggccagcccttgagtatgtttggaagagcaggttaatggagctgtttgtaaatcaaagggaagaaattagcagcctgttctttttctctttgcagcttgtatgttaggacagcattagggtctgggttaggaacatgttggaaggtactaagagaagttaggaagagcagcttgtcagatggccagtaagaaaccgctgagtacttgtatcgtaagatgaggctttgcttttacgtggaggtcagctgtcagtgttcacgtctcacctgtaggaccctgtcgggtgataatgtgctgcgagacacacaggctcccatctccctcccgtgctgctgcaaacctggtgatccctggtgtatgggacagtaccgcaggaaagcccatctgatcatgccccagaacccactgatcgcgtggacgtagaacgactgctcttaccgtgtgaagtagagtcatcctgttcaagggaagaaaaagctccctcttttaatcctgtttctctctaagttagtagctattacacccaaatggttgagtttttaaaaattattttaacagtaaaaatgaaattaagacctag

SEQ ID NO: 295148 - DNA, 2939 bp, Homo sapiens
aacacattaactttttttccaggatatgctgcaggctgctagtcattatcgccaaaatagaaactctttgtatagaagagaagaatcactagaaaaagaacctgaatatgttccatggacggcaacaagtggtcctggtggcatccgaacggtaataatacgccagcatgagattgtcctgaaggtggcttatccacaggcagacagcaacctccgaaacatcgtgaccgagcagctggtagccctgatcgattgcttcctggatggttatgtttctcagcttaagtctgtggataaatccagtaatcgggaaagatatgacaatctggagatggaatacctacagaaaagatcagatctcttatctcctcttctttcactaggccagtacctgtgggctgcttctctagcagagaaatactgtgactttgatatattggtacaaatgtgtgagcagactgacaaccagagccgactccagcgctacatgacccagtttgctgatcagaatttttcagactttctcttccgttggtatctggagaaaggaaagcgaggcaaattattatctcagcccatttctcagcatggacagttggcaaattttttgcaagctcatgaacatctcagctggttacatgaaattaatagccaagaattagaaaaggctcatgcaacacttctgggtttggcaaatatggaaactcgttactttgcaaagaagaaaacccttcttggcttgagtaaattggctgcattagcttcagacttttcagaggatatgctacaagaaaaaattgaagaaatggctgagcaggagcgctttctactgcatcaggagaccctacctgaacagctgctggcggagaaacagctaaatctcagtgcgatgccagtattgactgcaccacaactcattggtctatatatctgtgaagaaaatagaagagctaatgaatatgatttcaagaaagctttggacttgttggaatatattgatgaggaagaagatataaatataaatgatctaaaactggaaatcctttgcaaagctcttcagagagataactggtccagttctgatggcaaagatgatccaattgaagtatctaaagacagtatatttgtgaagatcttacagaaacttttaaaagatggcattcagctcagtgagtacttaccggaggtgaaagacctgctacaagcggatcagcttggaagcttaaagtccaatccttacttcgagtttgttttgaaagcaaattatgaatattatgttcagggacaaatataactttttctaaaaatggccattgtttatgaaatctgtataagtgtgtccttatacaaattttaggccataaacaagtgtaagtttgtacaatttcataacatgtatagctgagtttttatactttatatgtaggaagctaatataaaatagttatgtaactgtgattttggttttcagttatgtgacttgttttttccacctgaaatgtgtcagttgttgttcctgtactcggtgccctttctttttactctcacgtggtcccaggttctggagttcttgtcctggttctagctgctcacatgtacaaatcacttctaggcctcagtttctgcgactatgaaaattactagattgcactagcttgtctctaaaattgctgtgactccagatactttgcactgaagagaatctagggtgtttgatatctgtttcagttagggctaatgggaaatgtctagtaagataaatgtcaacttttgctgacttattatgagatgaaaaaccaaaggagagtgggcctaactcatgtgagcttgataactgatgaactcattgggagcattttaaacttttctacataaataataaatgagcactaatgaaagtattttagtgaatgaaacgtttatgtggttttctaacctatctagaaattactgttgatgtttagttctaatctttcagtgtggggattcagccagcctcatgtattttcagaatgactcatgaatctttaccacagtctgcctagctagtcaaaagcatgaatgatactagaaaccattataggttttcctaatatggcaattgatgtgactgaaaggtactgtactctcagagctttgtcctgaccagtgtcatcactcactcaatgtttatctgggttttaaataaaggccagaggttggacagggagttgctggcatgtccgcggcttggcccagtagaatgcccactaaccatcttgctccagcagctgaaaaggtcagaagttaaacatggtgaagagtccggttcctggattcacagagcccagcatcaggccgtctcccccgcaggctgcaaggccagcccttgagtatgtttggaagagcaggttaatggagctgtttgtaaatcaaagggaagaaattagcagcctgttctttttctctttgcagcttgtatgttaggacagcattagggtctgggttaggaacatgttggaaggtactaagagaagttaggaagagcagcttgtcagatggccagtaagaaaccgctgagtacttgtatcgtaagatgaggctttgcttttacgtggaggtcagctgtcagtgttcacgtctcacctgtaggaccctgtcgggtgataatgtgctgcgagacacacaggctcccatctccctcccgtgctgctgcaaacctggtgatccctggtgtatgggacagtaccgcaggaaagcccatctgatcatgccccagaacccactgatcgcgtggacgtagaacgactgctcttaccgtgtgaagtagagtcatcctgttcaagggaagaaaaagctccctcttttaatcctgtttctctctaagttagtagctattacacccaaatggttgagtttttaaaaattattttaacagtaaaaatgaaattaagacctag

SEQ ID NO: 295149 - DNA, 5117 bp, Homo sapiens
tgcgtttgacgtcatcatcgcgcgccatctcttcccttaggtgtttaagttccgcgcgcaggccaggctgcaacctgacggccagatccctcgctgtcctagtcgctgctccttggagtcatgttcccagccgccccttctccgcggaccccgggtaccgggtcccgaaggggcccgctggccggactcgggcccggctccacgccccggacggctagcaggaagggtctgcccctggggtctgcagtcagctccccagtgctcttctcgccggtcggccggcgtagctcgctaagctcgcggggaacaccaacacgaatgttcccacaccactccataactgagtctgtgaactatgatgtgaaaacgtttggatcttctcttcctgttaaagtcatggaagccctaacattggctgaagtcgatgaccagctgaccattaacatagatgaaggtggatgggcttgtctggtgtgcaaagagaagctcattatttggaagattgctctgtcacctattactaagttatccgtttgcaaagaacttcagctgccacctagtgatttccactggagtgccgacttagtggctctttcttactcttctccctcaggtgaagcacattctactcaggctgttgctgtcatggttgccaccagagaaggatctatccgctattggccaagccttgctggtgaagatacctacacagaggcttttgtagattcgggaggtgataagacttacagtttcctaacagcagtgcagggaggaagttttattttgtcttcatcaggaagccaactaattcggttgatacctgagagctcaggaaagattcatcagcatatcctgcctcaggggcaaggcatgctttcaggaattggtcgaaaagtttcttctctttttggaattttatctcctagtagtgatctcacactttcaagtgttctctgggatagagagagatcaagcttttatagcctgacgagttcaaacatcagtaaatgggaattagatgattcttcagaaaagcatgcatacagttgggatataaatagagccctgaaggaaaacattaccgatgctatttggggatctgaaagtaactatgaagctattaaagaaggagtcaacattcgatatttggacttgaagcaaaactgtgatgggctggtgattttggcagcagcatggcactcagcagacaatccatgtctcatctattactctctgataacaatagaagataatggttgccaaatgtcagatgcagttactgtagaagtcactcaatataatccaccttttcagtctgaagacctgattttgtgtcagttgacggtcccaaacttttcaaaccagactgcctatctgtataacgaaagtgctgtctatgtgtgctccacaggaactgggaaattttctcttccccaggagaaaattgtctttaatgcacaaggagatagtgttttaggtgctggtgcctgtggtggtgttcctatcattttttctagaaacagtggactggtgtctattacttcaagggaaaatgtgtctatattggcagaagacttggaagggtctttagcatcttcagttgctggaccaaacagtgagagtatgatttttgagaccactacaaagaatgaaactatagcccaggaagataaaatcaagttgctgaaagctgcctttctgcaatactgcagaaaagatttaggtcatgctcaaatggtggttgatgagctcttttcctctcactctgatttggattctgattctgaactagacagggcagttacccaaatcagtgtagacctgatggatgactacccagcatctgacccacggtgggctgagtctgtccctgaggaagcacctgggttcagcaatacgtcactgattatccttcaccagctagaagacaagatgaaagctcactcttttcttatggactttattcatcaagttggcttatttggacgtctaggcagttttccagttagagggacaccgatggccactcgactgttgctctgtgagcatgccgaaaagctgtcagccgccattgttctcaagaaccaccactcccggctttctgaccttgtcaacacagccatattgattgctttgaacaagagggagtatgaaatcccatccaacctgactcctgcagatgtctttttcagggaggtatcccaagtagataccatctgtgagtgcttactggagcatgaggagcaagtcttgagggatgcacctatggattccattgaatgggctgaagtggtgatcaatgtgaacaatattctcaaggatatgctgcaggctgctagtcattatcgccaaaatagaaactctttgtatagaagagaagaatcactagaaaaagaacctgaatatgttccatggacggcaacaagtggtcctggtggcatccgaacggtaataatacgccagcatgagattgtcctgaaggtggcttatccacaggcagacagcaacctccgaaacatcgtgaccgagcagctggtagccctgatcgattgcttcctggatggttatgtttctcagcttaagtctgtggataaatccagtaatcgggaaagatatgacaatctggagatggaatacctacagaaaagatcagatctcttatctcctcttctttcactaggccagtacctgtgggctgcttctctagcagagaaatactgtgactttgatatattggtacaaatgtgtgagcagactgacaaccagagccgactccagcgctacatgacccagtttgctgatcagaatttttcagactttctcttccgttggtatctggagaaaggaaagcgaggcaaattattatctcagcccatttctcagcatggacagttggcaaattttttgcaagctcatgaacatctcagctggttacatgaaattaatagccaagaattagaaaaggctcatgcaacacttctgggtttggcaaatatggaaactcgttactttgcaaagaagaaaacccttcttggcttgagtaaattggctgcattagcttcagacttttcagaggatatgctacaagaaaaaattgaagctatatatctgtgaagaaaatagaagagctaatgaatatgatttcaagaaagctttggacttgttggaatatattgatgaggaagaagatataaatataaatgatctaaaactggaaatcctttgcaaagctcttcagagagataactggtccagttctgatggcaaagatgatccaattgaagtatctaaagacagtatatttgtgaagatcttacagaaacttttaaaagatggcattcagctcagtgagtacttaccggaggtgaaagacctgctacaagcggatcagcttggaagcttaaagtccaatccttacttcgagtttgttttgaaagcaaattatgaatattatgttcagggacaaatataactttttctaaaaatggccattgtttatgaaatctgtataagtgtgtccttatacaaattttaggccataaacaagtgtaagtttgtacaatttcataacatgtatagctgagtttttatactttatatgtaggaagctaatataaaatagttatgtaactgtgattttggttttcagttatgtgacttgttttttccacctgaaatgtgtcagttgttgttcctgtactcggtgccctttctttttactctcacgtggtcccaggttctggagttcttgtcctggttctagctgctcacatgtacaaatcacttctaggcctcagtttctgcgactatgaaaattactagattgcactagcttgtctctaaaattgctgtgactccagatactttgcactgaagagaatctagggtgtttgatatctgtttcagttagggctaatgggaaatgtctagtaagataaatgtcaacttttgctgacttattatgagatgaaaaaccaaaggagagtgggcctaactcatgtgagcttgataactgatgaactcattgggagcattttaaacttttctacataaataataaatgagcactaatgaaagtattttagtgaatgaaacgtttatgtggttttctaacctatctagaaattactgttgatgtttagttctaatctttcagtgtggggattcagccagcctcatgtattttcagaatgactcatgaatctttaccacagtctgcctagctagtcaaaagcatgaatgatactagaaaccattataggttttcctaatatggcaattgatgtgactgaaaggtactgtactctcagagctttgtcctgaccagtgtcatcactcactcaatgtttatctgggttttaaataaaggccagaggttggacagggagttgctggcatgtccgcggcttggcccagtagaatgcccactaaccatcttgctccagcagctgaaaaggtcagaagttaaacatggtgaagagtccggttcctggattcacagagcccagcatcaggccgtctcccccgcaggctgcaaggccagcccttgagtatgtttggaagagcaggttaatggagctgtttgtaaatcaaagggaagaaattagcagcctgttctttttctctttgcagcttgtatgttaggacagcattagggtctgggttaggaacatgttggaaggtactaagagaagttaggaagagcagcttgtcagatggccagtaagaaaccgctgagtacttgtatcgtaagatgaggctttgcttttacgtggaggtcagctgtcagtgttcacgtctcacctgtaggaccctgtcgggtgataatgtgctgcgagacacacaggctcccatctccctcccgtgctgctgcaaacctggtgatccctggtgtatgggacagtaccgcaggaaagcccatctgatcatgccccagaacccactgatcgcgtggacgtagaacgactgctcttaccgtgtgaagtagagtcatcctgttcaagggaagaaaaagctccctcttttaatcctgtttctctctaagttagtagctattacacccaaatggttgagtttttaaaaattattttaacagtaaaaatgaaattaagacctag

SEQ ID NO: 295150 - DNA, 2385 bp, Homo sapiens
tctagagggtccccgaggccgatgtctcaggatggaggtcgtgaaatgggtatccgggagctcatgaacatctcagctggttacatgaaattaatagccaagaattagaaaaggctcatgcaacacttctgggtttggcaaatatggaaactcgttactttgcaaagaagaaaacccttcttggcttgagtaaattggctgcattagcttcagacttttcagaggatatgctacaagaaaaaattgaagaaatggctgagcaggagcgctttctactgcatcaggagaccctacctgaacagctgctggcggagaaacagctaaatctcagtgcgatgccagtattgactgcaccacaactcattggtctatatatctgtgaagaaaatagaagagctaatgaatatgatttcaagaaagctttggacttgttggaatatattgatgaggaagaagatataaatataaatgatctaaaactggaaatcctttgcaaagctcttcagagagataactggtccagttctgatggcaaagatgatccaattgaagtatctaaagacagtatatttgtgaagatcttacagaaacttttaaaagatggcattcagctcagtgagtacttaccggaggtgaaagacctgctacaagcggatcagcttggaagcttaaagtccaatccttacttcgagtttgttttgaaagcaaattatgaatattatgttcagggacaaatataactttttctaaaaatggccattgtttatgaaatctgtataagtgtgtccttatacaaattttaggccataaacaagtgtaagtttgtacaatttcataacatgtatagctgagtttttatactttatatgtaggaagctaatataaaatagttatgtaactgtgattttggttttcagttatgtgacttgttttttccacctgaaatgtgtcagttgttgttcctgtactcggtgccctttctttttactctcacgtggtcccaggttctggagttcttgtcctggttctagctgctcacatgtacaaatcacttctaggcctcagtttctgcgactatgaaaattactagattgcactagcttgtctctaaaattgctgtgactccagatactttgcactgaagagaatctagggtgtttgatatctgtttcagttagggctaatgggaaatgtctagtaagataaatgtcaacttttgctgacttattatgagatgaaaaaccaaaggagagtgggcctaactcatgtgagcttgataactgatgaactcattgggagcattttaaacttttctacataaataataaatgagcactaatgaaagtattttagtgaatgaaacgtttatgtggttttctaacctatctagaaattactgttgatgtttagttctaatctttcagtgtggggattcagccagcctcatgtattttcagaatgactcatgaatctttaccacagtctgcctagctagtcaaaagcatgaatgatactagaaaccattataggttttcctaatatggcaattgatgtgactgaaaggtactgtactctcagagctttgtcctgaccagtgtcatcactcactcaatgtttatctgggttttaaataaaggccagaggttggacagggagttgctggcatgtccgcggcttggcccagtagaatgcccactaaccatcttgctccagcagctgaaaaggtcagaagttaaacatggtgaagagtccggttcctggattcacagagcccagcatcaggccgtctcccccgcaggctgcaaggccagcccttgagtatgtttggaagagcaggttaatggagctgtttgtaaatcaaagggaagaaattagcagcctgttctttttctctttgcagcttgtatgttaggacagcattagggtctgggttaggaacatgttggaaggtactaagagaagttaggaagagcagcttgtcagatggccagtaagaaaccgctgagtacttgtatcgtaagatgaggctttgcttttacgtggaggtcagctgtcagtgttcacgtctcacctgtaggaccctgtcgggtgataatgtgctgcgagacacacaggctcccatctccctcccgtgctgctgcaaacctggtgatccctggtgtatgggacagtaccgcaggaaagcccatctgatcatgccccagaacccactgatcgcgtggacgtagaacgactgctcttaccgtgtgaagtagagtcatcctgttcaagggaagaaaaagctccctcttttaatcctgtttctctctaagttagtagctattacacccaaatggttgagtttttaaaaattattttaacagtaaaaatgaaattaagacctag

SEQ ID NO: 295151 - DNA, 2336 bp, Homo sapiens
gcggaagtacatcgaacatgctcagctgaacacatgcccgggagtagacaagaatcagagaggggctcatgcaacacttctgggtttggcaaatatggaaactcgttactttgcaaagaagaaaacccttcttggcttgagtaaattggctgcattagcttcagacttttcagaggatatgctacaagaaaaaattgaagaaatggctgagcaggagcgctttctactgcatcaggagaccctacctgaacagctgctggcggagaaacagctaaatctcagtgcgatgccagtattgactgcaccacaactcattggtctatatatctgtgaagaaaatagaagagctaatgaatatgatttcaagaaagctttggacttgttggaatatattgatgaggaagaagatataaatataaatgatctaaaactggaaatcctttgcaaagctcttcagagagataactggtccagttctgatggcaaagatgatccaattgaagtatctaaagacagtatatttgtgaagatcttacagaaacttttaaaagatggcattcagctcagtgagtacttaccggaggtgaaagacctgctacaagcggatcagcttggaagcttaaagtccaatccttacttcgagtttgttttgaaagcaaattatgaatattatgttcagggacaaatataactttttctaaaaatggccattgtttatgaaatctgtataagtgtgtccttatacaaattttaggccataaacaagtgtaagtttgtacaatttcataacatgtatagctgagtttttatactttatatgtaggaagctaatataaaatagttatgtaactgtgattttggttttcagttatgtgacttgttttttccacctgaaatgtgtcagttgttgttcctgtactcggtgccctttctttttactctcacgtggtcccaggttctggagttcttgtcctggttctagctgctcacatgtacaaatcacttctaggcctcagtttctgcgactatgaaaattactagattgcactagcttgtctctaaaattgctgtgactccagatactttgcactgaagagaatctagggtgtttgatatctgtttcagttagggctaatgggaaatgtctagtaagataaatgtcaacttttgctgacttattatgagatgaaaaaccaaaggagagtgggcctaactcatgtgagcttgataactgatgaactcattgggagcattttaaacttttctacataaataataaatgagcactaatgaaagtattttagtgaatgaaacgtttatgtggttttctaacctatctagaaattactgttgatgtttagttctaatctttcagtgtggggattcagccagcctcatgtattttcagaatgactcatgaatctttaccacagtctgcctagctagtcaaaagcatgaatgatactagaaaccattataggttttcctaatatggcaattgatgtgactgaaaggtactgtactctcagagctttgtcctgaccagtgtcatcactcactcaatgtttatctgggttttaaataaaggccagaggttggacagggagttgctggcatgtccgcggcttggcccagtagaatgcccactaaccatcttgctccagcagctgaaaaggtcagaagttaaacatggtgaagagtccggttcctggattcacagagcccagcatcaggccgtctcccccgcaggctgcaaggccagcccttgagtatgtttggaagagcaggttaatggagctgtttgtaaatcaaagggaagaaattagcagcctgttctttttctctttgcagcttgtatgttaggacagcattagggtctgggttaggaacatgttggaaggtactaagagaagttaggaagagcagcttgtcagatggccagtaagaaaccgctgagtacttgtatcgtaagatgaggctttgcttttacgtggaggtcagctgtcagtgttcacgtctcacctgtaggaccctgtcgggtgataatgtgctgcgagacacacaggctcccatctccctcccgtgctgctgcaaacctggtgatccctggtgtatgggacagtaccgcaggaaagcccatctgatcatgccccagaacccactgatcgcgtggacgtagaacgactgctcttaccgtgtgaagtagagtcatcctgttcaagggaagaaaaagctccctcttttaatcctgtttctctctaagttagtagctattacacccaaatggttgagtttttaaaaattattttaacagtaaaaatgaaattaagacctag

SEQ ID NO: 295152 - DNA, 4227 bp, Homo sapiens
  misc_feature (4179)..(4180): n is a, c, g, or t
  misc_feature (4182)..(4182): n is a, c, g, or t
  misc_feature (4194)..(4194): n is a, c, g, or t
tgcgtttgacgtcatcatcgcgcgccatctcttcccttaggtgtttaagttccgcgcgcaggccaggctgcaacctgacggccagatccctcgctgtcctagtcgctgctccttggagtcatgttcccagccgccccttctccgcggaccccgggtaccgggtcccgaaggggcccgctggccggactcgggcccggctccacgccccggacggctagcaggaagggtctgcccctggggtctgcagtcagctccccagtgctcttctcgccggtcggccggcgtagctcgctaagctcgcggggaacaccaacacgaatgttcccacaccactccataactgagtctgtgaactatgatgtgaaaacgtttggatcttctcttcctgttaaagtcatggaagccctaacattggctgaagtcgatgaccagctgaccattaacatagatgaaggtggatgggcttgtctggtgtgcaaagagaagctcattatttggaagattgctctgtcacctattactaagttatccgtttgcaaagaacttcagctgccacctagtgatttccactggagtgccgacttagtggctctttcttactcttctccctcaggtgaagcacattctactcaggctgttgctgtcatggttgccaccagagaaggatctatccgctattggccaagccttgctggtgaagatacctacacagaggcttttgtagattcgggaggtgataagacttacagtttcctaacagcagtgcagggaggaagttttattttgtcttcatcaggaagccaactaattcggttgatacctgagagctcaggaaagattcatcagcatatcctgcctcaggggcaaggcatgctttcaggaattggtcgaaaagtttcttctctttttggaattttatctcctagtagtgatctcacactttcaagtgttctctgggatagagagagatcaagcttttatagcctgacgagttcaaacatcagtaaatgggaattagatgattcttcagaaaagcatgcatacagttgggatataaatagagccctgaaggaaaacattaccgatgctatttggggatctgaaagtaactatgaagctattaaagaaggagtcaacattcgatatttggacttgaagcaaaactgtgatgggctggtgattttggcagcagcatggcactcagcagacaatccatgtctcatctattactctctgataacaatagaagataatggttgccaaatgtcagatgcagttactgtagaagtcactcaatataatccaccttttcagtctgaagacctgattttgtgtcagttgacggtcccaaacttttcaaaccagactgcctatctgtataacgaaagtgctgtctatgtgtgctccacaggaactgggaaattttctcttccccaggagaaaattgtctttaatgcacaaggagatagtgttttaggtgctggtgcctgtggtggtgttcctatcattttttctagaaacagtggactggtgtctattacttcaagggaaaatgtgtctatattggcagaagacttggaagggtctttagcatcttcagttgctggaccaaacagtgagagtatgatttttgagaccactacaaagaatgaaactatagcccaggaagataaaatcaagttgctgaaagctgcctttctgcaatactgcagaaaagatttaggtcatgctcaaatggtggttgatgagctcttttcctctcactctgatttggattctgattctgaactagacagggcagttacccaaatcagtgtagacctgatggatgactacccagcatctgacccacggtgggctgagtctgtccctgaggaagcacctgggttcagcaatacgtcactgattatccttcaccagctagaagacaagatgaaagctcactcttttcttatggactttattcatcaagttggcttatttggacgtctaggcagttttccagttagagggacaccgatggccactcgactgttgctctgtgagcatgccgaaaagctgtcagccgccattgttctcaagaaccaccactcccggctttctgaccttgtcaacacagccatattgattgctttgaacaagagggagtatgaaatcccatccaacctgactcctgcagatgtctttttcagggaggtatcccaagtagataccatctgtgagtgcttactggagcatgaggagcaagtcttgagggatgcacctatggattccattgaatgggctgaagtggtgatcaatgtgaacaatattctcaaggatatgctgcaggctgctagtcattatcgccaaaatagaaactctttgtatagaagagaagaatcactagaaaaagaacctgaatatgttccatggacggcaacaagtggtcctggtggcatccgaacggtaataatacgccagcatgagattgtcctgaaggtggcttatccacaggcagacagcaacctccgaaacatcgtgaccgagcagctggtagccctgatcgattgcttcctggatggttatgtttctcagcttaagtctgtggataaatccagtaatcgggaaagatatgacaatctggagatggaatacctacagaaaagatcagatctcttatctcctcttctttcactaggccagtacctgtgggctgcttctctagcagagaaatactgtgactttgatatattggtacaaatgtgtgagcagactgacaaccagagccgactccagcgctacatgacccagtttgctgatcagaatttttcagactttctcttccgttggtatctggagaaaggaaagcgaggcaaattattatctcagcccatttctcagcatggacagttggcaaattttttgcaagctcatgaacatctcagctggttacatgaaattaatagccaagaattagaaaaggctcatgcaacacttctgggtttggcaaatatggaaactcgttactttgcaaagaagaaaacccttcttggcttgagtaaattggctgcattagcttcagacttttcagaggatatgctacaagaaaaaattgaagaaatggctgagcaggagcgctttctactgcatcaggagaccctacctgaacagctgctggcggagaaacagctaaatctcagtgcgatgccagtattgactgcaccacaactcattggtctatatatctgtgaagaaaatagaagagctaatgaatatgatttcaagaaagctttggacttgttggaatatattgatgaggaagaagatataaatataaatgatctaaaactggaaatcctttgcaaagctcttcagagagataactggtccagttctgatggcaaagatgatccaattgaagtatctaaagacagtatatttgtgaagatcttacagaaacttttaaaagatggcattcagctcagtgagtacttaccggaggtgaaagacctgctacaagcggatcagcttggaagcttaaagtccaatccttacttcgagtttgttttgaaagcaaattatgaatattatgttcagggacaaatataactttttctaaaaatggccattgtttatgaaatctgtataagtgtgtccttatacaaattttaggccataaacaagtgtaagtttgtacaatttcataacatgtatagctgagtttttatactttatatgtaggaagctaatataaaatagttatgtaactgtgattttggttttcagttatgtgacttgttttttccacctgaaatgtgtcagttgttgttcctgtactcggtgccctttctttttactctcacgtggtcccaggttctggagttcttgtcctggttctagctgctcacatgtacaaatcacttctaggcctcagtttctgcgactatgaaaattactagattgcactagcttgtctctaaaattgctgtgactccagatactttgcactgaagagaatctagggtgtttgatatctgtttcagttagggctaatgggaaatgtctagtaagataaatgtcaacttttgctgacttattatgagatgaaaaaccaaaggagagtgggcctaactcatgtgagcttgataactgatgaactcattgggagcattttaaacttttctacataaataatannangatcggccgatnattattatattataaatcaacaaaaacaatctc

SEQ ID NO: 295153 - DNA, 4238 bp, Homo sapiens
tgcgtttgacgtcatcatcgcgcgccatctcttcccttaggtgtttaagttccgcgcgcaggccaggctgcaacctgacggccagatccctcgctgtcctagtcgctgctccttggagtcatgttcccagccgccccttctccgcggaccccgggtaccgggtcccgaaggggcccgctggccggactcgggcccggctccacgccccggacggctagcaggaagggtctgcccctggggtctgcagtcagctccccagtgctcttctcgccggtcggccggcgtagctcgctaagctcgcggggaacaccaacacgaatgttcccacaccactccataactgagtctgtgaactatgatgtgaaaacgtttggatcttctcttcctgttaaagtcatggaagccctaacattggctgaagtcgatgaccagctgaccattaacatagatgaaggtggatgggcttgtctggtgtgcaaagagaagctcattatttggaagattgctctgtcacctattactaagttatccgtttgcaaagaacttcagctgccacctagtgatttccactggagtgccgacttagtggctctttcttactcttctccctcaggtgaagcacattctactcaggctgttgctgtcatggttgccaccagagaaggatctatccgctattggccaagccttgctggtgaagatacctacacagaggcttttgtagattcgggaggtgataagacttacagtttcctaacagcagtgcagggaggaagttttattttgtcttcatcaggaagccaactaattcggttgatacctgagagctcaggaaagattcatcagcatatcctgcctcaggggcaaggcatgctttcaggaattggtcgaaaagtttcttctctttttggaattttatctcctagtagtgatctcacactttcaagtgttctctgggatagagagagatcaagcttttatagcctgacgagttcaaacatcagtaaatgggaattagatgattcttcagaaaagcatgcatacagttgggatataaatagagccctgaaggaaaacattaccgatgctatttggggatctgaaagtaactatgaagctattaaagaaggagtcaacattcgatatttggacttgaagcaaaactgtgatgggctggtgattttggcagcagcatggcactcagcagacaatccatgtctcatctattactctctgataacaatagaagataatggttgccaaatgtcagatgcagttactgtagaagtcactcaatataatccaccttttcagtctgaagacctgattttgtgtcagttgacggtcccaaacttttcaaaccagactgcctatctgtataacgaaagtgctgtctatgtgtgctccacaggaactgggaaattttctcttccccaggagaaaattgtctttaatgcacaaggagatagtgttttaggtgctggtgcctgtggtggtgttcctatcattttttctagaaacagtggactggtgtctattacttcaagggaaaatgtgtctatattggcagaagacttggaagggtctttagcatcttcagttgctggaccaaacagtgagagtatgatttttgagaccactacaaagaatgaaactatagcccaggaagataaaatcaagttgctgaaagctgcctttctgcaatactgcagaaaagatttaggtcatgctcaaatggtggttgatgagctcttttcctctcactctgatttggattctgattctgaactagacagggcagttacccaaatcagtgtagacctgatggatgactacccagcatctgacccacggtgggctgagtctgtccctgaggaagcacctgggttcagcaatacgtcactgattatccttcaccagctagaagacaagatgaaagctcactcttttcttatggactttattcatcaagttggcttatttggacgtctaggcagttttccagttagagggacaccgatggccactcgactgttgctctgtgagcatgccgaaaagctgtcagccgccattgttctcaagaaccaccactcccggctttctgaccttgtcaacacagccatattgattgctttgaacaagagggagtatgaaatcccatccaacctgactcctgcagatgtctttttcagggaggtatcccaagtagataccatctgtgagtgcttactggagcatgaggagcaagtcttgagggatgcacctatggattccattgaatgggctgaagtggtgatcaatgtgaacaatattctcaaggatatgctgcaggctgctagtcattatcgccaaaatagaaactctttgtatagaagagaagaatcactagaaaaagaacctgaatatgttccatggacggcaacaagtggtcctggtggcatccgaacggtaataatacgccagcatgagattgtcctgaaggtggcttatccacaggcagacagcaacctccgaaacatcgtgaccgagcagctggtagccctgatcgattgcttcctggatggttatgtttctcagcttaagtctgtggataaatccagtaatcgggaaagatatgacaatctggagatggaatacctacagaaaagatcagatctcttatctcctcttctttcactaggccagtacctgtgggctgcttctctagcagagaaatactgtgactttgatatattggtacaaatgtgtgagcagactgacaaccagagccgactccagcgctacatgacccagtttgctgatcagaatttttcagactttctcttccgttggtatctggagaaaggaaagcgaggcaaattattatctcagcccatttctcagcatggacagttggcaaattttttgcaagctcatgaacatctcagctggttacatgaaattaatagccaagaattagaaaaggctcatgcaacacttctgggtttggcaaatatggaaactcgttactttgcaaagaagaaaacccttcttggcttgagtaaattggctgcattagcttcagacttttcagaggatatgctacaagaaaaaattgaagaaatggctgagcaggagcgctttctactgcatcaggagaccctacctgaacagctgctggcggagaaacagctaaatctcagtgcgatgccagtattgactgcaccacaactcattggtctatatatctgtgaagaaaatagaagagctaatgaatatgatttcaagaaagctttggacttgttggaatatattgatgaggaagaagatataaatataaatgatctaaaactggaaatcctttgcaaagctcttcagagagataactggtccagttctgatggcaaagatgatccaattgaagtatctaaagacagtatatttgtgaagatcttacagaaacttttaaaagatggcattcagctcagtgagtacttaccggaggtgaaagacctgctacaagcggatcagcttggaagcttaaagtccaatccttacttcgagtttgttttgaaagcaaattatgaatattatgttcagggacaaatataactttttctaaaaatggccattgtttatgaaatctgtataagtgtgtccttatacaaattttaggccataaacaagtgtaagtttgtacaatttcataacatgtatagctgagtttttatactttatatgtaggaagctaatataaaatagttatgtaactgtgattttggttttcagttatgtgacttgttttttccacctgaaatgtgtcagttgttgttcctgtactcggtgccctttctttttactctcacgtggtcccaggttctggagttcttgtcctggttctagctgctcacatgtacaaatcacttctaggcctcagtttctgcgactatgaaaattactagattgcactagcttgtctctaaaattgctgtgactccagatactttgcactgaagagaatctagggtgtttgatatctgtttcagttagggctaatgggaaatgtctagtaagataaatgtcaacttttgctgacttattatgagatgaaaaaccaaaggagagtgggcctaactcatgtgagcttgataactgatgaactcattgggagcattttaaacttttctacataaataatataacgcacgcgcgccggcgcgcgctccgcgcgcgtctctcccaccacgcgccgctcactc

SEQ ID NO: 295154 - DNA, 2280 bp, Homo sapiens
gcacgaggttcgaagctgcagtgagtcatactttggggtccatactgaatatgttacttactaatagaattttcttcagaaagatacctcactacttggtttctgaaatcaaataggtaagagttatattgagtcagtagctaccttgagtataacatctttttttaaatgtattttccttggcgtctcttgcatgttccctagagtgtaatgtcttatatctaatgtagaaactgtcagggtattcagcatgtaaagtgcctttatttaaatgatttgaaacagtatcacaaaactcagattctccatcccccacagccatcaaaataaaaccatgatagcaaacaaatcatttaattcagctatatcagtgatttcatttttccctcataatgattttgttttctagctggtccagttctgatggcaaagatgatccaattgaagtatctaaagacagtatatttgtgaagatcttacagaaacttttaaaagatggcattcagctcagtgagtacttaccggaggtgaaagacctgctacaagcggatcagcttggaagcttaaagtccaatccttacttcgagtttgttttgaaagcaaattatgaatattatgttcagggacaaatataactttttctaaaaatggccattgtttatgaaatctgtataagtgtgtccttatacaaattttaggccataaacaagtgtaagtttgtacaatttcataacatgtatagctgagtttttatactttatatgtaggaagctaatataaaatagttatgtaactgtgattttggttttcagttatgtgacttgttttttccacctgaaatgtgtcagttgttgttcctgtactcggtgccctttctttttactctcacgtggtcccaggttctggagttcttgtcctggttctagctgctcacatgtacaaatcacttctaggcctcagtttctgcgactatgaaaattactagattgcactagcttgtctctaaaattgctgtgactccagatactttgcactgaagagaatctagggtgtttgatatctgtttcagttagggctaatgggaaatgtctagtaagataaatgtcaacttttgctgacttattatgagatgaaaaaccaaaggagagtgggcctaactcatgtgagcttgataactgatgaactcattgggagcattttaaacttttctacataaataataaatgagcactaatgaaagtattttagtgaatgaaacgtttatgtggttttctaacctatctagaaattactgttgatgtttagttctaatctttcagtgtggggattcagccagcctcatgtattttcagaatgactcatgaatctttaccacagtctgcctagctagtcaaaagcatgaatgatactagaaaccattataggttttcctaatatggcaattgatgtgactgaaaggtactgtactctcagagctttgtcctgaccagtgtcatcactcactcaatgtttatctgggttttaaataaaggccagaggttggacagggagttgctggcatgtccgcggcttggcccagtagaatgcccactaaccatcttgctccagcagctgaaaaggtcagaagttaaacatggtgaagagtccggttcctggattcacagagcccagcatcaggccgtctcccccgcaggctgcaaggccagcccttgagtatgtttggaagagcaggttaatggagctgtttgtaaatcaaagggaagaaattagcagcctgttctttttctctttgcagcttgtatgttaggacagcattagggtctgggttaggaacatgttggaaggtactaagagaagttaggaagagcagcttgtcagatggccagtaagaaaccgctgagtacttgtatcgtaagatgaggctttgcttttacgtggaggtcagctgtcagtgttcacgtctcacctgtaggaccctgtcgggtgataatgtgctgcgagacacacaggctcccatctccctcccgtgctgctgcaaacctggtgatccctggtgtatgggacagtaccgcaggaaagcccatctgatcatgccccagaacccactgatcgcgtggacgtagaacgactgctcttaccgtgtgaagtagagtcatcctgttcaagggaagaaaaagctccctcttttaatcctgtttctctctaagttagtagctattacacccaaatggttgagtttttaaaaattattttaacagtaaaaatgaaattaagacctag

SEQ ID NO: 295155 - DNA, 3915 bp, Homo sapiens
tgcgtttgacgtcatcatcgcgcgccatctcttcccttaggtgtttaagttccgcgcgcaggccaggctgcaacctgacggccagatccctcgctgtcctagtcgctgctccttggagtcatgttcccagccgccccttctccgcggaccccgggtaccgggtcccgaaggggcccgctggccggactcgggcccggctccacgccccggacggctagcaggaagggtctgcccctggggtctgcagtcagctccccagtgctcttctcgccggtcggccggcgtagctcgctaagctcgcggggaacaccaacacgaatgttcccacaccactccataactgagtctgtgaactatgatgtgaaaacgtttggatcttctcttcctgttaaagtcatggaagccctaacattggctgaagtcgatgaccagctgaccattaacatagatgaaggtggatgggcttgtctggtgtgcaaagagaagctcattatttggaagattgctctgtcacctattactaagttatccgtttgcaaagaacttcagctgccacctagtgatttccactggagtgccgacttagtggctctttcttactcttctccctcaggtgaagcacattctactcaggctgttgctgtcatggttgccaccagagaaggatctatccgctattggccaagccttgctggtgaagatacctacacagaggcttttgtagattcgggaggtgataagacttacagtttcctaacagcagtgcagggaggaagttttattttgtcttcatcaggaagccaactaattcggttgatacctgagagctcaggaaagattcatcagcatatcctgcctcaggggcaaggcatgctttcaggaattggtcgaaaagtttcttctctttttggaattttatctcctagtagtgatctcacactttcaagtgttctctgggatagagagagatcaagcttttatagcctgacgagttcaaacatcagtaaatgggaattagatgattcttcagaaaagcatgcatacagttgggatataaatagagccctgaaggaaaacattaccgatgctatttggggatctgaaagtaactatgaagctattaaagaaggagtcaacattcgatatttggacttgaagcaaaactgtgatgggctggtgattttggcagcagcatggcactcagcagacaatccatgtctcatctattactctctgataacaatagaagataatggttgccaaatgtcagatgcagttactgtagaagtcactcaatataatccaccttttcagtctgaagacctgattttgtgtcagttgacggtcccaaacttttcaaaccagactgcctatctgtataacgaaagtgctgtctatgtgtgctccacaggaactgggaaattttctcttccccaggagaaaattgtctttaatgcacaaggagatagtgttttaggtgctggtgcctgtggtggtgttcctatcattttttctagaaacagtggactggtgtctattacttcaagggaaaatgtgtctatattggcagaagacttggaagggtctttagcatcttcagttgctggaccaaacagtgagagtatgatttttgagaccactacaaagaatgaaactatagcccaggaagataaaatcaagttgctgaaagctgcctttctgcaatactgcagaaaagatttaggtcatgctcaaatggtggttgatgagctcttttcctctcactctgatttggattctgattctgaactagacagggcagttacccaaatcagtgtagacctgatggatgactacccagcatctgacccacggtgggctgagtctgtccctgaggaagcacctgggttcagcaatacgtcactgattatccttcaccagctagaagacaagatgaaagctcactcttttcttatggactttattcatcaagttggcttatttggacgtctaggcagttttccagttagagggacaccgatggccactcgactgttgctctgtgagcatgccgaaaagctgtcagccgccattgttctcaagaaccaccactcccggctttctgaccttgtcaacacagccatattgattgctttgaacaagagggagtatgaaatcccatccaacctgactcctgcagatgtctttttcagggaggtatcccaagtagataccatctgtgagtgcttactggagcatgaggagcaagtcttgagggatgcacctatggattccattgaatgggctgaagtggtgatcaatgtgaacaatattctcaaggatatgctgcaggctgctagtcattatcgccaaaatagaaactctttgtatagaagagaagaatcactagaaaaagaacctgaatatgttccatggacggcaacaagtggtcctggtggcatccgaacggtaataatacgccagcatgagattgtcctgaaggtggcttatccacaggcagacagcaacctccgaaacatcgtgaccgagcagctggtagccctgatcgattgcttcctggatggttatgtttctcagcttaagtctgtggataaatccagtaatcgggaaagatatgacaatctggagatggaatacctacagaaaagatcagatctcttatctcctcttctttcactaggccagtacctgtgggctgcttctctagcagagaaatactgtgactttgatatattggtacaaatgtgtgagcagactgacaaccagagccgactccagcgctacatgacccagtttgctgatcagaatttttcagactttctcttccgttggtatctggagaaaggaaagcgaggcaaattattatctcagcccatttctcagcatggacagttggcaaattttttgcaagctcatgaacatctcagctggttacatgaaattaatagccaagaattagaaaaggctcatgcaacacttctgggtttggcaaatatggaaactcgttactttgcaaagaagaaaacccttcttggcttgagtaaattggctgcattagcttcagacttttcagaggatatgctacaagaaaaaattgaagaaatggctgagcaggagcgctttctactgcatcaggagaccctacctgaacagctgctggcggagaaacagctaaatctcagtgcgatgccagtattgactgcaccacaactcattggtctatatatctgtgaagaaaatagaagagctaatgaatatgatttcaagaaagctttggacttgttggaatatattgatgaggaagaagatataaatataaatgatctaaaactggaaatcctttgcaaagctcttcagagagataactggtccagttctgatggcaaagatgatccaattgaagtatctaaagacagtatatttgtgaagatcttacagaaacttttaaaagatggcattcagctcagtgagtacttaccggaggtgaaagacctgctacaagcggatcagcttggaagcttaaagtccaatccttacttcgagtttgttttgaaagcaaattatgaatattatgttcagggacaaatataactttttctaaaaatggccattgtttatgaaatctgtataagtgtgtccttatacaaattttaggccataaacaagtgtaagtttgtacaatttcataacatgtatagctgagtttttatactttatatgtaggaagctaatataaaatagttatgtactgggaaaaaaaaaaaaaaaaaacaaatttggggggcggggcgaaaaagtttaaacatgttgggggggccaggagagaaaggctagggtcccagaaccggcgagggggttccaaaaagcgggcggttgaacaaggtggtggtaggcgttcccgcgccgggagaaaag

SEQ ID NO: 295156 - DNA, 3724 bp, Homo sapiens
tgcgtttgacgtcatcatcgcgcgccatctcttcccttaggtgtttaagttccgcgcgcaggccaggctgcaacctgacggccagatccctcgctgtcctagtcgctgctccttggagtcatgttcccagccgccccttctccgcggaccccgggtaccgggtcccgaaggggcccgctggccggactcgggcccggctccacgccccggacggctagcaggaagggtctgcccctggggtctgcagtcagctccccagtgctcttctcgccggtcggccggcgtagctcgctaagctcgcggggaacaccaacacgaatgttcccacaccactccataactgagtctgtgaactatgatgtgaaaacgtttggatcttctcttcctgttaaagtcatggaagccctaacattggctgaagtcgatgaccagctgaccattaacatagatgaaggtggatgggcttgtctggtgtgcaaagagaagctcattatttggaagattgctctgtcacctattactaagttatccgtttgcaaagaacttcagctgccacctagtgatttccactggagtgccgacttagtggctctttcttactcttctccctcaggtgaagcacattctactcaggctgttgctgtcatggttgccaccagagaaggatctatccgctattggccaagccttgctggtgaagatacctacacagaggcttttgtagattcgggaggtgataagacttacagtttcctaacagcagtgcagggaggaagttttattttgtcttcatcaggaagccaactaattcggttgatacctgagagctcaggaaagattcatcagcatatcctgcctcaggggcaaggcatgctttcaggaattggtcgaaaagtttcttctctttttggaattttatctcctagtagtgatctcacactttcaagtgttctctgggatagagagagatcaagcttttatagcctgacgagttcaaacatcagtaaatgggaattagatgattcttcagaaaagcatgcatacagttgggatataaatagagccctgaaggaaaacattaccgatgctatttggggatctgaaagtaactatgaagctattaaagaaggagtcaacattcgatatttggacttgaagcaaaactgtgatgggctggtgattttggcagcagcatggcactcagcagacaatccatgtctcatctattactctctgataacaatagaagataatggttgccaaatgtcagatgcagttactgtagaagtcactcaatataatccaccttttcagtctgaagacctgattttgtgtcagttgacggtcccaaacttttcaaaccagactgcctatctgtataacgaaagtgctgtctatgtgtgctccacaggaactgggaaattttctcttccccaggagaaaattgtctttaatgcacaaggagatagtgttttaggtgctggtgcctgtggtggtgttcctatcattttttctagaaacagtggactggtgtctattacttcaagggaaaatgtgtctatattggcagaagacttggaagggtctttagcatcttcagttgctggaccaaacagtgagagtatgatttttgagaccactacaaagaatgaaactatagcccaggaagataaaatcaagttgctgaaagctgcctttctgcaatactgcagaaaagatttaggtcatgctcaaatggtggttgatgagctcttttcctctcactctgatttggattctgattctgaactagacagggcagttacccaaatcagtgtagacctgatggatgactacccagcatctgacccacggtgggctgagtctgtccctgaggaagcacctgggttcagcaatacgtcactgattatccttcaccagctagaagacaagatgaaagctcactcttttcttatggactttattcatcaagttggcttatttggacgtctaggcagttttccagttagagggacaccgatggccactcgactgttgctctgtgagcatgccgaaaagctgtcagccgccattgttctcaagaaccaccactcccggctttctgaccttgtcaacacagccatattgattgctttgaacaagagggagtatgaaatcccatccaacctgactcctgcagatgtctttttcagggaggtatcccaagtagataccatctgtgagtgcttactggagcatgaggagcaagtcttgagggatgcacctatggattccattgaatgggctgaagtggtgatcaatgtgaacaatattctcaaggatatgctgcaggctgctagtcattatcgccaaaatagaaactctttgtatagaagagaagaatcactagaaaaagaacctgaatatgttccatggacggcaacaagtggtcctggtggcatccgaacggtaataatacgccagcatgagattgtcctgaaggtggcttatccacaggcagacagcaacctccgaaacatcgtgaccgagcagctggtagccctgatcgattgcttcctggatggttatgtttctcagcttaagtctgtggataaatccagtaatcgggaaagatatgacaatctggagatggaatacctacagaaaagatcagatctcttatctcctcttctttcactaggccagtacctgtgggctgcttctctagcagagaaatactgtgactttgatatattggtacaaatgtgtgagcagactgacaaccagagccgactccagcgctacatgacccagtttgctgatcagaatttttcagactttctcttccgttggtatctggagaaaggaaagcgaggcaaattattatctcagcccatttctcagcatggacagttggcaaattttttgcaagctcatgaacatctcagctggttacatgaaattaatagccaagaattagaaaaggctcatgcaacacttctgggtttggcaaatatggaaactcgttactttgcaaagaagaaaacccttcttggcttgagtaaattggctgcattagcttcagacttttcagaggatatgctacaagaaaaaattgaagaaatggctgagcaggagcgctttctactgcatcaggagaccctacctgaacagctgctggcggagaaacagctaaatctcagtgcgatgccagtattgactgcaccacaactcattggtctatatatctgtgaagaaaatagaagagctaatgaatatgatttcaagaaagctttggacttgttggaatatattgatgaggaagaagatataaatataaatgatctaaaactggaaatcctttgcaaagctcttcagagagataactggtccagttctgatggcaaagatgatccaattgaagtatctaaagacagtatatttgtgaagatcttacagaaacttttaaaagatggcattcaagtccagtgagtacttacggaggtgaagactgtacagggatagtggagcttaagtcatctattcgagtgttgaagcaatttgatttgtcggcaattactttttaaatgggctgtttgaatcggtagggtgttcaattggggaaacgggggtgctctaagtaggggggttatgaggggaaaatgaggggggggtgagggccagggggggggaggaaagggggggggaggaaaaacagaaattgggtgtggtggtggtctaaggt

SEQ ID NO: 295157 - DNA, 3540 bp, Homo sapiens
tgcgtttgacgtcatcatcgcgcgccatctcttcccttaggtgtttaagttccgcgcgcaggccaggctgcaacctgacggccagatccctcgctgtcctagtcgctgctccttggagtcatgttcccagccgccccttctccgcggaccccgggtaccgggtcccgaaggggcccgctggccggactcgggcccggctccacgccccggacggctagcaggaagggtctgcccctggggtctgcagtcagctccccagtgctcttctcgccggtcggccggcgtagctcgctaagctcgcggggaacaccaacacgaatgttcccacaccactccataactgagtctgtgaactatgatgtgaaaacgtttggatcttctcttcctgttaaagtcatggaagccctaacattggctgaagtcgatgaccagctgaccattaacatagatgaaggtggatgggcttgtctggtgtgcaaagagaagctcattatttggaagattgctctgtcacctattactaagttatccgtttgcaaagaacttcagctgccacctagtgatttccactggagtgccgacttagtggctctttcttactcttctccctcaggtgaagcacattctactcaggctgttgctgtcatggttgccaccagagaaggatctatccgctattggccaagccttgctggtgaagatacctacacagaggcttttgtagattcgggaggtgataagacttacagtttcctaacagcagtgcagggaggaagttttattttgtcttcatcaggaagccaactaattcggttgatacctgagagctcaggaaagattcatcagcatatcctgcctcaggggcaaggcatgctttcaggaattggtcgaaaagtttcttctctttttggaattttatctcctagtagtgatctcacactttcaagtgttctctgggatagagagagatcaagcttttatagcctgacgagttcaaacatcagtaaatgggaattagatgattcttcagaaaagcatgcatacagttgggatataaatagagccctgaaggaaaacattaccgatgctatttggggatctgaaagtaactatgaagctattaaagaaggagtcaacattcgatatttggacttgaagcaaaactgtgatgggctggtgattttggcagcagcatggcactcagcagacaatccatgtctcatctattactctctgataacaatagaagataatggttgccaaatgtcagatgcagttactgtagaagtcactcaatataatccaccttttcagtctgaagacctgattttgtgtcagttgacggtcccaaacttttcaaaccagactgcctatctgtataacgaaagtgctgtctatgtgtgctccacaggaactgggaaattttctcttccccaggagaaaattgtctttaatgcacaaggagatagtgttttaggtgctggtgcctgtggtggtgttcctatcattttttctagaaacagtggactggtgtctattacttcaagggaaaatgtgtctatattggcagaagacttggaagggtctttagcatcttcagttgctggaccaaacagtgagagtatgatttttgagaccactacaaagaatgaaactatagcccaggaagataaaatcaagttgctgaaagctgcctttctgcaatactgcagaaaagatttaggtcatgctcaaatggtggttgatgagctcttttcctctcactctgatttggattctgattctgaactagacagggcagttacccaaatcagtgtagacctgatggatgactacccagcatctgacccacggtgggctgagtctgtccctgaggaagcacctgggttcagcaatacgtcactgattatccttcaccagctagaagacaagatgaaagctcactcttttcttatggactttattcatcaagttggcttatttggacgtctaggcagttttccagttagagggacaccgatggccactcgactgttgctctgtgagcatgccgaaaagctgtcagccgccattgttctcaagaaccaccactcccggctttctgaccttgtcaacacagccatattgattgctttgaacaagagggagtatgaaatcccatccaacctgactcctgcagatgtctttttcagggaggtatcccaagtagataccatctgtgagtgcttactggagcatgaggagcaagtcttgagggatgcacctatggattccattgaatgggctgaagtggtgatcaatgtgaacaatattctcaaggatatgctgcaggctgctagtcattatcgccaaaatagaaactctttgtatagaagagaagaatcactagaaaaagaacctgaatatgttccatggacggcaacaagtggtcctggtggcatccgaacggtaataatacgccagcatgagattgtcctgaaggtggcttatccacaggcagacagcaacctccgaaacatcgtgaccgagcagctggtagccctgatcgattgcttcctggatggttatgtttctcagcttaagtctgtggataaatccagtaatcgggaaagatatgacaatctggagatggaatacctacagaaaagatcagatctcttatctcctcttctttcactaggccagtacctgtgggctgcttctctagcagagaaatactgtgactttgatatattggtacaaatgtgtgagcagactgacaaccagagccgactccagcgctacatgacccagtttgctgatcagaatttttcagactttctcttccgttggtatctggagaaaggaaagcgaggcaaattattatctcagcccatttctcagcatggacagttggcaaattttttgcaagctcatgaacatctcagctggttacatgaaattaatagccaagaattagaaaaggctcatgcaacacttctgggtttggcaaatatggaaactcgttactttgcaaagaagaaaacccttcttggcttgagtaaattggctgcattagcttcagacttttcagaggatatgctacaagaaaaaattgaagaaatggctgagcaggagcgctttctactgcatcaggagaccctacctgaacagctgctggcggagaaacagctaaatctcagtgcgatgccagtattgactgcaccacaactcattggtctatatatctgtgaagaaaatagaagagctaatgaatatgatttcaagaaagctttggacttgttggaatatattgatgaggaagaagatataaatataaatgatctaaaactggaaatcctttgcaaagctcttcagagagataagtaagtgctcgtggcattgcttctttggaaagtatagaaactgcttttcctctgctctcaccacatgacagtcaataacagaagacttctgtgaccagacgtgttgggatttcccacctcctacactgggcaaccagtgagttctgttggtgggcaccagctgaatgtcctttaa

SEQ ID NO: 295158 - DNA, 2791 bp, Homo sapiens
tgcgtttgacgtcatcatcgcgcgccatctcttcccttaggtgtttaagttccgcgcgcaggccaggctgcaacctgacggccagatccctcgctgtcctagtcgctgctccttggagtcatgttcccagccgccccttctccgcggaccccgggtaccgggtcccgaaggggcccgctggccggactcgggcccggctccacgccccggacggctagcaggaagggtctgcccctggggtctgcagtcagctccccagtgctcttctcgccggtcggccggcgtagctcgctaagctcgcggggaacaccaacacgaatgttcccacaccactccataactgagtctgtgaactatgatgtgaaaacgtttggatcttctcttcctgttaaagtcatggaagccctaacattggctgaagtcgatgaccagctgaccattaacatagatgaaggtggatgggcttgtctggtgtgcaaagagaagctcattatttggaagattgctctgtcacctattactaagttatccgtttgcaaagaacttcagctgccacctagtgatttccactggagtgccgacttagtggctctttcttactcttctccctcaggtgaagcacattctactcaggctgttgctgtcatggttgccaccagagaaggatctatccgctattggccaagccttgctggtgaagatacctacacagaggcttttgtagattcgggaggtgataagacttacagtttcctaacagcagtgcagggaggaagttttattttgtcttcatcaggaagccaactaattcggttgatacctgagagctcaggaaagattcatcagcatatcctgcctcaggggcaaggcatgctttcaggaattggtcgaaaagtttcttctctttttggaattttatctcctagtagtgatctcacactttcaagtgttctctgggatagagagagatcaagcttttatagcctgacgagttcaaacatcagtaaatgggaattagatgattcttcagaaaagcatgcatacagttgggatataaatagagccctgaaggaaaacattaccgatgctatttggggatctgaaagtaactatgaagctattaaagaaggagtcaacattcgatatttggacttgaagcaaaactgtgatgggctggtgattttggcagcagcatggcactcagcagacaatccatgtctcatctattactctctgataacaatagaagataatggttgccaaatgtcagatgcagttactgtagaagtcactcaatataatccaccttttcagtctgaagacctgattttgtgtcagttgacggtcccaaacttttcaaaccagactgcctatctgtataacgaaagtgctgtctatgtgtgctccacaggaactgggaaattttctcttccccaggagaaaattgtctttaatgcacaaggagatagtgttttaggtgctggtgcctgtggtggtgttcctatcattttttctagaaacagtggactggtgtctattacttcaagggaaaatgtgtctatattggcagaagacttggaagggtctttagcatcttcagttgctggaccaaacagtgagagtatgatttttgagaccactacaaagaatgaaactatagcccaggaagataaaatcaagttgctgaaagctgcctttctgcaatactgcagaaaagatttaggtcatgctcaaatggtggttgatgagctcttttcctctcactctgatttggattctgattctgaactagacagggcagttacccaaatcagtgtagacctgatggatgactacccagcatctgacccacggtgggctgagtctgtccctgaggaagcacctgggttcagcaatacgtcactgattatccttcaccagctagaagacaagatgaaagctcactcttttcttatggactttattcatcaagttggcttatttggacgtctaggcagttttccagttagagggacaccgatggccactcgactgttgctctgtgagcatgccgaaaagctgtcagccgccattgttctcaagaaccaccactcccggctttctgaccttgtcaacacagccatattgattgctttgaacaagagggagtatgaaatcccatccaacctgactcctgcagatgtctttttcagggaggtatcccaagtagataccatctgtgagtgcttactggagcatgaggagcaagtcttgagggatgcacctatggattccattgaatgggctgaagtggtgatcaatgtgaacaatattctcaaggatatgctgcaggctgctagtcattatcgccaaaatagaaactctttgtatagaagagaagaatcactagaaaaagaacctgaatatgttccatggacggcaacaagtggtcctggtggcatccgaacggtaataatacgccagcatgagattgtcctgaaggtggcttatccacaggcagacagcaacctccgaaacatcgtgaccgagcagctggtagccctgatcgattgcttcctggatggttatgtttctcagcttaagtctgtggataaatccagtaatcgggaaagatatgacaatctggagatggaatacctacagaaaagatcagatctcttatctcctcttcgtaagttcatgatacttggcaagagttttaaatttgctgaatggatgaaagggttgaatagttaattcagtatattcagtgtggtagtgttaatccaactgtaataaagaacttaaagca

SEQ ID NO: 295159 - DNA, 2076 bp, Homo sapiens
  misc_feature (2031)..(2031): n is a, c, g, or t
  misc_feature (2051)..(2051): n is a, c, g, or t
  misc_feature (2058)..(2058): n is a, c, g, or t
  misc_feature (2062)..(2062): n is a, c, g, or t
  misc_feature (2073)..(2073): n is a, c, g, or t
  misc_feature (2076)..(2076): n is a, c, g, or t
tgcgtttgacgtcatcatcgcgcgccatctcttcccttaggtgtttaagttccgcgcgcaggccaggctgcaacctgacggccagatccctcgctgtcctagtcgctgctccttggagtcatgttcccagccgccccttctccgcggaccccgggtaccgggtcccgaaggggcccgctggccggactcgggcccggctccacgccccggacggctagcaggaagggtctgcccctggggtctgcagtcagctccccagtgctcttctcgccggtcggccggcgtagctcgctaagctcgcggggaacaccaacacgaatgttcccacaccactccataactgagtctgtgaactatgatgtgaaaacgtttggatcttctcttcctgttaaagtcatggaagccctaacattggctgaagtcgatgaccagctgaccattaacatagatgaaggtggatgggcttgtctggtgtgcaaagagaagctcattatttggaagattgctctgtcacctattactaagttatccgtttgcaaagaacttcagctgccacctagtgatttccactggagtgccgacttagtggctctttcttactcttctccctcaggtgaagcacattctactcaggctgttgctgtcatggttgccaccagagaaggatctatccgctattggccaagccttgctggtgaagatacctacacagaggcttttgtagattcgggaggtgataagacttacagtttcctaacagcagtgcagggaggaagttttattttgtcttcatcaggaagccaactaattcggttgatacctgagagctcaggaaagattcatcagcatatcctgcctcaggggcaaggcatgctttcaggaattggtcgaaaagtttcttctctttttggaattttatctcctagtagtgatctcacactttcaagtgttctctgggatagagagagatcaagcttttatagcctgacgagttcaaacatcagtaaatgggaattagatgattcttcagaaaagcatgcatacagttgggatataaatagagccctgaaggaaaacattaccgatgctatttggggatctgaaagtaactatgaagctattaaagaaggagtcaacattcgatatttggacttgaagcaaaactgtgatgggctggtgattttggcagcagcatggcactcagcagacaatccatgtctcatctattactctctgataacaatagaagataatggttgccaaatgtcagatgcagttactgtagaagtcactcaatataatccaccttttcagtctgaagacctgattttgtgtcagttgacggtcccaaacttttcaaaccagactgcctatctgtataacgaaagtgctgtctatgtgtgctccacaggaactgggaaattttctcttccccaggagaaaattgtctttaatgcacaaggagatagtgttttaggtgctggtgcctgtggtggtgttcctatcattttttctagaaacagtggactggtgtctattacttcaagggaaaatgtgtctatattggcagaagacttggaagggtctttagcatcttcagttgctggaccaaacagtgagagtatgatttttgagaccactacaaagaatgaaactatagcccaggaagataaaatcaagttgctgaaagctgcctttctgcaatactgcagaaaagatttaggtcatgctcaaatggtggttgatgagctcttttcctctcactctgatttggattctgattctgaactagacagggcagttacccaaatcagtgtagacctgatggatgactacccagcatctgacccacggtgggctgagtctgtccctgaggaagcacctgggttcagcaatacgtcactgattatccttcaccagctagaagacaagatgaaagctcactcttttcttatggactttattcatcaagttggggttatttgggacgttctaggccggtttctccaggtttagaaggggacaccgatnggccactccaactgtttggntcttttnaacntgcccaaaaanctn

SEQ ID NO: 295160 - DNA, 1987 bp, Homo sapiens
tgcgtttgacgtcatcatcgcgcgccatctcttcccttaggtgtttaagttccgcgcgcaggccaggctgcaacctgacggccagatccctcgctgtcctagtcgctgctccttggagtcatgttcccagccgccccttctccgcggaccccgggtaccgggtcccgaaggggcccgctggccggactcgggcccggctccacgccccggacggctagcaggaagggtctgcccctggggtctgcagtcagctccccagtgctcttctcgccggtcggccggcgtagctcgctaagctcgcggggaacaccaacacgaatgttcccacaccactccataactgagtctgtgaactatgatgtgaaaacgtttggatcttctcttcctgttaaagtcatggaagccctaacattggctgaagtcgatgaccagctgaccattaacatagatgaaggtggatgggcttgtctggtgtgcaaagagaagctcattatttggaagattgctctgtcacctattactaagttatccgtttgcaaagaacttcagctgccacctagtgatttccactggagtgccgacttagtggctctttcttactcttctccctcaggtgaagcacattctactcaggctgttgctgtcatggttgccaccagagaaggatctatccgctattggccaagccttgctggtgaagatacctacacagaggcttttgtagattcgggaggtgataagacttacagtttcctaacagcagtgcagggaggaagttttattttgtcttcatcaggaagccaactaattcggttgatacctgagagctcaggaaagattcatcagcatatcctgcctcaggggcaaggcatgctttcaggaattggtcgaaaagtttcttctctttttggaattttatctcctagtagtgatctcacactttcaagtgttctctgggatagagagagatcaagcttttatagcctgacgagttcaaacatcagtaaatgggaattagatgattcttcagaaaagcatgcatacagttgggatataaatagagccctgaaggaaaacattaccgatgctatttggggatctgaaagtaactatgaagctattaaagaaggagtcaacattcgatatttggacttgaagcaaaactgtgatgggctggtgattttggcagcagcatggcactcagcagacaatccatgtctcatctattactctctgataacaatagaagataatggttgccaaatgtcagatgcagttactgtagaagtcactcaatataatccaccttttcagtctgaagacctgattttgtgtcagttgacggtcccaaacttttcaaaccagactgcctatctgtataacgaaagtgctgtctatgtgtgctccacaggaactgggaaattttctcttccccaggagaaaattgtctttaatgcacaaggagatagtgttttaggtgctggtgcctgtggtggtgttcctatcattttttctagaaacagtggactggtgtctattacttcaagggaaaatgtgtctatattggcagaagacttggaagggtctttagcatcttcagttgctggaccaaacagtgagagtatgatttttgagaccactacaaagaatgaaactatagcccaggaagataaaatcaagttgctgaaagctgcctttctgcaatactgcagaaaagatttaggtcatgctcaaatggtggttgatgagctcttttcctctcactctgatttggattctgattctgaactagacagggcagttacccaaatcagtgtagacctgatggatgactacccagcagacaatccatgtctcatctattactctctgataacaatagaagataatggttgccaaatgtcagatgcagttactgtagaagtcactcaatataatccaccttttcagagataaagtctgggcaacagagtgagattccgtctca

SEQ ID NO: 295161 - DNA, 1725 bp, Homo sapiens
tgcgtttgacgtcatcatcgcgcgccatctcttcccttaggtgtttaagttccgcgcgcaggccaggctgcaacctgacggccagatccctcgctgtcctagtcgctgctccttggagtcatgttcccagccgccccttctccgcggaccccgggtaccgggtcccgaaggggcccgctggccggactcgggcccggctccacgccccggacggctagcaggaagggtctgcccctggggtctgcagtcagctccccagtgctcttctcgccggtcggccggcgtagctcgctaagctcgcggggaacaccaacacgaatgttcccacaccactccataactgagtctgtgaactatgatgtgaaaacgtttggatcttctcttcctgttaaagtcatggaagccctaacattggctgaagtcgatgaccagctgaccattaacatagatgaaggtggatgggcttgtctggtgtgcaaagagaagctcattatttggaagattgctctgtcacctattactaagttatccgtttgcaaagaacttcagctgccacctagtgatttccactggagtgccgacttagtggctctttcttactcttctccctcaggtgaagcacattctactcaggctgttgctgtcatggttgccaccagagaaggatctatccgctattggccaagccttgctggtgaagatacctacacagaggcttttgtagattcgggaggtgataagacttacagtttcctaacagcagtgcagggaggaagttttattttgtcttcatcaggaagccaactaattcggttgatacctgagagctcaggaaagattcatcagcatatcctgcctcaggggcaaggcatgctttcaggaattggtcgaaaagtttcttctctttttggaattttatctcctagtagtgatctcacactttcaagtgttctctgggatagagagagatcaagcttttatagcctgacgagttcaaacatcagtaaatgggaattagatgattcttcagaaaagcatgcatacagttgggatataaatagagccctgaaggaaaacattaccgatgctatttggggatctgaaagtaactatgaagctattaaagaaggagtcaacattcgatatttggacttgaagcaaaactgtgatgggctggtgattttggcagcagcatggcactcagcagacaatccatgtctcatctattactctctgataacaatagaagataatggttgccaaatgtcagatgcagttactgtagaagtcactcaatataatccaccttttcagtctgaagacctgattttgtgtcagttgacggtcccaaacttttcaaaccagactgcctatctgtataacgaaagtgctgtctatgtgtgctccacaggaactgggaaattttctcttccccaggagaaaattgtctttaatgcacaaggagatagtgttttaggtgctggtgcctgtggtggtgttcctatcattttttctagaaacagtggactggtgtctattacttcaagggaaaatgtgtctatattggcagaagacttggaagggtctttagcatcttcagttgctggaccaaacagtgaggtagatcgcttgagaccaggagttggagaccagcctgggcaacatgtcaaaaccccatctctacccaaaaaataaagaacttggttggtgtgtgtaactggccga

SEQ ID NO: 295162 - DNA, 1065 bp, Homo sapiens
tgcgtttgacgtcatcatcgcgcgccatctcttcccttaggtgtttaagttccgcgcgcaggccaggctgcaacctgacggccagatccctcgctgtcctagtcgctgctccttggagtcatgttcccagccgccccttctccgcggaccccgggtaccgggtcccgaaggggcccgctggccggactcgggcccggctccacgccccggacggctagcaggaagggtctgcccctggggtctgcagtcagctccccagtgctcttctcgccggtcggccggcgtagctcgctaagctcgcggggaacaccaacacgaatgttcccacaccactccataactgagtctgtgaactatgatgtgaaaacgtttggatcttctcttcctgttaaagtcatggaagccctaacattggctgaagtcgatgaccagctgaccattaacatagatgaaggtggatgggcttgtctggtgtgcaaagagaagctcattatttggaagattgctctgtcacctattactaagttatccgtttgcaaagaacttcagctgccacctagtgatttccactggagtgccgacttagtggctctttcttactcttctccctcaggtgaagcacattctactcaggctgttgctgtcatggttgccaccagagaaggatctatccgctattggccaagccttgctggtgaagatacctacacagaggcttttgtagattcgggaggtgataagacttacagtttcctaacagcagtgcagggaggaagttttattttgtcttcatcaggaagccaactaattcggttgatacctgagagctcaggaaagattcatcagcatatcctgcctcaggggcaaggcatgctttcaggaattggtcgaaaactttcaagtgttctctgggatagagagagatcaagcttttatagcctgacgagttcaaacatcagtaaatgggaattagatgattcttcagaaaagcatgcatacagttgggatataaatagagccctgaaggaaaacattaccgatgctatttgggtaagaaacaataat

SEQ ID NO: 295163 - DNA, 706 bp, Homo sapiens
gtcagctccccagtgctcttctcgccggtcggccggcgtagctcgctaagctcgcggtaagtgatctccctggttgggtctggcaaccaacagcctcacgggccgcagtgggccggataggttgttgtctttagaagcctttggaaccggggcggcggaatagaatgccacagtattggaaaatagaccttttccactgctgcaggtagtatctgcttcgttttgattatcagttgatcagttgattccccactttgcatttttcatggatacctttgtgcagaagtgaagtacaaactggatttgcatcagtgtttacctacttcccacctactacccgtgtgatctggtgtaagtcactcgtgattttcttcatctgtgaaatggcgataatatatctcacctgagccagaggagttattatgaattgccacgatgcagatgtaaggtgatggtgataatgaggacctacaaccctgaaagatcattgtttaatgcctaacataccaactgacattaatatctgatgattggtaattaaagggtttctagctacggaatttaactttctaggtaaattataaggaaaaggctttacataagtgagctaagagtactgtgatagtttagttactaaaactgctcgtttggagcaccagtaaaatcatcacacacacacacccctccccacccccaacacacacca

SEQ ID NO: 295164 - DNA, 622 bp, Homo sapiens
aagaaaacccttcttggcttgagtaaattggctgcattagcttcagacttttcagaggatatgctacaagaaaaaattgaaggtgaaagaatttgagcaaaaggatttacaaattggtcatgccatcaattaactcatgatgtgttcctgtcatcagttagcaggatctatctcttagaaacaggacctgtctctaagaggaatgcatttagttaatgtccatgtgtagttactcaattatatacttggaatttttttagagaaaagtagtttgtattttaaataagaattcctaaagaatagactcaaatgattttgattggagaggtctgattatgtacctttagtgataaatattccaagggcaaaaagaactacaaagcaatcttgacctttacacagtgggtttgttgtaggtagtgtggtataggtgcaataattctgaactattttgtgtatattgtagatgaaaacgattacatatagtacagttggcccttcatattcttggattccacatctgcagattcgaccaaacatcaaaaatatttggggaaaaaagaattaaaaatattcaacaacaattaaaattacaacaagagaattaacaaaaaaattaaaa

SEQ ID NO: 295165 - DNA, 292 bp, Homo sapiens
tatcacctgaatccctgttcaatgtaattttccagcagtgatgaagaggcataatttttatgctattagtctttcctttagccatcactagatcccttactttaaccatattattttgtgtaatttcacagcaacaagtggtcctggtggcatccgaacggtaataatacgccagcatgagattgtcctgaaggtggcttatccacaggcagacagcaacctccgaaacatcgtgaccgagcagctggtagccctgatcgattgcttcctggatggttatgtttctcagctt

SEQ ID NO: 295166 - DNA, 602 bp, Homo sapiens
agtcaggagtttgagaccagcctggccaacagggtgaaatcttctctactaaaaatacaaaaattagccaggtgtggtgatggattcctgtaatcccagctactcaggaggctgaggcaggagaatcacttgaacctgggaggcagaagtttcagtgagctgagatcgtgccactgcaatccagcctgggtgacagagcaagactttgtctcaaaaaaaacaaacaaacaaacaaacaaaaaacaaactacaacttccttacaagacataatgacttcttttctccataaatgtctctagtattagttacatgattgtataatcttctaccttattttaacttgtcatagctatatatctgtgaagaaaatagaagagctaatgaatatgatttcaagaaagctttggacttgttggaatatattgatgaggtaagtaaaattgcttgagatgatctcaggcaactgaatacatatataaaaagagggagatccctcttttagtcaatcatgaaaatgaattaagcaaaaaagactgtatctgtggttcaactacctttaatccttagaatgtaaacaactcttcagaaaagctgtcaaggt

SEQ ID NO: 295167 - DNA, 324 bp, Homo sapiens
ggttctagctgctcacatgtacaaatcacttctaggcctcagtttctgcgactatgaaaattactagattgcactagcttgtctctaaaattgctgtgactccagatactttgcactgaagagaatctagggtgtttgatatctgtttcagttagggctaatgggaaatgtctagtaagataaatgtcaacttttgctgacttattatgagatgaaaaaccaaaggagagtgggcctaactcatgtgagcttgataactgatgaactcattgggagcattttaaacttttctacataaataataaatgagcactaatgaaagta

SEQ ID NO: 295168 - DNA, 1417 bp, Homo sapiens
ggtcgacagagactgagcgagggaaagagagagccaaagtggaaaggaccataaactggcaaagccgctctgcgctcgctgtggatgaaagccccgtgttggtgaagcctctcctcgcgagcagcgcgcacccctccagagcaccccgcggacccgcacctcggcgtggccaccatggtcgggagagttcaaccggatcggaaacagttgccactggtcctactgagattgctctgccttcttcccacaggactgcctgttcgcagcgtggattttaaccgaggcacggacaacatcaccgtgaggcagggggacacagccatcctcaggtgcgttctagaagacaagaactcaaaggtggcctggttgaaccgttctggcatcatttttgctggacatgacaagtggtctctggacccacgggttgagctggagaaacgccattctctggaatacagcctccgaatccagaaggtggatgtctatgatgagggttcctacacttgctcagttcagacacagcatgagcccaagacctcccaagtttacttgatcgtacaagtcccaccaaagatctccaatatctcctcggatgtcactgtgaatgagggcagcaacgtgactctggtctgcatggccaatggccgtcctgaacctgttatcacctggagacaccttacaccaactggaagggaatttgaaggagaagaagaatatctggagatccttggcatcaccagggagcagtcaggcaaatatgagtgcaaagctgccaacgaggtctcctcggcggatgtcaaacaagtcaaggtcactgtgaactatcctcccactatcacagaatccaagagcaatgaagccaccacaggacgacaagcttcactcaaatgtgaggcctcggcagtgcctgcacctgactttgagtggtaccgggatgacactaggataaatagtgccaatggccttgagattaagagcacggagggccagtcttccctgacggtgaccaacgtcactgaggagcactacggcaactacacctgtgtggctgccaacaagctgggggtcaccaatgccagcctagtccttttcagacctgggtcggtgagaggaataaatggatccatcagtctggccgtaccactgtggctgctggcagcatctctgctctgccttctcagcaaatgttaatagaataaaaatttaaaaataatttaaaaaacacacaaaaatgcgtcacacagaatacagagagagagagacagagagagagagagagagagagatgggggagaccgtttatttcacaactttgtgtgtttatacatgaagggggaaataagaaagtgaagaagaaaatacaacatttaaaacaattttacagtccatcattaaaaatttatgtatcattcaggat

SEQ ID NO: 295169 - DNA, 1127 bp, Homo sapiens
ggtcgacagagactgagcgagggaaagagagagccaaagtggaaaggaccataaactggcaaagccgctctgcgctcgctgtggatgaaagccccgtgttggtgaagcctctcctcgcgagcagcgcgcacccctccagagcaccccgcggacccgcacctcggcgtggccaccatggtcgggagagttcaaccggatcggaaacagttgccactggtcctactgagattgctctgccttcttcccacaggactgcctgttcgcagcgtggattttaaccgaggcacggacaacatcaccgtgaggcagggggacacagccatcctcaggaagggaatttgaaggagaagaagaatatctggagatccttggcatcaccagggagcagtcaggcaaatatgagtgcaaagctgccaacgaggtctcctcggcggatgtcaaacaagtcaaggtcactgtgaactatcctcccactatcacagaatccaagagcaatgaagccaccacaggacgacaagcttcactcaaatgtgaggcctcggcagtgcctgcacctgactttgagtggtaccgggatgacactaggataaatagtgccaatggccttgagattaagagcacggagggccagtcttccctgacggtgaccaacgtcactgaggagcactacggcaactacacctgtgtggctgccaacaagctgggggtcaccaatgccagcctagtccttttcaaacgtgttttacccacaatcccccaccccattcaagaaattggtaccaccgtgcacttcaagcaaaaaggacctgggtcggtgagaggaataaatggatccatcagtctggccgtaccactgtggctgctggcagcatctctgctctgccttctcagcaaatgttaatagaataaaaatttaaaaataatttaaaaaacacacaaaaatgcgtcacacagaatacagagagagagagacagagagagagagagagagagagatgggggagaccgtttatttcacaactttgtgtgtttatacatgaagggggaaataagaaagtgaagaagaaaatacaacatttaaaacaattttacagtccatcattaaaaatttatgtatcattcaggat

SEQ ID NO: 295170 - DNA, 1058 bp, Homo sapiens
ggtcgacagagactgagcgagggaaagagagagccaaagtggaaaggaccataaactggcaaagccgctctgcgctcgctgtggatgaaagccccgtgttggtgaagcctctcctcgcgagcagcgcgcacccctccagagcaccccgcggacccgcacctcggcgtggccaccatggtcgggagagttcaaccggatcggaaacagttgccactggtcctactgagattgctctgccttcttcccacaggactgcctgttcgcagcgtggattttaaccgaggcacggacaacatcaccgtgaggcagggggacacagccatcctcaggaagggaatttgaaggagaagaagaatatctggagatccttggcatcaccagggagcagtcaggcaaatatgagtgcaaagctgccaacgaggtctcctcggcggatgtcaaacaagtcaaggtcactgtgaactatcctcccactatcacagaatccaagagcaatgaagccaccacaggacgacaagcttcactcaaatgtgaggcctcggcagtgcctgcacctgactttgagtggtaccgggatgacactaggataaatagtgccaatggccttgagattaagagcacggagggccagtcttccctgacggtgaccaacgtcactgaggagcactacggcaactacacctgtgtggctgccaacaagctgggggtcaccaatgccagcctagtccttttcagacctgggtcggtgagaggaataaatggatccatcagtctggccgtaccactgtggctgctggcagcatctctgctctgccttctcagcaaatgttaatagaataaaaatttaaaaataatttaaaaaacacacaaaaatgcgtcacacagaatacagagagagagagacagagagagagagagagagagagatgggggagaccgtttatttcacaactttgtgtgtttatacatgaagggggaaataagaaagtgaagaagaaaatacaacatttaaaacaattttacagtccatcattaaaaatttatgtatcattcaggat

SEQ ID NO: 295171 - DNA, 1202 bp, Homo sapiens
  misc_feature (1191)..(1191): n is a, c, g, or t
ggtcgacagagactgagcgagggaaagagagagccaaagtggaaaggaccataaactggcaaagccgctctgcgctcgctgtggatgaaagccccgtgttggtgaagcctctcctcgcgagcagcgcgcacccctccagagcaccccgcggacccgcacctcggcgtggccaccatggtcgggagagttcaaccggatcggaaacagttgccactggtcctactgagattgctctgccttcttcccacaggactgcctgttcgcagcgtggattttaaccgaggcacggacaacatcaccgtgaggcagggggacacagccatcctcaggtgcgttctagaagacaagaactcaaaggtggcctggttgaaccgttctggcatcatttttgctggacatgacaagtggtctctggacccacgggttgagctggagaaacgccattctctggaatacagcctccgaatccagaaggtggatgtctatgatgagggttcctacacttgctcagttcagacacagcatgagcccaagacctcccaagtttacttgatcgtacaagtcccaccaaagatctccaatatctcctcggatgtcactgtgaatgagggcagcaacgtgactctggtctgcatggccaatggccgtcctgaacctgttatcacctggagacaccttacaccaactggaagggaatttgaaggagaagaagaatatctggagatccttggcatcaccagggagcagtcaggcaaatatgagtgcaaagctgccaacgaggtctcctcggcggatgtcaaacaagtcaaggtcactgtgaactatcctcccactatcacagaatccaagagcaatgaagccaccacaggacgacaagcttcactcaaatgtgaggcctcggcagtgcctgcacctgactttgagtggtaccgggatgacactaggataaatagtgccaatggccttgagattaagagcacggagggccagtcttccctgacggtgaccaacgtcactgaggagcactacggcaactacacctgtgtggctgccaacaagctgggggtcaccaatgccagcctagtccttttcagacctgggtcggtgagaggaataaatggatccatcagtctggccgtaccactgtggctgctggcagcatctctgctctgccttctccgcgatcgaagngtgggggatcc

SEQ ID NO: 295172 - DNA, 1453 bp, Homo sapiens
ggtcgacagagactgagcgagggaaagagagagccaaagtggaaaggaccataaactggcaaagccgctctgcgctcgctgtggatgaaagccccgtgttggtgaagcctctcctcgcgagcagcgcgcacccctccagagcaccccgcggacccgcacctcggcgtggccaccatggtcgggagagttcaaccggatcggaaacagttgccactggtcctactgagattgctctgccttcttcccacaggactgcctgttcgcagcgtggattttaaccgaggcacggacaacatcaccgtgaggcagggggacacagccatcctcaggtgcgttctagaagacaagaactcaaaggtggcctggttgaaccgttctggcatcatttttgctggacatgacaagtggtctctggacccacgggttgagctggagaaacgccattctctggaatacagcctccgaatccagaaggtggatgtctatgatgagggttcctacacttgctcagttcagacacagcatgagcccaagacctcccaagtttacttgatcgtacaagtcccaccaaagatctccaatatctcctcggatgtcactgtgaatgagggcagcaacgtgactctggtctgcatggccaatggccgtcctgaacctgttatcacctggagacaccttacaccaactggaagggaatttgaaggagaagaagaatatctggagatccttggcatcaccagggagcagtcaggcaaatatgagtgcaaagctgccaacgaggtctcctcggcggatgtcaaacaagtcaaggtcactgtgaactatcctcccactatcacagaatccaagagcaatgaagccaccacaggacgacaagcttcactcaaatgtgaggcctcggcagtgcctgcacctgactttgagtggtaccgggatgacactaggataaatagtgccaatggccttgagattaagagcacggagggccagtcttccctgacggtgaccaacgtcactgaggagcactacggcaactacacctgtgtggctgccaacaagctgggggtcaccaatgccagcctagtccttttcaaacgtgttttacccacaatcccccaccccattcaaggacctgggtcggtgagaggaataaatggatccatcagtctggccgtaccactgtggctgctggcagcatctctgctctgccttctcagcaaatgttaatagaataaaaatttaaaaataatttaaaaaacacacaaaaatgcgtcacacagaatacagagagagagagacagagagagagagagagagagagatgggggagaccgtttatttcacaactttgtgtgtttatacatgaagggggaaataagaaagtgaagaagaaaatacaacatttaaaacaattttacagtccatcattaaaaatttatgtatcattcaggat

SEQ ID NO: 295173 - DNA, 1315 bp, Homo sapiens
ggtcgacagagactgagcgagggaaagagagagccaaagtggaaaggaccataaactggcaaagccgctctgcgctcgctgtggatgaaagccccgtgttggtgaagcctctcctcgcgagcagcgcgcacccctccagagcaccccgcggacccgcacctcggcgtggccaccatggtcgggagagttcaaccggatcggaaacagttgccactggtcctactgagattgctctgccttcttcccacaggactgcctgttcgcagcgtggattttaaccgaggcacggacaacatcaccgtgaggcagggggacacagccatcctcaggtgcgttctagaagacaagaactcaaaggtggcctggttgaaccgttctggcatcatttttgctggacatgacaagtggtctctggacccacgggttgagctggagaaacgccattctctggaatacagcctccgaatccagaaggtggatgtctatgatgagggttcctacacttgctcagttcagacacagcatgagcccaagacctcccaagtttacttgatcgtacaagtcccaccaaagatctccaatatctcctcggatgtcactgtgaatgagggcagcaacgtgactctggtctgcatggccaatggccgtcctgaacctgttatcacctggagacaccttacaccaactggaagggaatttgaaggagaagaagaatatctggagatccttggcatcaccagggagcagtcaggcaaatatgagtgcaaagctgccaacgaggtctcctcggcggatgtcaaacaagtcaaggtcactgtgaactatcctcccactatcacagaatccaagagcaatgaagccaccacaggacgacaagcttcactcaaatgtgaggcctcggcagtgcctgcacctgactttgagtggtaccgggatgacactaggataaatagtgccaatggccttgagattaagagcacggagggccagtcttccctgacggtgaccaacgtcactgaggagcactacggcaactacacctgtgtggctgccaacaagctgggggtcaccaatgccagcctagtccttttcagtaagtatgccaaagcagggcccaacttgatggaattaaattgacttttcacatgaaaaacgtgaaaaccattcccttagctattaaaagttcacttaaaaacaaataaggatatatgcactgaaacaaaaatacagggttctcaactcctgtgcatagcagagatttataaatggaacaacttctctctatagtctttcttacttctgataactgccttgt

SEQ ID NO: 295174 - DNA, 1566 bp, Homo sapiens
ggtcgacagagactgagcgagggaaagagagagccaaagtggaaaggaccataaactggcaaagccgctctgcgctcgctgtggatgaaagccccgtgttggtgaagcctctcctcgcgagcagcgcgcacccctccagagcaccccgcggacccgcacctcggcgtggccaccatggtcgggagagttcaaccggatcggaaacagttgccactggtcctactgagattgctctgccttcttcccacaggactgcctgttcgcagcgtggattttaaccgaggcacggacaacatcaccgtgaggcagggggacacagccatcctcaggtgcgttctagaagacaagaactcaaaggtggcctggttgaaccgttctggcatcatttttgctggacatgacaagtggtctctggacccacgggttgagctggagaaacgccattctctggaatacagcctccgaatccagaaggtggatgtctatgatgagggttcctacacttgctcagttcagacacagcatgagcccaagacctcccaagtttacttgatcgtacaagtcccaccaaagatctccaatatctcctcggatgtcactgtgaatgagggcagcaacgtgactctggtctgcatggccaatggccgtcctgaacctgttatcacctggagacaccttacaccaactggaagggaatttgaaggagaagaagaatatctggagatccttggcatcaccagggagcagtcaggcaaatatgagtgcaaagctgccaacgaggtctcctcggcggatgtcaaacaagtcaaggtcactgtgaactatcctcccactatcacagaatccaagagcaatgaagccaccacaggacgacaagcttcactcaaatgtgaggcctcggcagtgcctgcacctgactttgagtggtaccgggatgacactaggataaatagtgccaatggccttgagattaagagcacggagggccagtcttccctgacggtgaccaacgtcactgaggagcactacggcaactacacctgtgtggctgccaacaagctgggggtcaccaatgccagcctagtccttttcaaacgtgttttacccacaatcccccaccccattcaagaaattggtaccaccgtgcacttcaagcaaaaagtcctgctgcagctgaattttgctccttgagtcaacattaaaagccttgacccatttcacaaatcaatgcctttgattcaggacctgggtcggtgagaggaataaatggatccatcagtctggccgtaccactgtggctgctggcagcatctctgctctgccttctcagcaaatgttaatagaataaaaatttaaaaataatttaaaaaacacacaaaaatgcgtcacacagaatacagagagagagagacagagagagagagagagagagagatgggggagaccgtttatttcacaactttgtgtgtttatacatgaagggggaaataagaaagtgaagaagaaaatacaacatttaaaacaattttacagtccatcattaaaaatttatgtatcattcaggat

SEQ ID NO: 295175 - DNA, 795 bp, Homo sapiens
cctgctctccctatcatgacccagagcctgcgtcaccccaccctggttttcacaccctccatccacaccctggagcagtcaatacccacttggcatctccgtaatcacagagatgtccaccttcatcccttgcaactattggaagccaaagaatgggagcaaaccacacgatgggcgttgggaagcaccgtaattacagggttgggaggcaggatgcctgcgctgggggaggaggtgcctttcaaacctgggatgcagctgggacagtgtcagctactaccccagcctccccactcacccccgcactgaaagctccccctggggcttcgtgctttcctgggcacttcccttcccccatgggatccaggcatcctgctctccaccatgtccttcttcaggcatgcaggggacctccaagcaatgatatccaaggaattccatctggcagccacccaggatgactgcagaaaaggaaggacacaggaggatatcctggttccctcttcccacccagagctgtttgcatcagtcctgccaatggctccggaagaagctgccaggctccagcaacctcagccccttcctcctccctcaggaatccacctatccgcctctaggaccttggctccaactctattgtactcgtctcctccctcccattctccttttggtctcagctccttgatctaagcctcccagagagacccctagaacgtttccctcaaggacctttctgcctggaagtctgttagcctttcagaagtaacatgtccaaaataaaatttgattcctccc

SEQ ID NO: 295176 - DNA, 855 bp, Homo sapiens
cctgctctccctatcatgacccagagcctgcgtcaccccaccctggttttcacaccctccatccacaccctggagcagtcaatacccacttggcatctccgtaatcacagagatgtccaccttcatcccttgcaactattggaagccaaagaatgggagcaaaccacacgatgggcgttgggaagcaccgtaattacagggttgggaggcaggatgcctgcgctgggggaggaggtgcctttcaaacctgggatgcagctgggacagtgtcagctactaccccagcctccccactcacccccgcactgaaagctccccctggggcttcgtgctttcctgggcacttcccttcccccatgggatccaggcatcctgctctccaccatgtccttcttcaggcatgcaggggacctccaagcaatgatatccaaggaattccatctggcagccacccaggatgactgcagaaaaggaaggacacaggaggatatcctggttccctcttcccacccagagctgtttgcatcagtcctgccaatggctccggaagaagctgccaggctccagcaacctcagccccttcctcctccctcaggaatccacctatccgcctctaggaccttggctccaactctattgtactcgtctcctccctcccattctccttttggtctcagctccttgatctaagcctcccagagagacccctagaacgtttccctcaaggacctttctgcctggaagtctgttagcctttcagaagtaacatgtccaaaataaaatttgattcctcccaggttgttccctgcctggtccgctaccccacagtaaggaacaccttattatgcaatggcg

SEQ ID NO: 295177 - DNA, 498 bp, Homo sapiens
ccccacccagccccagccccaggaggaggagcctgtctggacggacgcagcctgaactgacccacaaacagaccaaaaaagtcactctcaaagagctctcggcatgcaggggacctccaagcaatgatatccaaggaattccatctggcagccacccaggatgactgcagaaaaggaaggacacaggaggatatcctggttccctcttcccacccagagctgtttgcatcagtcctgccaatggctccggaagaagctgccaggctccagcaacctcagccccttcctcctccctcaggaatccacctatccgcctctaggaccttggctccaactctattgtactcgtctcctccctcccattctccttttggtctcagctccttgatctaagcctcccagagagacccctagaacgtttccctcaaggacctttctgcctggaagtctgttagcctttcagaagtaacatgtccaaaataaaatttgattcctccc

SEQ ID NO: 295178 - DNA, 465 bp, Homo sapiens
gcttccaggtgtcccagaaacccaggaaatcgagactcatgactcccagagaggatggcatctagaaggcatgcaggggacctccaagcaatgatatccaaggaattccatctggcagccacccaggatgactgcagaaaaggaaggacacaggaggatatcctggttccctcttcccacccagagctgtttgcatcagtcctgccaatggctccggaagaagctgccaggctccagcaacctcagccccttcctcctccctcaggaatccacctatccgcctctaggaccttggctccaactctattgtactcgtctcctccctcccattctccttttggtctcagctccttgatctaagcctcccagagagacccctagaacgtttccctcaaggacctttctgcctggaagtctgttagcctttcagaagtaacatgtccaaaataaaatttgattcctccc

SEQ ID NO: 295179 - DNA, 230 bp, Homo sapiens
tggaatctacagtccatgggccctgacttcttgccttcgtctcaaatagactctgcagccagccatctatgcagcgccccagtggctttgaaatgcaacagaaaccatcacccccggaccgtgggctccatgccagtgggcaaagcacaggtgcgttcactgagttcccagcacatagctgtggcaggcacttggtgatattttgaaataaaagaatggaagaatgtgtc

SEQ ID NO: 295180 - DNA, 920 bp, Homo sapiens
gcttccaggtgtcccagaaacccaggaaatcgagactcatgactcccagagaggatggcatctagaagtagacgatcaagggtggaatctacagtccatgggccctgacttcttgccttcgtctcaaatagactctgcagccagccatctatgcagcgccccagtggctttgaaatgcaacagaaaccatcacccccggaccgtgggctccatgccagtgggcaaagcacagcctgggaagaattggtttgcagccaggcagtcctccatccagtcttgactttggcacttgtgatatgacttgcacagaccaaaaaagtcactctcaaagagctctcggcacacagaccccagctttacaaggaccccagctccttaacacagatcccagctccaaggaaactcgtcccccccacgttaatcctgaccgactttgccacatggagccagcaaaccatttctggcatgcaggggacctccaagcaatgatatccaaggaattccatctggcagccacccaggatgactgcagaaaaggaaggacacaggaggatatcctggttccctcttcccacccagagctgtttgcatcagtcctgccaatggctccggaagaagctgccaggctccagcaacctcagccccttcctcctccctcaggaatccacctatccgcctctaggaccttggctccaactctattgtactcgtctcctccctcccattctccttttggtctcagctccttgatctaagcctcccagagagacccctagaacgtttccctcaaggacctttctgcctggaagtctgttagcctttcagaagtaacatgtccaaaataaaatttgattcctcccaggttgttccctgcctggtccgctaccccacagtaaggaacaccttattatgcaatggcg

SEQ ID NO: 295181 - DNA, 1704 bp, Homo sapiens
  misc_feature (10)..(10): n is a, c, g, or t
  misc_feature (12)..(12): n is a, c, g, or t
ggcggggcangnaggcagcatgctaaaccgggtgcgctcggccgtggcgcacctggtgagctccgggggcgctccgcctccgcgccccaaatccccggacctgcccaacgccgcctcggcgccgcccgccgccgctccagaagcgcccaggagccctcccgcgaaggctgggagcgggagcgcgacgcccgcgaaggctgttgaggctcgagcgagcttctccagaccgacctttctgcagctgagccccggggggctgcgacgcgccgatgaccacgcgggccgggctgtgcaaagccccccggacacgggccgccgcctgccctggagcacaggctacgccgaggtcatcaatgctggcaagagtcggcacaatgaggaccaggcttgctgtgaagtggtgtatgtggaaggtcggaggagtgttacaggagtacctagggagcctagccgaggccagggactctgcttctactactggggcctatttgatgggcatgcagggggcggagctgctgaaatggcctcacggctcctgcatcgccatatccgagagcagctaaaggacctggtagagatacttcaggacccttcgccaccacccctctgcctcccaaccactccggggaccccagattcctccgatccctctcacttgcttggccctcagtcctgctggtcttcacagaaggaagtgagccacgagagcctggtagtgggggccattgagaatgccttccagctcatggatgagcagatggcccgggagcggcgtggccaccaagtggaggggggctgctgtgcactggttgtgatctacctgctaggcaaggtgtacgtggccaatgcaggcgatagcagggccatcattgtccggaatggtgaaatcattccaatgtcccgggagtttaccccggagactgagcgccagcgtcttcagctgcttggcttcctgaaaccagagctgctaggcagtgaattcacccaccttgagttcccccgcagagttctgcccaaggagctggggcagaggatgttgtaccgggaccagaacatgaccggctgggcctacaaaaagatcgagctggaggatctcaggtttcctctggtctgtggggagggcaaaaaggctcgggtgatggccaccattggggtgacccgaggcttgggagaccacagccttaaggtctgcagttccaccctgcccatcaagccctttctctcctgcttccctgaggtacgagtgtatgacctgacacaatatgagcactgcccagatgatgtgctagtcctgggaacagatggcctgtgggatgtcactactgactgtgaggtagctgccactgtggacagggtgctgtcggcctatgagcctaatgaccacagcaggtatacagctctggcccaagctctggtcctgggggcccggggtaccccccgagaccgtggctggcgtctccccaacaacaagctgggttccggggatgacatctctgtcttcgtcatccccctgggagggccaggcagttactcctgaggggctgaacaccatccctcccactagcctctccatacttactcctctcacagcccaaattctgaagttgtctccctgacccttctttagtggcaacttaactgaagaagggatgtccgctatatccaaaattacagctattggcaaataaacgagatggataaagg

SEQ ID NO: 295182 - DNA, 2505 bp, Homo sapiens
  misc_feature (10)..(10): n is a, c, g, or t
  misc_feature (12)..(12): n is a, c, g, or t
ggcggggcangnaggcagcatgctaaaccgggtgcgctcggccgtggcgcacctggtgagctccgggggcgctccgcctccgcgccccaaatccccggacctgcccaacgccgcctcggcgccgcccgccgccgctccagaagcgcccaggagccctcccgcgaaggctgggagcgggagcgcgacgcccgcgaaggctgttgaggctcgagcgagcttctccagaccgacctttctgcagctgagccccggggggctgcgacgcgccgatgaccacgcgggccgggctgtgcaaagccccccggacacgggccgccgcctgccctggagcacaggctacgccgagtgagcgccccctggggcacccaaaccaggatggggctcccacccctctccccagctccgcatccccggcgctaggacgcgttccccacgccgcgtccgggccaggagctcccttttccgtggacctttgctatcctctggtcttcgggccgcaccccctcccaacccattttccagtggggggcagcctgtgtcaccttcttcacgtccttcccgctcattgactgccctcgcccacgccgcctcaggaccctgttctgccccagagcccggagggcggagagcccggcgaaggatgagttggccagttccccgtcgcggcccggcagcttaaaggctaagggaaaaggggtttcacgaaggagcggggttctttttaataggggacatagcggttgggaagactcgctcacccgcttcccggctccagcgccccagttccctgtccctcttaccgtagttcccctccccctccacacccagaaatagcccgcgacaccaggaggccgccagcttccccaggagcggggagggggacgcccggggtagaggagggtcccatttagatgcccttcagcctgccaactcgtgctggcctggcaaagaagcggaccccctgcccggagcggccggctggcccccgggctgtgtgtattttaaatgcatctgccgggaacgcagagcaccgagggagatgggggcgctcagttcgctgaggaaggtggctggtggcccatggacccaccaccacctcccttagcctcctgtgtgggaggagtttatgggtatgtggctcctgcccagtccaggtgggctttcacttctactctatttcagttcctctttcccgatctgggctggagagcttcctcattgttaaggcagcagaaactttcgctggatggttttaggataaggggtcatcaatgctggcaagagtcggcacaatgaggaccaggcttgctgtgaagtggtgtatgtggaaggtcggaggagtgttacaggagtacctagggagcctagccgaggccagggactctgcttctactactggggcctatttgatgggcatgcagggggcggagctgctgaaatggcctcacggctcctgcatcgccatatccgagagcagctaaaggacctgaaggaagtgagccacgagagcctggtagtgggggccattgagaatgccttccagctcatggatgagcagatggcccgggagcggcgtggccaccaagtggaggggggctgctgtgcactggttgtgatctacctgctaggcaaggtgtacgtggccaatgcaggcgatagcagggccatcattgtccggaatggtgaaatcattccaatgtcccgggagtttaccccggagactgagcgccagcgtcttcagctgcttggcttcctgaaaccagagctgctaggcagtgaattcacccaccttgagttcccccgcagagttctgcccaaggagctggggcagaggatgttgtaccgggaccagaacatgaccggctgggcctacaaaaagatcgagctggaggatctcaggtttcctctggtctgtggggagggcaaaaaggctcgggtgatggccaccattggggtgacccgaggcttgggagaccacagccttaaggtctgcagttccaccctgcccatcaagccctttctctcctgcttccctgaggtacgagtgtatgacctgacacaatatgagcactgcccagatgatgtgctagtcctgggaacagatggcctgtgggatgtcactactgactgtgaggtagctgccactgtggacagggtgctgtcggcctatgagcctaatgaccacagcaggtatacagctctggcccaagctctggtcctgggggcccggggtaccccccgagaccgtggctggcgtctccccaacaacaagctgggttccggggatgacatctctgtcttcgtcatccccctgggagggccaggcagttactcctgaggggctgaacaccatccctcccactagcctctccatacttactcctctcacagcccaaattctgaagttgtctccctgacccttctttagtggcaacttaactgaagaagggatgtccgctatatccaaaattacagctattggcaaataaacgagatggataaagg

SEQ ID NO: 295183 - DNA, 387 bp, Homo sapiens
cacatgtgggcctgtgtatctgtcttcccacatacatgttggtacatgaatgtgcatgtgtgctcctggcaggtatacagctctggcccaagctctggtcctgggggcccggggtaccccccgagaccgtggctggcgtctccccaacaacaagctgggttccggggatgacatctctgtcttcgtcatccccctgggagggccaggcagttactcctgaggggctgaacaccatccctcccactagcctctccatacttactcctctcacagcccaaattctgaagttgtctccctgacccttctttagtggcaacttaactgaagaagggatgtccgctatatccaaaattacagctattggcaaataaacgagatggataaagg

SEQ ID NO: 295184 - DNA, 796 bp, Homo sapiens
tgctgtgagcataatgccccctggctctctgttctgatcatccccaactccagggcttcctgaaaccagagctgctaggcagtgaattcacccaccttgagttcccccgcagagttctgcccaaggagctggggcagaggatgttgtaccgggaccagaacatgaccggctggctcgggtgatggccaccattggggtgacccgaggcttgggagaccacagccttaaggtctgcagttccaccctgcccatcaagccctttctctcctgcttccctgaggtacgagtgtatgacctgacacaatatgagcactgcccagatgatgtgctagtcctgggaacagatggcctgtgggatgtcactactgactgtgaggtagctgccactgtggacagggtgctgtcggcctatgagcctaatgaccacagcagccccaccatggctgcaatccgaaagaagctggtgatcgttggggatggtgcctgtgggaagacctgcctcctcatcgtcttcagcaaggatcagtttccggaggtctacgtccctactgtctttgagaactatattgcggacattgaggtggacggcaagcaggtggagctggctctgtgggacacagcagggcaggaagactatgatcgactgcggcctctctcctacccggacactgatgtcatcctcatgtgcttctccatcgacagccctgacagcctggaaaacattcctgagaagtggaccccagaggtgaagcacttctgccccaacgtgcccatcatcctggtggggaataagaag

SEQ ID NO: 295185 - DNA, 1824 bp, Homo sapiens
  misc_feature (10)..(10): n is a, c, g, or t
  misc_feature (12)..(12): n is a, c, g, or t
  misc_feature (1762)..(1762): n is a, c, g, or t
  misc_feature (1787)..(1787): n is a, c, g, or t
ggcggggcangnaggcagcatgctaaaccgggtgcgctcggccgtggcgcacctggtgagctccgggggcgctccgcctccgcgccccaaatccccggacctgcccaacgccgcctcggcgccgcccgccgccgctccagaagcgcccaggagccctcccgcgaaggctgggagcgggagcgcgacgcccgcgaaggctgttgaggctcgagcgagcttctccagaccgacctttctgcagctgagccccggggggctgcgacgcgccgatgaccacgcgggccgggctgtgcaaagccccccggacacgggccgccgcctgccctggagcacaggctacgccgaggtcatcaatgctggcaagagtcggcacaatgaggaccaggcttgctgtgaagtggtgtatgtggaaggtcggaggagtgttacaggagtacctagggagcctagccgaggccagggactctgcttctactactggggcctatttgatgggcatgcagggggcggagctgctgaaatggcctcacggctcctgcatcgccatatccgagagcagctaaaggacctggtagagatacttcaggacccttcgccaccacccctctgcctcccaaccactccggggaccccagattcctccgatccctctcacttgcttggccctcagtcctgctggtcttcacagaaggaagtgagccacgagagcctggtagtgggggccattgagaatgccttccagctcatggatgagcagatggcccgggagcggcgtggccaccaagtggaggggggctgctgtgcactggttgtgatctacctgctaggcaaggtgtacgtggccaatgcaggcgatagcagggccatcattgtccggaatggtgaaatcattccaatgtcccgggagtttaccccggagactgagcgccagcgtcttcagctgcttggcttcctgaaaccagagctgctaggcagtgaattcacccaccttgagttcccccgcagagttctgcccaaggagctggggcagaggatgttgtaccgggaccagaacatgaccggctgggcctacaaaaagatcgagctggaggatctcaggtttcctctggtctgtggggagggcaaaaaggctcgggtgatggccaccattggggtgacccgaggcttgggagaccacagccttaaggtctgcagttccaccctgcccatcaagccctttctctcctgcttccctgaggtacgagtgtatgacctgacacaatatgagcactgcccagatgatgtgctagtcctgggaacagatggcctgtgggatgtcactactgactgtgaggtagctgccactgtggacagggtgctgtcggcctatgagcctaatgaccacagcaggtatacagctctggcccaagctctggtcctgggggcccggggtaccccccgagaccgtggctggcgtctccccaacaacaagctgggttccggggatgacatctctgtcttcgtcatccccctgggagggccaggcagttactcctgaggggctgaacaccatccctcccactagcctctccatacttactcctctcacagcccaaattctgaagttgtctccctgacccttctttagtggcaacttaactgaagaagggatgtccgctatatccaaaattacagctattggcaaataaacgagatggataaaggaaaactcgtgccgttttagcgggtacaagatctaccccggacacgggaggcgctacgncagggaccgacgggaaaggtttttncagtttcttaatgcgaaatgcgagtcgggttttcttt

SEQ ID NO: 295186 - DNA, 1705 bp, Homo sapiens
  misc_feature (10)..(10): n is a, c, g, or t
  misc_feature (12)..(12): n is a, c, g, or t
ggcggggcangnaggcagcatgctaaaccgggtgcgctcggccgtggcgcacctggtgagctccgggggcgctccgcctccgcgccccaaatccccggacctgcccaacgccgcctcggcgccgcccgccgccgctccagaagcgcccaggagccctcccgcgaaggctgggagcgggagcgcgacgcccgcgaaggctgttgaggctcgagcgagcttctccagaccgacctttctgcagctgagccccggggggctgcgacgcgccgatgaccacgcgggccgggctgtgcaaagccccccggacacgggccgccgcctgccctggagcacaggctacgccgaggtcatcaatgctggcaagagtcggcacaatgaggaccaggcttgctgtgaagtggtgtatgtggaaggtcggaggagtgttacaggagtacctagggagcctagccgaggccagggactctgcttctactactggggcctatttgatgggcatgcagggggcggagctgctgaaatggcctcacggctcctgcatcgccatatccgagagcagctaaaggacctggtagagatacttcaggacccttcgccaccacccctctgcctcccaaccactccggggaccccagattcctccgatccctctcacttgcttggccctcagtcctgctggtcttcacagaaggaagtgagccacgagagcctggtagtgggggccattgagaatgccttccagctcatggatgagcagatggcccgggagcggcgtggccaccaagtggaggggggctgctgtgcactggttgtgatctacctgctaggcaaggtgtacgtggccaatgcaggcgatagcagggccatcattgtccggaatggtgaaatcattccaatgtcccgggagtttaccccggagactgagcgccagcgtcttcagctgcttggcttcctgaaaccagagctgctaggcagtgaattcacccaccttgagttcccccgcagagttctgcccaaggagctggggcagaggatgttgtaccgggaccagaacatgaccggctgggcctacaaaaagatcgagctggaggatctcaggtttcctctggtctgtggggagggcaaaaaggctcgggtgatggccaccattggggtgacccgaggcttgggagaccacagccttaaggtctgcagttccaccctgcccatcaagccctttctctcctgcttccctgaggtacgagtgtatgacctgacacaatatgagcactgcccagatgatgtgctagtcctgggaacagatggcctgtgggatgtcactactgactgtgaggtagctgccactgtggacagggtgctgtcggcctatgagcctaatgaccacagcaggtatacagctctggcccaagctctggtcctgggggcccggggtaccccccgagaccgtggctggcgtctccccaacaacaagctgggttccggggatgacatctctgtcttcgtcatccccctgggagggccaggcagttactcctgaggggctggccgcatacgtcgcactatcctctggatacgtcatcactctcgcagggcacagtcgacagtggtgctccttgaccattccttagtgaagaataaactaaacaacggatgcgcgcggatactcccgaagcacaggtaatggctgattgcgcgaatggatcat

SEQ ID NO: 295187 - DNA, 1810 bp, Homo sapiens
gcgcagacgggaagctgctcagcaccggcttcagcaggatgagtgagcggcaactcgcgctctgggacccgttttgctgcgtcgcgtgaaggatcctgcgctggcgcccccacctggtgatgccgagtccctgggggtggtttgctgtgactgcatgcggcgcgcagcggaacaacttcgaggagccagtggcactgcaggagatggacacaagcaacggggtcctattgcccttttacgatcccgactccagcatcgtctacctgtgtggcaagggcgacagcagcattcggtactttgagattaccgacgagccgcctttcgtgcactacctgaacacgttcagcagcaaagagccgcagcggggcatgggtttcatgcccaaaaggggactggatgtcagcaagtgtgagatcgcccggttctacaagctacacgaaagaaagtgtgaacctatcatcatgactgtgccccgcaagtcagacctcttccaggacgatctgtacccggatacgccaggcccggagccggccctagaagcggacgaatggctatccggccaggacgccgaacccgtgctcatttcgctgagggacggctatgtgccccccaagcaccgcgagctccgggtcacgaagcgcaacatcctggacgtgcgcccgccctccggcccccgccgcagccagtcggccagcgacgcccccttgtcgcagcacaccctggagacgctgctggaagagatcaaggccctccgcgagcgggtgcaggcccaggagcagcgcatcacggctctggagaacatgctgtgcgagctggtggacggcacggactagccccgcgcgccaggcaggcggagcggggcggggcgcacaagctcggccccgccccggcttttagtcccgaactccggaccccgccttcttgggctgggcccgggggcgggactggggagggaactccgcccctcgcgggagaccagaactcttggagcttaggggagacccacgtcgctccagcggaggctggactgcgagcctcgtctgggactcggctggagctggcctagggaggcctggggtaacctggggggctcagcaatggtgctgcacggcgaggtggtgtccccctttgtcctccgcccagggcagggaaagtgcttagtattagcgtgatgcttggggttattggagcctgagcttgacctcaaacgggtggcgatttgatgggtacccccaggctggggaaaatgacagcgcttctcctaatcagctcactggattccatcaccctgagcggtaaaccagatgggcgtcaccccagttctgcagacacatacacaacccgtttgctgcagagccggacccagtggctacacccacagcggtctgtggtagagaactctcttccttctttccaccgacaggggcgagggctgcttcctcgcggcagcccccgcgaagaaatctcgagagaactggcatgaggagttaggttcatcacaaatacacacacactgcccccaaccctctgccgttgcctctctcagaaaaacaagacgtactgaatgaaatattttactaagcgttcagtctgtgcctcctgcatgggtgggagtgaggggaacgagacccccagcctctgcaaatgctacccccaggctcctgggagacctggcgatgcactcctgggctcagggtccatcaggcagcctcttaccctagagctctctccactctgaggttcagaaggaccccaacccacaccgtaggcgttccccccaagtaaagttaggtagcaaaagccaaaaaaa

SEQ ID NO: 295188 - DNA, 2717 bp, Homo sapiens
cagctggggctgcagcggcgccgggctctagagagccgcaggatcggccagagtgcggagctggacacccgggtcccagatactacagacacccggagaggtggctccttcgccctgaagccttcctcggccccctacgcactcgggccccttccgcagaggattcgcagcgtgagcgccccgcagcccgctcaggaccagctatgagcagacgtgtggttcggcaaagcaagttccgccatgtgtttgggcaggcagcaaaggccgaccaggcctacgaggacatccgtgtgtccaaggtcacatgggacagctccttctgtgccgtcaaccccaaattcctggccattattgtggaggctggaggcgggggtgccttcatcgtcctgcctctggccaagacagggcgagtggataagaactacccactggtcactgggcacactgcccctgtgctggatattgactggtgtccacacaatgacaacgttatcgccagtgcctcagacgacaccaccatcatggtgtggcagattccagactatacccccatgcgcaacattacggaacctatcatcacacttgagggccactccaagcgtgtgggcatcctctcctggcaccctactgccaggaatgtcctgctcagtgcaggtggtgacaatgtgatcatcatctggaatgtgggcaccggggaggtgctgctgagcctggatgatatgcacccagacgtcatccacagtgtgtgctggaacagcaacggtagcctgctagccaccacctgcaaggacaagaccttgcgcatcattgaccccagaaaaggccaagtggtggcggagaggtttgcggcccacgaggggatgaggcccatgcgggccgtcttcacgcgccagggccatatcttcaccacgggcttcacccgcatgagccagcgagagctgggcctgtgggacccggtaacgcagctggaggcttgggttttgctgcgtcgcgtgaaggatcctgcgctggcgcccccacctggtgatgccgagtccctgggggtggtttgctgtgactgcatgcggcgcgcagcggaacaacttcgaggagccagtggcactgcaggagatggacacaagcaacggggtcctattgcccttttacgatcccgactccagcatcgtctacctgtgtggcaagggcgacagcagcattcggtactttgagattaccgacgagccgcctttcgtgcactacctgaacacgttcagcagcaaagagccgcagcggggcatgggtttcatgcccaaaaggggactggatgtcagcaagtgtgagatcgcccggttctacaagctacacgaaagaaagtgtgaacctatcatcatgactgtgccccgcaagtcagacctcttccaggacgatctgtacccggatacgccaggcccggagccggccctagaagcggacgaatggctatccggccaggacgccgaacccgtgctcatttcgctgagggacggctatgtgccccccaagcaccgcgagctccgggtcacgaagcgcaacatcctggacgtgcgcccgccctccggcccccgccgcagccagtcggccagcgacgcccccttgtcgcagcacaccctggagacgctgctggaagagatcaaggccctccgcgagcgggtgcaggcccaggagcagcgcatcacggctctggagaacatgctgtgcgagctggtggacggcacggactagccccgcgcgccaggcaggcggagcggggcggggcgcacaagctcggccccgccccggcttttagtcccgaactccggaccccgccttcttgggctgggcccgggggcgggactggggagggaactccgcccctcgcgggagaccagaactcttggagcttaggggagacccacgtcgctccagcggaggctggactgcgagcctcgtctgggactcggctggagctggcctagggaggcctggggtaacctggggggctcagcaatggtgctgcacggcgaggtggtgtccccctttgtcctccgcccagggcagggaaagtgcttagtattagcgtgatgcttggggttattggagcctgagcttgacctcaaacgggtggcgatttgatgggtacccccaggctggggaaaatgacagcgcttctcctaatcagctcactggattccatcaccctgagcggtaaaccagatgggcgtcaccccagttctgcagacacatacacaacccgtttgctgcagagccggacccagtggctacacccacagcggtctgtggtagagaactctcttccttctttccaccgacaggggcgagggctgcttcctcgcggcagcccccgcgaagaaatctcgagagaactggcatgaggagttaggttcatcacaaatacacacacactgcccccaaccctctgccgttgcctctctcagaaaaacaagacgtactgaatgaaatattttactaagcgttcagtctgtgcctcctgcatgggtgggagtgaggggaacgagacccccagcctctgcaaatgctacccccaggctcctgggagacctggcgatgcactcctgggctcagggtccatcaggcagcctcttaccctagagctctctccactctgaggttcagaaggaccccaacccacaccgtaggcgttccccccaagtaaagttaggtagcaaaagccaaaaaaa

SEQ ID NO: 295189 - DNA, 2596 bp, Homo sapiens
cagctggggctgcagcggcgccgggctctagagagccgcaggatcggccagagtgcggagctggacacccgggtcccagatactacagacacccggagaggtggctccttcgccctgaagccttcctcggccccctacgcactcgggccccttccgcagaggattcgcagcgtgagcgccccgcagcccgctcaggaccagctatgagcagacgtgtggttcggcaaagcaagttccgccatgtgtttgggcaggcagcaaaggccgaccaggcctacgaggacatccgtgtgtccaaggtcacatgggacagctccttctgtgccgtcaaccccaaattcctggccattattgtggaggctggaggcgggggtgccttcatcgtcctgcctctggccaagacagggcgagtggataagaactacccactggtcactgggcacactgcccctgtgctggatattgactggtgtccacacaatgacaacgttatcgccagtgcctcagacgacaccaccatcatggtgtggcagattccagactatacccccatgcgcaacattacggaacctatcatcacacttgagggccactccaagcgtgtgggcatcctctcctggcaccctactgccaggaatgtcctgctcagtgcaggtggtgacaatgtgatcatcatctggaatgtgggcaccggggaggtgctgctgagcctggatgatatgcacccagacgtcatccacagtgtgtgctggaacagcaacggtagcctgctagccaccacctgcaaggacaagaccttgcgcatcattgaccccagaaaaggccaagtggtggcggagaggtttgcggcccacgaggggatgaggcccatgcgggccgtcttcacgcgccagggccatatcttcaccacgggcttcacccgcatgagccagcgagagctgggcctgtgggacccgaacaacttcgaggagccagtggcactgcaggagatggacacaagcaacggggtcctattgcccttttacgatcccgactccagcatcgtctacctgtgtggcaagggcgacagcagcattcggtactttgagattaccgacgagccgcctttcgtgcactacctgaacacgttcagcagcaaagagccgcagcggggcatgggtttcatgcccaaaaggggactggatgtcagcaagtgtgagatcgcccggttctacaagctacacgaaagaaagtgtgaacctatcatcatgactgtgccccgcaagtcagacctcttccaggacgatctgtacccggatacgccaggcccggagccggccctagaagcggacgaatggctatccggccaggacgccgaacccgtgctcatttcgctgagggacggctatgtgccccccaagcaccgcgagctccgggtcacgaagcgcaacatcctggacgtgcgcccgccctccggcccccgccgcagccagtcggccagcgacgcccccttgtcgcagcacaccctggagacgctgctggaagagatcaaggccctccgcgagcgggtgcaggcccaggagcagcgcatcacggctctggagaacatgctgtgcgagctggtggacggcacggactagccccgcgcgccaggcaggcggagcggggcggggcgcacaagctcggccccgccccggcttttagtcccgaactccggaccccgccttcttgggctgggcccgggggcgggactggggagggaactccgcccctcgcgggagaccagaactcttggagcttaggggagacccacgtcgctccagcggaggctggactgcgagcctcgtctgggactcggctggagctggcctagggaggcctggggtaacctggggggctcagcaatggtgctgcacggcgaggtggtgtccccctttgtcctccgcccagggcagggaaagtgcttagtattagcgtgatgcttggggttattggagcctgagcttgacctcaaacgggtggcgatttgatgggtacccccaggctggggaaaatgacagcgcttctcctaatcagctcactggattccatcaccctgagcggtaaaccagatgggcgtcaccccagttctgcagacacatacacaacccgtttgctgcagagccggacccagtggctacacccacagcggtctgtggtagagaactctcttccttctttccaccgacaggggcgagggctgcttcctcgcggcagcccccgcgaagaaatctcgagagaactggcatgaggagttaggttcatcacaaatacacacacactgcccccaaccctctgccgttgcctctctcagaaaaacaagacgtactgaatgaaatattttactaagcgttcagtctgtgcctcctgcatgggtgggagtgaggggaacgagacccccagcctctgcaaatgctacccccaggctcctgggagacctggcgatgcactcctgggctcagggtccatcaggcagcctcttaccctagagctctctccactctgaggttcagaaggaccccaacccacaccgtaggcgttccccccaagtaaagttaggtagcaaaagccaaaaaaa

SEQ ID NO: 295190 - DNA, 1567 bp, Homo sapiens
cagctggggctgcagcggcgccgggctctagagagccgcaggatcggccagagtgcggagctggacacccgggtcccagatactacagacacccggagaggtggctccttcgccctgaagccttcctcggccccctacgcactcgggccccttccgcagaggattcgcagcgtgagcgccccgcagcccgctcaggaccagctatgagcagacgtgtggttcggcaaagcaagttccgccatgtgtttgggcaggcagcaaaggccgaccaggcctacgaggacatccgtgtgtccaaggtcacatgggacagctccttctgtgccgtcaaccccaaattcctggccattattgtggaggctggaggcgggggtgccttcatcgtcctgcctctggccaagacagggcgagtggataagaactacccactggtcactgggcacactgcccctgtgctggatattgactggtgtccacacaatgacaacgttatcgccagtgcctcagacgacaccaccatcatggtgtggcagattccagactatacccccatgcgcaacattacggaacctatcatcacacttgagggccactccaagcgtgtgggcatcctctcctggcaccctactgccaggaatgtcctgctcagtgcaggtggtgacaatgtgatcatcatctggaatgtgggcaccggggaggtgctgctgagcctggatgatatgcacccagacgtcatccacagtgtgtgctggaacagcaacggtagcctgctagccaccacctgcaaggacaagaccttgcgcatcattgaccccagaaaaggccaagtggtggcggagaggtttgcggcccacgaggggatgaggcccatgcgggccgtcttcacgcgccagggccatatcttcaccacgggcttcacccgcatgagccagcgagagctgggcctgtgggacccgaacaacttcgaggagccagtggcactgcaggagatggacacaagcaacggggtcctattgcccttttacgatcccgactccagcatcgtctacctgtgtggcaagggcgacagcagcattcggtactttgagattaccgacgagccgcctttcgtgcactacctgaacacgttcagcagcaaagagccgcgtagtcagatcgatctgactacgcggctcgatctgactacgcggctcgatctgactacgcggctcgatctgactacgcggctcgatctgactacgcggctcgatctgactacgcggctcgatctgactacgcggctcgatctgactacgcggctcgatctgactacgcggctcgatctgactactcggctcgatctgactacgcggctcgatctgactacgcggctcgatctgactacgcggctggccgacatgctggcgcacgtggaggagctggcccgtgacggggaggcgccgctggacaaggcctgcgctgaggacgacgacgaggaagacgaggaggaggaggaggaggagcccgacccgacccggagatggagcacgtctaggcagaggcctacgagagcgcgtgctgcctgctg

SEQ ID NO: 295191 - DNA, 990 bp, Homo sapiens
cagctggggctgcagcggcgccgggctctagagagccgcaggatcggccagagtgcggagctggacacccgggtcccagatactacagacacccggagaggtggctccttcgccctgaagccttcctcggccccctacgcactcgggccccttccgcagaggattcgcagcgtgagcgccccgcagcccgctcaggaccagctatgagcagacgtgtggttcggcaaagcaagttccgccatgtgtttgggcaggcagcaaaggccgaccaggcctacgaggacatccgtgtgtccaaggtcacatgggacagctccttctgtgccgtcaaccccaaattcctggccattattgtggaggctggaggcgggggtgccttcatcgtcctgcctctggccaagacagggcgagtggataagaactacccactggtcactgggcacactgcccctgtgctggatattgactggtgtccacacaatgacaacgttatcgccagtgcctcagacgacaccaccatcatggtgtggcagattccagactatacccccatgcgcaacattacggaacctatcatcacacttgagggccactccaagcgtgtgggcatcctctcctggcaccctactgccaggaatgtcctgctcagtgcaggtggtgacaatgtgatcatcatctggaatgtgggcaccggggaggtgctgctgagcctggatgatatgcacccagacgtcatccacagtgtgtgctggaacagcaacggtagcctgctagccaccacctgcaaggacaagaccttgcgcatcattgaccccagaaaaggccaagtggtggcggtctctgccctaagtaagcccccagcctgcaattctctgcccggctcctgttccctcccctcccttgcatctcagaagctcagagaagggctcctcgctttgggattgaggaggggagaagctggaaactccatcctcccaccagaacctgcat

SEQ ID NO: 295192 - DNA, 2067 bp, Homo sapiens
ctcggggactggcatcacgggagagtggccaggcgccccccacccgcagggcatgcccacctggacaggactgaaggctgctgccacctctgcagcgcctgccattctcacacccacccctctgcccagttttgctgcgtcgcgtgaaggatcctgcgctggcgcccccacctggtgatgccgagtccctgggggtggtttgctgtgactgcatgcggcgcgcagcgggtatatgtgcaggggaggaggagctatgtgcgcaggggaggaggagagatgtgcccaggggaggggcctgcaactctggtcactagaggtttggggcatagggtttgggaaggccaggaagcgtaaaggggcttctgggggtcccgaagtagcacgggagggtggggcagggctggtcacgcctcctgtgctcgggcagaacaacttcgaggagccagtggcactgcaggagatggacacaagcaacggggtcctattgcccttttacgatcccgactccagcatcgtctacctgtgtggcaagggcgacagcagcattcggtactttgagattaccgacgagccgcctttcgtgcactacctgaacacgttcagcagcaaagagccgcagcggggcatgggtttcatgcccaaaaggggactggatgtcagcaagtgtgagatcgcccggttctacaagctacacgaaagaaagtgtgaacctatcatcatgactgtgccccgcaagtcagacctcttccaggacgatctgtacccggatacgccaggcccggagccggccctagaagcggacgaatggctatccggccaggacgccgaacccgtgctcatttcgctgagggacggctatgtgccccccaagcaccgcgagctccgggtcacgaagcgcaacatcctggacgtgcgcccgccctccggcccccgccgcagccagtcggccagcgacgcccccttgtcgcagcacaccctggagacgctgctggaagagatcaaggccctccgcgagcgggtgcaggcccaggagcagcgcatcacggctctggagaacatgctgtgcgagctggtggacggcacggactagccccgcgcgccaggcaggcggagcggggcggggcgcacaagctcggccccgccccggcttttagtcccgaactccggaccccgccttcttgggctgggcccgggggcgggactggggagggaactccgcccctcgcgggagaccagaactcttggagcttaggggagacccacgtcgctccagcggaggctggactgcgagcctcgtctgggactcggctggagctggcctagggaggcctggggtaacctggggggctcagcaatggtgctgcacggcgaggtggtgtccccctttgtcctccgcccagggcagggaaagtgcttagtattagcgtgatgcttggggttattggagcctgagcttgacctcaaacgggtggcgatttgatgggtacccccaggctggggaaaatgacagcgcttctcctaatcagctcactggattccatcaccctgagcggtaaaccagatgggcgtcaccccagttctgcagacacatacacaacccgtttgctgcagagccggacccagtggctacacccacagcggtctgtggtagagaactctcttccttctttccaccgacaggggcgagggctgcttcctcgcggcagcccccgcgaagaaatctcgagagaactggcatgaggagttaggttcatcacaaatacacacacactgcccccaaccctctgccgttgcctctctcagaaaaacaagacgtactgaatgaaatattttactaagcgttcagtctgtgcctcctgcatgggtgggagtgaggggaacgagacccccagcctctgcaaatgctacccccaggctcctgggagacctggcgatgcactcctgggctcagggtccatcaggcagcctcttaccctagagctctctccactctgaggttcagaaggaccccaacccacaccgtaggcgttccccccaagtaaagttaggtagcaaaagccaaaaaaa

SEQ ID NO: 295193 - DNA, 2569 bp, Homo sapiens
actaaggaccaaaggcatttctgggcactgagatcctacctctctgcctgcagctatgagcagacgtgtggttcggcaaagcaagttccgccatgtgtttgggcaggcagcaaaggccgaccaggcctacgaggacatccgtgtgtccaaggtcacatgggacagctccttctgtgccgtcaaccccaaattcctggccattattgtggaggctggaggcgggggtgccttcatcgtcctgcctctggccaagacagggcgagtggataagaactacccactggtcactgggcacactgcccctgtgctggatattgactggtgtccacacaatgacaacgttatcgccagtgcctcagacgacaccaccatcatggtgtggcagattccagactatacccccatgcgcaacattacggaacctatcatcacacttgagggccactccaagcgtgtgggcatcctctcctggcaccctactgccaggaatgtcctgctcagtgcaggtggtgacaatgtgatcatcatctggaatgtgggcaccggggaggtgctgctgagcctggatgatatgcacccagacgtcatccacagtgtgtgctggaacagcaacggtagcctgctagccaccacctgcaaggacaagaccttgcgcatcattgaccccagaaaaggccaagtggtggcggagaggtttgcggcccacgaggggatgaggcccatgcgggccgtcttcacgcgccagggccatatcttcaccacgggcttcacccgcatgagccagcgagagctgggcctgtgggacccggtaacgcagctggaggcttgggttttgctgcgtcgcgtgaaggatcctgcgctggcgcccccacctggtgatgccgagtccctgggggtggtttgctgtgactgcatgcggcgcgcagcggaacaacttcgaggagccagtggcactgcaggagatggacacaagcaacggggtcctattgcccttttacgatcccgactccagcatcgtctacctgtgtggcaagggcgacagcagcattcggtactttgagattaccgacgagccgcctttcgtgcactacctgaacacgttcagcagcaaagagccgcagcggggcatgggtttcatgcccaaaaggggactggatgtcagcaagtgtgagatcgcccggttctacaagctacacgaaagaaagtgtgaacctatcatcatgactgtgccccgcaagtcagacctcttccaggacgatctgtacccggatacgccaggcccggagccggccctagaagcggacgaatggctatccggccaggacgccgaacccgtgctcatttcgctgagggacggctatgtgccccccaagcaccgcgagctccgggtcacgaagcgcaacatcctggacgtgcgcccgccctccggcccccgccgcagccagtcggccagcgacgcccccttgtcgcagcacaccctggagacgctgctggaagagatcaaggccctccgcgagcgggtgcaggcccaggagcagcgcatcacggctctggagaacatgctgtgcgagctggtggacggcacggactagccccgcgcgccaggcaggcggagcggggcggggcgcacaagctcggccccgccccggcttttagtcccgaactccggaccccgccttcttgggctgggcccgggggcgggactggggagggaactccgcccctcgcgggagaccagaactcttggagcttaggggagacccacgtcgctccagcggaggctggactgcgagcctcgtctgggactcggctggagctggcctagggaggcctggggtaacctggggggctcagcaatggtgctgcacggcgaggtggtgtccccctttgtcctccgcccagggcagggaaagtgcttagtattagcgtgatgcttggggttattggagcctgagcttgacctcaaacgggtggcgatttgatgggtacccccaggctggggaaaatgacagcgcttctcctaatcagctcactggattccatcaccctgagcggtaaaccagatgggcgtcaccccagttctgcagacacatacacaacccgtttgctgcagagccggacccagtggctacacccacagcggtctgtggtagagaactctcttccttctttccaccgacaggggcgagggctgcttcctcgcggcagcccccgcgaagaaatctcgagagaactggcatgaggagttaggttcatcacaaatacacacacactgcccccaaccctctgccgttgcctctctcagaaaaacaagacgtactgaatgaaatattttactaagcgttcagtctgtgcctcctgcatgggtgggagtgaggggaacgagacccccagcctctgcaaatgctacccccaggctcctgggagacctggcgatgcactcctgggctcagggtccatcaggcagcctcttaccctagagctctctccactctgaggttcagaaggaccccaacccacaccgtaggcgttccccccaagtaaagttaggtagcaaaagccaaaaaaa

SEQ ID NO: 295194 - DNA, 2110 bp, Homo sapiens
gatcggctgagagccgcgtgcctcctgctctctccaggcccggatgctctccaggtcaggggccagacgtggccccgcaggaagctgagtgcttaggccccatttgtctcttccccgcatccgctcctccaccccggacacccaagtcagcaagctggttgctcatccctccatgctcctcagggcaggcagctgggtgatgtccctccctgtctccccctccccccaggagaggtttgcggcccacgaggggatgaggcccatgcgggccgtcttcacgcgccagggccatatcttcaccacgggcttcacccgcatgagccagcgagagctgggcctgtgggacccggtaacgcagctggaggcttgggttttgctgcgtcgcgtgaaggatcctgcgctggcgcccccacctggtgatgccgagtccctgggggtggtttgctgtgactgcatgcggcgcgcagcggaacaacttcgaggagccagtggcactgcaggagatggacacaagcaacggggtcctattgcccttttacgatcccgactccagcatcgtctacctgtgtggcaagggcgacagcagcattcggtactttgagattaccgacgagccgcctttcgtgcactacctgaacacgttcagcagcaaagagccgcagcggggcatgggtttcatgcccaaaaggggactggatgtcagcaagtgtgagatcgcccggttctacaagctacacgaaagaaagtgtgaacctatcatcatgactgtgccccgcaagtcagacctcttccaggacgatctgtacccggatacgccaggcccggagccggccctagaagcggacgaatggctatccggccaggacgccgaacccgtgctcatttcgctgagggacggctatgtgccccccaagcaccgcgagctccgggtcacgaagcgcaacatcctggacgtgcgcccgccctccggcccccgccgcagccagtcggccagcgacgcccccttgtcgcagcacaccctggagacgctgctggaagagatcaaggccctccgcgagcgggtgcaggcccaggagcagcgcatcacggctctggagaacatgctgtgcgagctggtggacggcacggactagccccgcgcgccaggcaggcggagcggggcggggcgcacaagctcggccccgccccggcttttagtcccgaactccggaccccgccttcttgggctgggcccgggggcgggactggggagggaactccgcccctcgcgggagaccagaactcttggagcttaggggagacccacgtcgctccagcggaggctggactgcgagcctcgtctgggactcggctggagctggcctagggaggcctggggtaacctggggggctcagcaatggtgctgcacggcgaggtggtgtccccctttgtcctccgcccagggcagggaaagtgcttagtattagcgtgatgcttggggttattggagcctgagcttgacctcaaacgggtggcgatttgatgggtacccccaggctggggaaaatgacagcgcttctcctaatcagctcactggattccatcaccctgagcggtaaaccagatgggcgtcaccccagttctgcagacacatacacaacccgtttgctgcagagccggacccagtggctacacccacagcggtctgtggtagagaactctcttccttctttccaccgacaggggcgagggctgcttcctcgcggcagcccccgcgaagaaatctcgagagaactggcatgaggagttaggttcatcacaaatacacacacactgcccccaaccctctgccgttgcctctctcagaaaaacaagacgtactgaatgaaatattttactaagcgttcagtctgtgcctcctgcatgggtgggagtgaggggaacgagacccccagcctctgcaaatgctacccccaggctcctgggagacctggcgatgcactcctgggctcagggtccatcaggcagcctcttaccctagagctctctccactctgaggttcagaaggaccccaacccacaccgtaggcgttccccccaagtaaagttaggtagcaaaagccaaaaaaa

SEQ ID NO: 295195 - DNA, 714 bp, Homo sapiens
gggaggcgtcctccctggaccccggcgacttcctctctcggggaggagccccagccccgcgacgaggaggaagcggagctggagctgctgaggcagtttgacctggcctggcagtacgggccctgcaccgggatcacacggctgcagcgctggtgtcgggccaagcagatgggcttggagcctcccccagaggtgtggcaggtgctgaagacccaccccggagacccccgcttccagtgcagtctctggcatctctatcccctatgaggcaccacgtaagacctcctgcccttagctctcttgctcaccacccaagaacctcaggacagaagcgagagcccattgctcctgctcagctcagcccggctgcggaggaacccttggcaggcagaacctggaggtgtcagaggctcaactcctccatctaaccagcaggctcccagagtccccggaagagcctgcgcagctgaagcagagtgcttctagatggagagtggtcactggggaaaaggacctggccatcaccttccaatacctgctgcctgtctccctgacccatgatctggcaagttaggcacagtcagacatggacagttgatccatgaggaaaagatgctctcccacctaaggccaggaatctgagagcaggactggctgagctcccagggcaaggggttcactaatgcttatcaataaagaatattgagcctggaa

SEQ ID NO: 295196 - DNA, 172 bp, Homo sapiens
gcggccgcctactactactactactgctcgaattcaagcttctaacgatgtacggggacatgaggaaaagatgctctcccacctaaggccaggaatctgagagcaggactggctgagctcccagggcaaggggttcactaatgcttatcaataaagaatattgagcctggaa

SEQ ID NO: 295197 - DNA, 1258 bp, Homo sapiens
cgtggcctctggttctctgtgcccagtccagggtggcagtttgttggcttcttagggctcctctgtcctggagatcttcatgaaagtagctgactgtgaaaaccttgaattggggagtgtatggataggtgatcctgcagctgaaggagatagctgtgttggccagggaggcatgatgggcaggccggtgtgggtcactgactgtcctcctgccagtcgcagggtcccgggcagcagcagcacgccaaggaggagccagggggctgcggggagcccaggagggctgggaggcctggcagggccgccacctcacaggctggttctccatctgggggcctgcttgtctgcggcgactctttagatcttgtctgcccgccgctggcctggccccgtctgtctctctcagcagctgtctttctcgcgcccactggccggtctctcctcttccccgcagttgcctccttctctgcctgcctgggtggccgccatgggccggaagcggctcatcactgattcctacccggttgtgaagaggagggaggggcccgctgggcacagcaagggggagctggcacccgagctaggggaggagccccagccccgcgacgaggaggaagcggagctggagctgctgaggcagtttgacctggcctggcagtacgggccctgcaccgggatcacacggctgcagcgctggtgtcgggccaagcagatgggcttggagcctcccccagaggtgtggcaggtgctgaagacccaccccggagacccccgcttccagtgcagtctctggcatctctatcccctatgaggcaccacgtaagacctcctgcccttagctctcttgctcaccacccaagaacctcaggacagaagcgagagcccattgctcctgctcagctcagcccggctgcggaggaacccttggcaggcagaacctggaggtgtcagaggctcaactcctccatctaaccagcaggctcccagagtccccggaagagcctgcgcagctgaagcagagtgcttctagatggagagtggtcactggggaaaaggacctggccatcaccttccaatacctgctgcctgtctccctgacccatgatctggcaagttaggcacagtcagacatggacagttgatccatgaggaaaagatgctctcccacctaaggccaggaatctgagagcaggactggctgagctcccagggcaaggggttcactaatgcttatcaataaagaatattgagcctggaa

SEQ ID NO: 295198 - DNA, 888 bp, Homo sapiens
aaataggctaggtacgaggctgggtgtgaattggccgaggctgttttctcgcgcccactggccggtctctcctcttccccgcagttgcctccttctctgcctgcctgggtggccgccatgggccggaagcggctcatcactgattcctacccggttgtgaagaggagggaggggcccgctgggcacagcaagggggagctggcacccgagctaggggaggagccccagccccgcgacgaggaggaagcggagctggagctgctgaggcagtttgacctggcctggcagtacgggccctgcaccgggatcacacggctgcagcgctggtgtcgggccaagcagatgggcttggagcctcccccagaggtgtggcaggtgctgaagacccaccccggagacccccgcttccagtgcagtctctggcatctctatcccctatgaggcaccacgtaagacctcctgcccttagctctcttgctcaccacccaagaacctcaggacagaagcgagagcccattgctcctgctcagctcagcccggctgcggaggaacccttggcaggcagaacctggaggtgtcagaggctcaactcctccatctaaccagcaggctcccagagtccccggaagagcctgcgcagctgaagcagagtgcttctagatggagagtggtcactggggaaaaggacctggccatcaccttccaatacctgctgcctgtctccctgacccatgatctggcaagttaggcacagtcagacatggacagttgatccatgaggaaaagatgctctcccacctaaggccaggaatctgagagcaggactggctgagctcccagggcaaggggttcactaatgcttatcaataaagaatattgagcctggaa

SEQ ID NO: 295199 - DNA, 719 bp, Homo sapiens
cccacgcgtccggacccacgcgtccggagctggcacccgagctaggggaggagccccagccccgcgacgaggaggaagcggagctggagctgctgaggcagtttgacctggcctggcagtacgggccctgcaccgggatcacacggctgcagcgctggtgtcgggccaagcagatgggcttggagcctcccccagaggtgtggcaggtgctgaagacccaccccggagacccccgcttccagtgcagtctctggcatctctatcccctatgaggcaccacgtaagacctcctgcccttagctctcttgctcaccacccaagaacctcaggacagaagcgagagcccattgctcctgctcagctcagcccggctgcggaggaacccttggcaggcagaacctggaggtgtcagaggctcaactcctccatctaaccagcaggctcccagagtccccggaagagcctgcgcagctgaagcagagtgcttctagatggagagtggtcactggggaaaaggacctggccatcaccttccaatacctgctgcctgtctccctgacccatgatctggcaagttaggcacagtcagacatggacagttgatccatgaggaaaagatgctctcccacctaaggccaggaatctgagagcaggactggctgagctcccagggcaaggggttcactaatgcttatcaataaagaatattgagcctggaa

SEQ ID NO: 295200 - DNA, 377 bp, Homo sapiens
cggagacccccgcttccagtgcagtctctggcatctctatcccctatgaggcagaacctggaggtgtcagaggctcaactcctccatctaaccagcaggctcccagagtccccggaagagcctgcgcagctgaagcagagtgcttctagatggagagtggtcactggggaaaaggacctggccatcaccttccaatacctgctgcctgtctccctgacccatgatctggcaagttaggcacagtcagacatggacagttgatccatgaggaaaagatgctctcccacctaaggccaggaatctgagagcaggactggctgagctcccagggcaaggggttcactaatgcttatcaataaagaatattgagcctggaa

SEQ ID NO: 295201 - DNA, 560 bp, Homo sapiens
gggaggcgtcctccctggaccccggcgacttcctctctcgatcttgtctgcccgccgctggcctggccccgtctgtctctctcagcagctgtctttctcctgcccttagctctcttgctcaccacccaagaacctcaggacagaagcgagagcccattgctcctgctcagctcagcccggctgcggaggaacccttggcaggcagaacctggaggtgtcagaggctcaactcctccatctaaccagcaggctcccagagtccccggaagagcctgcgcagctgaagcagagtgcttctagatggagagtggtcactggggaaaaggacctggccatcaccttccaatacctgctgcctgtctccctgacccatgatctggcaagttaggcacagtcagacatggacagttgatccatgaggaaaagatgctctcccacctaaggccaggaatctgagagcaggactggctgagctcccagggcaaggggttcactaatgcttatcaataaagaatattgagcctggaataaaaaaaacaacaagacaacaaaaaaaaaca

SEQ ID NO: 295202 - DNA, 937 bp, Homo sapiens
gccattacggctaggtaccgaggcctgggtgtggttgttgatcttgtctgcccgccgctggcctggccccgtctgtctctctcagcagctgtctttctcgcgcccactggccggtctctcctcttccccgcagttgcctccttctctgcctgcctgggtggccgccatgggccggaagcggctcatcactgattcctacccggttgtgaagaggagggaggggcccgctgggcacagcaagggggagctggcacccgagctaggggaggagccccagccccgcgacgaggaggaagcggagctggagctgctgaggcagtttgacctggcctggcagtacgggccctgcaccgggatcacacggctgcagcgctggtgtcgggccaagcagatgggcttggagcctcccccagaggtgtggcaggtgctgaagacccaccccggagacccccgcttccagtgcagtctctggcatctctatcccctatgaggcaccacgtaagacctcctgcccttagctctcttgctcaccacccaagaacctcaggacagaagcgagagcccattgctcctgctcagctcagcccggctgcggaggaacccttggcaggcagaacctggaggtgtcagaggctcaactcctccatctaaccagcaggctcccagagtccccggaagagcctgcgcagctgaagcagagtgcttctagatggagagtggtcactggggaaaaggacctggccatcaccttccaatacctgctgcctgtctccctgacccatgatctggcaagttaggcacagtcagacatggacagttgatccatgaggaaaagatgctctcccacctaaggccaggaatctgagagcaggactggctgagctcccagggcaaggggttcactaatgcttatcaataaagaatattgagcctggaa

SEQ ID NO: 295203 - DNA, 937 bp, Homo sapiens
gggaggcgtcctccctggaccccggcgacttcctctctcgatcttgtctgcccgccgctggcctggccccgtctgtctctctcagcagctgtctttctcgcgcccactggccggtctctcctcttccccgcagttgcctccttctctgcctgcctgggtggccgccatgggccggaagcggctcatcactgattcctacccggttgtgaagaggagggaggggcccgctgggcacagcaagggggagctggcacccgagctaggggaggagccccagccccgcgacgaggaggaagcggagctggagctgctgaggcagtttgacctggcctggcagtacgggccctgcaccgggatcacacggctgcagcgctggtgtcgggccaagcagatgggcttggagcctcccccagaggtgtggcaggtgctgaagacccaccccggagacccccgcttccagtgcagtctctggcatctctatcccctatgaggcaccacgtaagacctcctgcccttagctctcttgctcaccacccaagaacctcaggacagaagcgagagcccattgctcctgctcagctcagcccggctgcggaggaacccttggcaggcagaacctggaggtgtcagaggctcaactcctccatctaaccagcaggctcccagagtccccggaagagcctgcgcagctgaagcagagtgcttctagatggagagtggtcactggggaaaaggacctggccatcaccttccaatacctgctgcctgtctccctgacccatgatctggcaagttaggcacagtcagacatggacagttgatccatgaggaaaagatgctctcccacctaaggccaggaatctgagagcaggactggctgagctcccagggcaaggggttcactaatgcttatcaataaagaatattgagcctggaa

SEQ ID NO: 295204 - DNA, 1190 bp, Homo sapiens
cgtggcctctggttctctgtgcccagtccagggtggcagtttgttggcttcttagggctcctctgtcctggagatcttcatgaaagtagctgactgtgaaaaccttgaattggggagtgtatggataggtgatcctgcagctgaaggagatagctgtgttggccagggaggcatgatgggcaggccggtgtgggtcactgactgtcctcctgccagtcgcagggtcccgggcagcagcagcacgccaaggaggagccagggggctgcggggagcccaggagggctgggaggcctggcagggccgccacctcacaggctggttctccatctgggggcctgcttgtctgcggcgactctttagatcttgtctgcccgccgctggcctggccccgtctgtctctctcagcagctgtctttctcgcgcccactggccggtctctcctcttccccgcagttgcctccttctctgcctgcctgggtggccgccatgggccggaagcggctcatcactgattcgggaggagccccagccccgcgacgaggaggaagcggagctggagctgctgaggcagtttgacctggcctggcagtacgggccctgcaccgggatcacacggctgcagcgctggtgtcgggccaagcagatgggcttggagcctcccccagaggtgtggcaggtgctgaagacccaccccggagacccccgcttccagtgcagtctctggcatctctatcccctatgaggcaccacgtaagacctcctgcccttagctctcttgctcaccacccaagaacctcaggacagaagcgagagcccattgctcctgctcagctcagcccggctgcggaggaacccttggcaggcagaacctggaggtgtcagaggctcaactcctccatctaaccagcaggctcccagagtccccggaagagcctgcgcagctgaagcagagtgcttctagatggagagtggtcactggggaaaaggacctggccatcaccttccaatacctgctgcctgtctccctgacccatgatctggcaagttaggcacagtcagacatggacagttgatccatgaggaaaagatgctctcccacctaaggccaggaatctgagagcaggactggctgagctcccagggcaaggggttcactaatgcttatcaataaagaatattgagcctggaa

SEQ ID NO: 295205 - DNA, 1482 bp, Homo sapiens
cgtggcctctggttctctgtgcccagtccagggtggcagtttgttggcttcttagggctcctctgtcctggagatcttcatgaaagtagctgactgtgaaaaccttgaattggggagtgtatggataggtgatcctgcagctgaaggagatagctgtgttggccagggaggcatgatgggcaggccggtgtgggtcactgactgtcctcctgccagtcgcagggtcccgggcagcagcagcacgccaaggaggagccagggggctgcggggagcccaggagggctgggaggcctggcagggccgccacctcacaggctggttctccatctgggggcctgcttgtctgcggcgactctttagatcttgtctgcccgccgctggcctggccccgtctgtctctctcagcagctgtctttctcgcgcccactggccggtctctcctcttccccgcagttgcctccttctctgcctgcctgggtggccgccatgggccggaagcggctcatcactgattcctacccggttgtgaagaggagggaggggcccgctgggcacagcaagggggagctggcacccgagctagtctctgaggtgtgagggaggcaggaggagtggacacggaggggcctagaggaggcccctagaggggcggaggggccgatggaaagggaaaggtggcctgtcctcccctcccgacaccaggtctagctgcggggtggcagaggcaaagcggtggtgaggaaggctgggaggtgaggggcaggagactgaagccaacctcgtactgaagagcagctgtcattgcaggggaggagccccagccccgcgacgaggaggaagcggagctggagctgctgaggcagtttgacctggcctggcagtacgggccctgcaccgggatcacacggctgcagcgctggtgtcgggccaagcagatgggcttggagcctcccccagaggtgtggcaggtgctgaagacccaccccggagacccccgcttccagtgcagtctctggcatctctatcccctatgaggcaccacgtaagacctcctgcccttagctctcttgctcaccacccaagaacctcaggacagaagcgagagcccattgctcctgctcagctcagcccggctgcggaggaacccttggcaggcagaacctggaggtgtcagaggctcaactcctccatctaaccagcaggctcccagagtccccggaagagcctgcgcagctgaagcagagtgcttctagatggagagtggtcactggggaaaaggacctggccatcaccttccaatacctgctgcctgtctccctgacccatgatctggcaagttaggcacagtcagacatggacagttgatccatgaggaaaagatgctctcccacctaaggccaggaatctgagagcaggactggctgagctcccagggcaaggggttcactaatgcttatcaataaagaatattgagcctggaa

SEQ ID NO: 295206 - DNA, 1377 bp, Homo sapiens
cgtggcctctggttctctgtgcccagtccagggtggcagtttgttggcttcttagggctcctctgtcctggagatcttcatgaaagtagctgactgtgaaaaccttgaattggggagtgtatggataggtgatcctgcagctgaaggagatagctgtgttggccagggaggcatgatgggcaggccggtgtgggtcactgactgtcctcctgccagtcgcagggtcccgggcagcagcagcacgccaaggaggagccagggggctgcggggagcccaggagggctgggaggcctggcagggccgccacctcacaggctggttctccatctgggggcctgcttgtctgcggcgactctttagatcttgtctgcccgccgctggcctggccccgtctgtctctctcagcagctgtctttctcgcgcccactggccggtctctcctcttccccgcagttgcctccttctctgcctgcctgggtggccgccatgggccggaagcggctcatcactgattcctacccggttgtgaagaggagggaggggcccgctgggcacagcaagggggagctggcacccgagctagtctctgaggtgtgagggaggcaggaggagtggacacggaggggcctagaggaggcccctagaggggcggaggggccgatggaaagggaaaggtggcctgtcctcccctcccgacaccaggggaggagccccagccccgcgacgaggaggaagcggagctggagctgctgaggcagtttgacctggcctggcagtacgggccctgcaccgggatcacacggctgcagcgctggtgtcgggccaagcagatgggcttggagcctcccccagaggtgtggcaggtgctgaagacccaccccggagacccccgcttccagtgcagtctctggcatctctatcccctatgaggcaccacgtaagacctcctgcccttagctctcttgctcaccacccaagaacctcaggacagaagcgagagcccattgctcctgctcagctcagcccggctgcggaggaacccttggcaggcagaacctggaggtgtcagaggctcaactcctccatctaaccagcaggctcccagagtccccggaagagcctgcgcagctgaagcagagtgcttctagatggagagtggtcactggggaaaaggacctggccatcaccttccaatacctgctgcctgtctccctgacccatgatctggcaagttaggcacagtcagacatggacagttgatccatgaggaaaagatgctctcccacctaaggccaggaatctgagagcaggactggctgagctcccagggcaaggggttcactaatgcttatcaataaagaatattgagcctggaa

SEQ ID NO: 295207 - DNA, 737 bp, Homo sapiens
agcctccgggagaggagccgcacccggccggcccggccccagccccatggacctccgagctaggggaggagccccagccccgcgacgaggaggaagcggagctggagctgctgaggcagtttgacctggcctggcagtacgggccctgcaccgggatcacacggctgcagcgctggtgtcgggccaagcagatgggcttggagcctcccccagaggtgtggcaggtgctgaagacccaccccggagacccccgcttccagtgcagtctctggcatctctatcccctatgaggcaccacgtaagacctcctgcccttagctctcttgctcaccacccaagaacctcaggacagaagcgagagcccattgctcctgctcagctcagcccggctgcggaggaacccttggcaggcagaacctggaggtgtcagaggctcaactcctccatctaaccagcaggctcccagagtccccggaagagcctgcgcagctgaagcagagtgcttctagatggagagtggtcactggggaaaaggacctggccatcaccttccaatacctgctgcctgtctccctgacccatgatctggcaagttaggcacagtcagacatggacagttgatccatgaggaaaagatgctctcccacctaaggccaggaatctgagagcaggactggctgagctcccagggcaaggggttcactaatgcttatcaataaagaatattgagcctggaa

SEQ ID NO: 295208 - DNA, 1667 bp, Homo sapiens
cgtggcctctggttctctgtgcccagtccagggtggcagtttgttggcttcttagggctcctctgtcctggagatcttcatgaaagtagctgactgtgaaaaccttgaattggggagtgtatggataggtgatcctgcagctgaaggagatagctgtgttggccagggaggcatgatgggcaggccggtgtgggtcactgactgtcctcctgccagtcgcagggtcccgggcagcagcagcacgccaaggaggagccagggggctgcggggagcccaggagggctgggaggcctggcagggccgccacctcacaggctggttctccatctgggggcctgcttgtctgcggcgactctttagatcttgtctgcccgccgctggcctggccccgtctgtctctctcagcagctgtctttctcgcgcccactggccggtctctcctcttccccgcagttgcctccttctctgcctgcctgggtggccgccatgggccggaagcggctcatcactgattcctacccggttgtgaagaggagggaggggcccgctgggcacagcaagggggagctggcacccgagctagtctctgaggtgtgagggaggcaggaggagtggacacggaggggcctagaggaggcccctagaggggcggaggggccgatggaaagggaaaggtggcctgtcctcccctcccgacaccaggtctagctgcggggtggcagaggcaaagcggtggtgaggaaggctgggaggtgaggggcaggagactgaagccaacctcgtactgaagagcagctgtcattgcaggggaggagccccagccccgcgacgaggaggaagcggagctggagctgctgaggcagtttgacctggcctggcagtacgggccctgcaccggtgagaacccacccagccccacggaggcgcctctcccagccagtcacccacacgtctctgaagtcacccaagcgcttgcgtgactctgaccctcaggaactgtctccccccaacacacacattctccagctcagactctaccccaccccccacaagtctccagagtcttcttcccaccctggcagggatcacacggctgcagcgctggtgtcgggccaagcagatgggcttggagcctcccccagaggtgtggcaggtgctgaagacccaccccggagacccccgcttccagtgcagtctctggcatctctatcccctatgaggcaccacgtaagacctcctgcccttagctctcttgctcaccacccaagaacctcaggacagaagcgagagcccattgctcctgctcagctcagcccggctgcggaggaacccttggcaggcagaacctggaggtgtcagaggctcaactcctccatctaaccagcaggctcccagagtccccggaagagcctgcgcagctgaagcagagtgcttctagatggagagtggtcactggggaaaaggacctggccatcaccttccaatacctgctgcctgtctccctgacccatgatctggcaagttaggcacagtcagacatggacagttgatccatgaggaaaagatgctctcccacctaaggccaggaatctgagagcaggactggctgagctcccagggcaaggggttcactaatgcttatcaataaagaatattgagcctggaa

SEQ ID NO: 295209 - DNA, 1443 bp, Homo sapiens
cgtggcctctggttctctgtgcccagtccagggtggcagtttgttggcttcttagggctcctctgtcctggagatcttcatgaaagtagctgactgtgaaaaccttgaattggggagtgtatggataggtgatcctgcagctgaaggagatagctgtgttggccagggaggcatgatgggcaggccggtgtgggtcactgactgtcctcctgccagtcgcagggtcccgggcagcagcagcacgccaaggaggagccagggggctgcggggagcccaggagggctgggaggcctggcagggccgccacctcacaggctggttctccatctgggggcctgcttgtctgcggcgactctttagatcttgtctgcccgccgctggcctggccccgtctgtctctctcagcagctgtctttctcgcgcccactggccggtctctcctcttccccgcagttgcctccttctctgcctgcctgggtggccgccatgggccggaagcggctcatcactgattcctacccggttgtgaagaggagggaggggcccgctgggcacagcaagggggagctggcacccgagctaggggaggagccccagccccgcgacgaggaggaagcggagctggagctgctgaggcagtttgacctggcctggcagtacgggccctgcaccggtgagaacccacccagccccacggaggcgcctctcccagccagtcacccacacgtctctgaagtcacccaagcgcttgcgtgactctgaccctcaggaactgtctccccccaacacacacattctccagctcagactctaccccaccccccacaagtctccagagtcttcttcccaccctggcagggatcacacggctgcagcgctggtgtcgggccaagcagatgggcttggagcctcccccagaggtgtggcaggtgctgaagacccaccccggagacccccgcttccagtgcagtctctggcatctctatcccctatgaggcaccacgtaagacctcctgcccttagctctcttgctcaccacccaagaacctcaggacagaagcgagagcccattgctcctgctcagctcagcccggctgcggaggaacccttggcaggcagaacctggaggtgtcagaggctcaactcctccatctaaccagcaggctcccagagtccccggaagagcctgcgcagctgaagcagagtgcttctagatggagagtggtcactggggaaaaggacctggccatcaccttccaatacctgctgcctgtctccctgacccatgatctggcaagttaggcacagtcagacatggacagttgatccatgaggaaaagatgctctcccacctaaggccaggaatctgagagcaggactggctgagctcccagggcaaggggttcactaatgcttatcaataaagaatattgagcctggaa

SEQ ID NO: 295210 - DNA, 1100 bp, Homo sapiens
cgtggcctctggttctctgtgcccagtccagggtggcagtttgttggcttcttagggctcctctgtcctggagatcttcatgaaagtagctgactgtgaaaaccttgaattggggagtgtatggataggtgatcctgcagctgaaggagatagctgtgttggccagggaggcatgatgggcaggccggtgtgggtcactgactgtcctcctgccagtcgcagggtcccgggcagcagcagcacgccaaggaggagccagggggctgcggggagcccaggagggctgggaggcctggcagggccgccacctcacaggctggttctccatctgggggcctgcttgtctgcggcgactctttagatcttgtctgcccgccgctggcctggccccgtctgtctctctcagcagctgtctttctcgcgcccactggccggtctctcctcttccccgcagttgcctccttctctgcctgcctgggtggccgccatgggccggaagcggctcatcactgattcggatcacacggctgcagcgctggtgtcgggccaagcagatgggcttggagcctcccccagaggtgtggcaggtgctgaagacccaccccggagacccccgcttccagtgcagtctctggcatctctatcccctatgaggcaccacgtaagacctcctgcccttagctctcttgctcaccacccaagaacctcaggacagaagcgagagcccattgctcctgctcagctcagcccggctgcggaggaacccttggcaggcagaacctggaggtgtcagaggctcaactcctccatctaaccagcaggctcccagagtccccggaagagcctgcgcagctgaagcagagtgcttctagatggagagtggtcactggggaaaaggacctggccatcaccttccaatacctgctgcctgtctccctgacccatgatctggcaagttaggcacagtcagacatggacagttgatccatgaggaaaagatgctctcccacctaaggccaggaatctgagagcaggactggctgagctcccagggcaaggggttcactaatgcttatcaataaagaatattgagcctggaa

SEQ ID NO: 295211 - DNA, 1932 bp, Homo sapiens
cgtggcctctggttctctgtgcccagtccagggtggcagtttgttggcttcttagggctcctctgtcctggagatcttcatgaaagtagctgactgtgaaaaccttgaattggggagtgtatggataggtgatcctgcagctgaaggagatagctgtgttggccagggaggcatgatgggcaggccggtgtgggtcactgactgtcctcctgccagtcgcagggtcccgggcagcagcagcacgccaaggaggagccagggggctgcggggagcccaggagggctgggaggcctggcagggccgccacctcacaggctggttctccatctgggggcctgcttgtctgcggcgactctttagatcttgtctgcccgccgctggcctggccccgtctgtctctctcagcagctgtctttctcgcgcccactggccggtctctcctcttccccgcagttgcctccttctctgcctgcctgggtggccgccatgggccggaagcggctcatcactgattcctacccggttgtgaagaggagggaggggcccgctgggcacagcaagggggagctggcacccgagctaggggaggagccccagccccgcgacgaggaggaagcggagctggagctgctgaggcagtttgacctggcctggcagtacgggccctgcaccgggatcacacggctgcagcgctggtgtcgggccaagcagatgggcttggagcctcccccagaggtgtggcaggtgctgaagacccaccccggagacccccgcttccagtgcagaggtcagagacaggccgggagggctttcaggggagccagggccttctccaggcactgtcaccctgctgtcctgacctgagggagaaatggatggagggttggaaggccttgctgaacaggcaagaagattctatgaggtgcctggctcaggaggacacgccactataataattctttttttttgagacagagtcttgctctgttgcccaggctggagtgcagtggcgcgatctcggctcactgcaaactccgcctctcgggttcacgccattctcctgtctcagcctcccaagtagctgggactacaggcgcccgccaacacgcccggctaattttttctatttttagtagagacagggtttcaccgtgttagccaggatggtcttgatctcctgacctcgtgatcccacccacctcagcctcccaaagtgctgggattacaggcgtgagccaccacacccggccaataattcttacctctacaagctagtggggggcaaaggtacacccaggacccaaggaactatctatttagaactgaggggtttcccaaggactatgggcatggccaagaataagctggtgaaatcagatccagggactcaacaactgattctctgtttctctctctctctctctggggtatccctccctcccaccccatcttccacagttctctggcatctctatcccctatgaggcaccacgtaagacctcctgcccttagctctcttgctcaccacccaagaacctcaggacagaagcgagagcccattgctcctgctcagctcagcccggctgcggaggaacccttggcaggcagaacctggaggtgtcagaggctcaactcctccatctaaccagcaggctcccagagtccccggaagagcctgcgcagctgaagcagagtgcttctagatggagagtggtcactggggaaaaggacctggccatcaccttccaatacctgctgcctgtctccctgacccatgatctggcaagttaggcacagtcagacatggacagttgatccatgaggaaaagatgctctcccacctaaggccaggaatctgagagcaggactggctgagctcccagggcaaggggttcactaatgcttatcaataaagaatattgagcctggaa

SEQ ID NO: 295212 - DNA, 1835 bp, Homo sapiens
gggaggcgtcctccctggaccccggcgacttcctctctcgatcttgtctgcccgccgctggcctggccccgtctgtctctctcagcagctgtctttctcgcgcccactggccggtctctcctcttccccgcagttgcctccttctctgcctgcctgggtggccgccatgggccggaagcggctcatcactgattcctacccggttgtgaagaggagggaggggcccgctgggcacagcaagggggagctggcacccgagctagtctctgaggtgtgagggaggcaggaggagtggacacggaggggcctagaggaggcccctagaggggcggaggggccgatggaaagggaaaggtggcctgtcctcccctcccgacaccaggtctagctgcggggtggcagaggcaaagcggtggtgaggaaggctgggaggtgaggggcaggagactgaagccaacctcgtactgaagagcagctgtcattgcaggggaggagccccagccccgcgacgaggaggaagcggagctggagctgctgaggcagtttgacctggcctggcagtacgggccctgcaccgggatcacacggctgcagcgctggtgtcgggccaagcagatgggcttggagcctcccccagaggtgtggcaggtgctgaagacccaccccggagacccccgcttccagtgcagaggtcagagacaggccgggagggctttcaggggagccagggccttctccaggcactgtcaccctgctgtcctgacctgagggagaaatggatggagggttggaaggccttgctgaacaggcaagaagattctatgaggtgcctggctcaggaggacacgccactataataattctttttttttgagacagagtcttgctctgttgcccaggctggagtgcagtggcgcgatctcggctcactgcaaactccgcctctcgggttcacgccattctcctgtctcagcctcccaagtagctgggactacaggcgcccgccaacacgcccggctaattttttctatttttagtagagacagggtttcaccgtgttagccaggatggtcttgatctcctgacctcgtgatcccacccacctcagcctcccaaagtgctgggattacaggcgtgagccaccacacccggccaataattcttacctctacaagctagtggggggcaaaggtacacccaggacccaaggaactatctatttagaactgaggggtttcccaaggactatgggcatggccaagaataagctggtgaaatcagatccagggactcaacaactgattctctgtttctctctctctctctctggggtatccctccctcccaccccatcttccacagttctctggcatctctatcccctatgaggcaccacgtaagacctcctgcccttagctctcttgctcaccacccaagaacctcaggacagaagcgagagcccattgctcctgctcagctcagcccggctgcggaggaacccttggcaggcagaacctggaggtgtcagaggctcaactcctccatctaaccagcaggctcccagagtccccggaagagcctgcgcagctgaagcagagtgcttctagatggagagtggtcactggggaaaaggacctggccatcaccttccaatacctgctgcctgtctccctgacccatgatctggcaagttaggcacagtcagacatggacagttgatccatgaggaaaagatgctctcccacctaaggccaggaatctgagagcaggactggctgagctcccagggcaaggggttcactaatgcttatcaataaagaatattgagcctggaa

SEQ ID NO: 295213 - DNA, 1444 bp, Homo sapiens
gggaggcgtcctccctggaccccggcgacttcctctctcgatcttgtctgcccgccgctggcctggccccgtctgtctctctcagcagctgtctttctcgcgcccactggccggtctctcctcttccccgcagttgcctccttctctgcctgcctgggtggccgccatgggccggaagcggctcatcactgattcctacccggttgtgaagaggagggaggggcccgctgggcacagcaagggggagctggcacccgagctagtctctgaggtgtgagggaggcaggaggagtggacacggaggggcctagaggaggcccctagaggggcggaggggccgatggaaagggaaaggtggcctgtcctcccctcccgacaccaggtctagctgcggggtggcagaggcaaagcggtggtgaggaaggctgggaggtgaggggcaggagactgaagccaacctcgtactgaagagcagctgtcattgcaggggaggagccccagccccgcgacgaggaggaagcggagctggagctgctgaggcagtttgacctggcctggcagtacgggccctgcaccgggatcacacggctgcagcgctggtgtcgggccaagcagatgggcttggagcctcccccagaggtgtggcaggtgctgaagacccaccccggagacccccgcttccagtgcagaggtcagagacaggccgggagggctttcaggggagccagggccttctccaggcactgtcaccctgctgtcctgacctgagggagaaatggatggagggttggaaggccttgctgaacaggcaagaagattctatgaggtgcctggctcaggaggacacgccactataataattcttacctctacaagctagtggggggcaaaggtacacccaggacccaaggaactatctatttagaactgaggggtttcccaaggactatgggcatggccaagaataagctgtctctggcatctctatcccctatgaggcaccacgtaagacctcctgcccttagctctcttgctcaccacccaagaacctcaggacagaagcgagagcccattgctcctgctcagctcagcccggctgcggaggaacccttggcaggcagaacctggaggtgtcagaggctcaactcctccatctaaccagcaggctcccagagtccccggaagagcctgcgcagctgaagcagagtgcttctagatggagagtggtcactggggaaaaggacctggccatcaccttccaatacctgctgcctgtctccctgacccatgatctggcaagttaggcacagtcagacatggacagttgatccatgaggaaaagatgctctcccacctaaggccaggaatctgagagcaggactggctgagctcccagggcaaggggttcactaatgcttatcaataaagaatattgagcctggaa

SEQ ID NO: 295214 - DNA, 2117 bp, Homo sapiens
cgtggcctctggttctctgtgcccagtccagggtggcagtttgttggcttcttagggctcctctgtcctggagatcttcatgaaagtagctgactgtgaaaaccttgaattggggagtgtatggataggtgatcctgcagctgaaggagatagctgtgttggccagggaggcatgatgggcaggccggtgtgggtcactgactgtcctcctgccagtcgcagggtcccgggcagcagcagcacgccaaggaggagccagggggctgcggggagcccaggagggctgggaggcctggcagggccgccacctcacaggctggttctccatctgggggcctgcttgtctgcggcgactctttagatcttgtctgcccgccgctggcctggccccgtctgtctctctcagcagctgtctttctcgcgcccactggccggtctctcctcttccccgcagttgcctccttctctgcctgcctgggtggccgccatgggccggaagcggctcatcactgattcctacccggttgtgaagaggagggaggggcccgctgggcacagcaagggggagctggcacccgagctaggggaggagccccagccccgcgacgaggaggaagcggagctggagctgctgaggcagtttgacctggcctggcagtacgggccctgcaccggtgagaacccacccagccccacggaggcgcctctcccagccagtcacccacacgtctctgaagtcacccaagcgcttgcgtgactctgaccctcaggaactgtctccccccaacacacacattctccagctcagactctaccccaccccccacaagtctccagagtcttcttcccaccctggcagggatcacacggctgcagcgctggtgtcgggccaagcagatgggcttggagcctcccccagaggtgtggcaggtgctgaagacccaccccggagacccccgcttccagtgcagaggtcagagacaggccgggagggctttcaggggagccagggccttctccaggcactgtcaccctgctgtcctgacctgagggagaaatggatggagggttggaaggccttgctgaacaggcaagaagattctatgaggtgcctggctcaggaggacacgccactataataattctttttttttgagacagagtcttgctctgttgcccaggctggagtgcagtggcgcgatctcggctcactgcaaactccgcctctcgggttcacgccattctcctgtctcagcctcccaagtagctgggactacaggcgcccgccaacacgcccggctaattttttctatttttagtagagacagggtttcaccgtgttagccaggatggtcttgatctcctgacctcgtgatcccacccacctcagcctcccaaagtgctgggattacaggcgtgagccaccacacccggccaataattcttacctctacaagctagtggggggcaaaggtacacccaggacccaaggaactatctatttagaactgaggggtttcccaaggactatgggcatggccaagaataagctggtgaaatcagatccagggactcaacaactgattctctgtttctctctctctctctctggggtatccctccctcccaccccatcttccacagttctctggcatctctatcccctatgaggcaccacgtaagacctcctgcccttagctctcttgctcaccacccaagaacctcaggacagaagcgagagcccattgctcctgctcagctcagcccggctgcggaggaacccttggcaggcagaacctggaggtgtcagaggctcaactcctccatctaaccagcaggctcccagagtccccggaagagcctgcgcagctgaagcagagtgcttctagatggagagtggtcactggggaaaaggacctggccatcaccttccaatacctgctgcctgtctccctgacccatgatctggcaagttaggcacagtcagacatggacagttgatccatgaggaaaagatgctctcccacctaaggccaggaatctgagagcaggactggctgagctcccagggcaaggggttcactaatgcttatcaataaagaatattgagcctggaa

SEQ ID NO: 295215 - DNA, 1146 bp, Homo sapiens
cgtggcctctggttctctgtgcccagtccagggtggcagtttgttggcttcttagggctcctctgtcctggagatcttcatgaaagtagctgactgtgaaaaccttgaattggggagtgtatggataggtgatcctgcagctgaaggagatagctgtgttggccagggaggcatgatgggcaggccggtgtgggtcactgactgtcctcctgccagtcgcagggtcccgggcagcagcagcacgccaaggaggagccagggggctgcggggagcccaggagggctgggaggcctggcagggccgccacctcacaggctggttctccatctgggggcctgcttgtctgcggcgactctttagatcttgtctgcccgccgctggcctggccccgtctgtctctctcagcagctgtctttctcgcgcccactggccggtctctcctcttccccgcagttgcctccttctctgcctgcctgggtggccgccatgggccggaagcggctcatcactgattcctacccggttgtgaagaggagggaggggcccgctgggcacagcaagggggagctggcacccgagctaggggaggagccccagccccgcgacgaggaggaagcggagctggagctgctgaggcagtttgacctggcctggcagtacgggccctgcaccgtctctggcatctctatcccctatgaggcaccacgtaagacctcctgcccttagctctcttgctcaccacccaagaacctcaggacagaagcgagagcccattgctcctgctcagctcagcccggctgcggaggaacccttggcaggcagaacctggaggtgtcagaggctcaactcctccatctaaccagcaggctcccagagtccccggaagagcctgcgcagctgaagcagagtgcttctagatggagagtggtcactggggaaaaggacctggccatcaccttccaatacctgctgcctgtctccctgacccatgatctggcaagttaggcacagtcagacatggacagttgatccatgaggaaaagatgctctcccacctaaggccaggaatctgagagcaggactggctgagctcccagggcaaggggttcactaatgcttatcaataaagaatattgagcctggaa

SEQ ID NO: 295216 - DNA, 1204 bp, Homo sapiens
cgtggcctctggttctctgtgcccagtccagggtggcagtttgttggcttcttagggctcctctgtcctggagatcttcatgaaagtagctgactgtgaaaaccttgaattggggagtgtatggataggtgatcctgcagctgaaggagatagctgtgttggccagggaggcatgatgggcaggccggtgtgggtcactgactgtcctcctgccagtcgcagggtcccgggcagcagcagcacgccaaggaggagccagggggctgcggggagcccaggagggctgggaggcctggcagggccgccacctcacaggctggttctccatctgggggcctgcttgtctgcggcgactctttagatcttgtctgcccgccgctggcctggccccgtctgtctctctcagcagctgtctttctcgcgcccactggccggtctctcctcttccccgcagttgcctccttctctgcctgcctgggtggccgccatgggccggaagcggctcatcactgattcctacccggttgtgaagaggagggaggggcccgctgggcacagcaagggggagctggcacccgagctaggggaggagccccagccccgcgacgaggaggaagcggagctggagctgctgaggcagtttgacctggcctggcagtacgggccctgcaccgggatcacacggctgcagcgctggtgtcgggccaagcagatgggcttggagcctcccccagaggtgtggcaggtgctgaagacccaccccggagacccccgcttccagtgcagtctctggcatctctatcccctatgaggcaccacgtaagacctcctgcccttagctctcttgctcaccacccaagaacctcaggacagaagcgagagcccattgctcctgctcagctcagcccggctgcggaggaacccttggcaggcagaacctggaggtgtcagaggctcaactcctccatctaaccagcaggctcccagagtccccggaagagcctgcgcagctgaagcagagtgcttctagatggagagtggtcactggggaaaaggacctggccatcaccttccaatacctgctgcctgtctccctgacccatgatctggcaagttaggcacagtcagacatggacagttgatccatgaggcccagggcaaggggttcactaatgcttatcaataaagaatattgagcctggaa

SEQ ID NO: 295217 - DNA, 1203 bp, Homo sapiens
cgtggcctctggttctctgtgcccagtccagggtggcagtttgttggcttcttagggctcctctgtcctggagatcttcatgaaagtagctgactgtgaaaaccttgaattggggagtgtatggataggtgatcctgcagctgaaggagatagctgtgttggccagggaggcatgatgggcaggccggtgtgggtcactgactgtcctcctgccagtcgcagggtcccgggcagcagcagcacgccaaggaggagccagggggctgcggggagcccaggagggctgggaggcctggcagggccgccacctcacaggctggttctccatctgggggcctgcttgtctgcggcgactctttagatcttgtctgcccgccgctggcctggccccgtctgtctctctcagcagctgtctttctcgcgcccactggccggtctctcctcttccccgcagttgcctccttctctgcctgcctgggtggccgccatgggccggaagcggctcatcactgattcctacccggttgtgaagaggagggaggggcccgctgggcacagcaagggggagctggcacccgagctaggggaggagccccagccccgcgacgaggaggaagcggagctggagctgctgaggcagtttgacctggcctggcagtacgggccctgcaccgggatcacacggctgcagcgctggtgtcgggccaagcagatgggcttggagcctcccccagaggtgtggcaggtgctgaagacccaccccggagacccccgcttccagtgcagtctctggcatctctatcccctatgaggcaccacgtaagacctcctgcccttagctctcttgctcaccacccaagaacctcaggacagaagcgagagcccattgctcctgctggctcaactcctccatctaaccagcaggctcccagagtccccggaagagcctgcgcagctgaagcagagtgcttctagatggagagtggtcactggggaaaaggacctggccatcaccttccaatacctgctgcctgtctccctgacccatgatctggcaagttaggcacagtcagacatggacagttgatccatgaggaaaagatgctctcccacctaaggccaggaatctgagagcaggactggctgagctcccagggcaaggggttcactaatgcttatcaataaagaatattgagcctggaa

SEQ ID NO: 295218 - DNA, 1181 bp, Homo sapiens
cgtggcctctggttctctgtgcccagtccagggtggcagtttgttggcttcttagggctcctctgtcctggagatcttcatgaaagtagctgactgtgaaaaccttgaattggggagtgtatggataggtgatcctgcagctgaaggagatagctgtgttggccagggaggcatgatgggcaggccggtgtgggtcactgactgtcctcctgccagtcgcagggtcccgggcagcagcagcacgccaaggaggagccagggggctgcggggagcccaggagggctgggaggcctggcagggccgccacctcacaggctggttctccatctgggggcctgcttgtctgcggcgactctttagatcttgtctgcccgccgctggcctggccccgtctgtctctctcagcagctgtctttctcgcgcccactggccggtctctcctcttccccgcagttgcctccttctctgcctgcctgggtggccgccatgggccggaagcggctcatcactgattcctacccggttgtgaagaggagggaggggcccgctgggcacagcaagggggagctggcacccgagctaggggaggagccccagccccgcgacgaggaggaagcggagctggagctgctgaggcagtttgacctggcctggcagtacgggccctgcaccgggatcacacggctgcagcgctggtgtcgggccaagcagatgggcttggagcctcccccagaggtgtggcaggtgctgaagacccaccccggagacccccgcttccagtgcagtctctggcatctctatcccctatgaggcaccacgtaagacctcctgcccttagctctcttgctcaccacccaagaacctcaggacagaagcgagagcccattgctcctgctagcaggctcccagagtccccggaagagcctgcgcagctgaagcagagtgcttctagatggagagtggtcactggggaaaaggacctggccatcaccttccaatacctgctgcctgtctccctgacccatgatctggcaagttaggcacagtcagacatggacagttgatccatgaggaaaagatgctctcccacctaaggccaggaatctgagagcaggactggctgagctcccagggcaaggggttcactaatgcttatcaataaagaatattgagcctggaa

SEQ ID NO: 295219 - DNA, 1092 bp, Homo sapiens
cgtggcctctggttctctgtgcccagtccagggtggcagtttgttggcttcttagggctcctctgtcctggagatcttcatgaaagtagctgactgtgaaaaccttgaattggggagtgtatggataggtgatcctgcagctgaaggagatagctgtgttggccagggaggcatgatgggcaggccggtgtgggtcactgactgtcctcctgccagtcgcagggtcccgggcagcagcagcacgccaaggaggagccagggggctgcggggagcccaggagggctgggaggcctggcagggccgccacctcacaggctggttctccatctgggggcctgcttgtctgcggcgactctttagatcttgtctgcccgccgctggcctggccccgtctgtctctctcagcagctgtctttctcgcgcccactggccggtctctcctcttccccgcagttgcctccttctctgcctgcctgggtggccgccatgggccggaagcggctcatcactgattcctacccggttgtgaagaggagggaggggcccgctgggcacagcaagggggagctggcacccgagctaggggaggagccccagccccgcgacgaggaggaagcggagctggagctgctgaggcagtttgacctggcctggcagtacgggccctgcaccgggatcacacggctgcagcgctggtgtcgggccaagcagatgggcttggagcctcccccagaggtgtggcaggtgctgaagacccaccccggagacccccgcttccagtgcagggctcaactcctccatctaaccagcaggctcccagagtccccggaagagcctgcgcagctgaagcagagtgcttctagatggagagtggtcactggggaaaaggacctggccatcaccttccaatacctgctgcctgtctccctgacccatgatctggcaagttaggcacagtcagacatggacagttgatccatgaggaaaagatgctctcccacctaaggccaggaatctgagagcaggactggctgagctcccagggcaaggggttcactaatgcttatcaataaagaatattgagcctggaa

SEQ ID NO: 295220 - DNA, 709 bp, Homo sapiens
ggagctggaactccggcttcatttcacccctgctgggatgccaggttcccacctcagcaccctgggattcctgagtgtcagtgacttgggattcccacccaggcagtcaagccagccacccccttctttcccccctgcactgatatctctgggggtttctccttcctatgtcctgcccctgctacctgcttcattgtccatcccctgggggcgggcagagggccctctgccctcccccagaggtgtggcaggtgctgaagacccaccccggagacccccgcttccagtgcagtctctggcatctctatcccctatgaggcaccacgtaagacctcctgcccttagctctcttgctcaccacccaagaacctcaggacagaagcgagagcccattgctcctgctggctcaactcctccatctaaccagcaggctcccagagtccccggaagagcctgcgcagctgaagcagagtgcttctagatggagagtggtcactggggaaaaggacctggccatcaccttccaatacctgctgcctgtctccctgacccatgatctggcaagttaggcacagtcagacatggacagttgatccatgaggaaaagatgctctcccacctaaggccaggaatctgagagcaggactggctgagctcccagggcaaggggttcactaatgcttatcaataaagaatattgagcctggaa

SEQ ID NO: 295221 - DNA, 1283 bp, Homo sapiens
cgtggcctctggttctctgtgcccagtccagggtggcagtttgttggcttcttagggctcctctgtcctggagatcttcatgaaagtagctgactgtgaaaaccttgaattggggagtgtatggataggtgatcctgcagctgaaggagatagctgtgttggccagggaggcatgatgggcaggccggtgtgggtcactgactgtcctcctgccagtcgcagggtcccgggcagcagcagcacgccaaggaggagccagggggctgcggggagcccaggagggctgggaggcctggcagggccgccacctcacaggctggttctccatctgggggcctgcttgtctgcggcgactctttagatcttgtctgcccgccgctggcctggccccgtctgtctctctcagcagctgtctttctcgcgcccactggccggtctctcctcttccccgcagttgcctccttctctgcctgcctgggtggccgccatgggccggaagcggctcatcactgattcgggaggagccccagccccgcgacgaggaggaagcggagctggagctgctgaggcagtttgacctggcctggcagtacgggccctgcaccgggatcacacggctgcagcgctggtgtcgggccaagcagatgggcttggagcctcccccagaggtgtggcaggtgctgaagacccaccccggagacccccgcttccagtgcagtctctggcatctctatcccctatgaggcaccacgtaagacctcctgcccttagctctcttgctcaccacccaagaacctcaggacagaagcgagagcccattgctcctgctcagctcagcccggctgcggaggaacccttggcaggcagaacctggaggtgtcagaggctcaactcctccatctaaccagcaggctcccagagtccccggaagagcctgcgcagctgaagcagagtgcttctagatggagagtggtcactggggaaaaggacctggccatcaccttccaatacctgctgcctgtctccctgacccatgatctggcaagttaggcacagtcagacatggacagttgatccatgaggaaaagatgctctcccacctaaggccaggaatctgagagcaggactggctgagctcccagggcaaggggttcactaatgcttatcaataaagaatattgagcctggaaaaaaaaaagaaaaccgggctttatgggggggggaaaggttgaaggcctggtagggttcccgcccctttgtaagggaacgggcccaaggggaag

SEQ ID NO: 295222 - DNA, 1076 bp, Homo sapiens
cgtggcctctggttctctgtgcccagtccagggtggcagtttgttggcttcttagggctcctctgtcctggagatcttcatgaaagtagctgactgtgaaaaccttgaattggggagtgtatggataggtgatcctgcagctgaaggagatagctgtgttggccagggaggcatgatgggcaggccggtgtgggtcactgactgtcctcctgccagtcgcagggtcccgggcagcagcagcacgccaaggaggagccagggggctgcggggagcccaggagggctgggaggcctggcagggccgccacctcacaggctggttctccatctgggggcctgcttgtctgcggcgactctttagatcttgtctgcccgccgctggcctggccccgtctgtctctctcagcagctgtctttctcgcgcccactggccggtctctcctcttccccgcagttgcctccttctctgcctgcctgggtggccgccatgggccggaagcggctcatcactgattcctacccggttgtgaagaggagggaggggcccgctgggcacagcaagggggagctggcacccgagctaggggaggagccccagccccgcgacgaggaggaagcggagctggagctgctgaggcagtttgacctggcctggcagtacgggccctgcaccgggatcacacggctgcagcgctggtgtcgggccaagcagatgggcttggagcctcccccagaggtgtggcaggtgctgaagacccaccccggagacccccgcttccagtgcagtctctggcatctctatcccctatgaggcaccacgtaagacctcctgcccttagctctcttgctcaccacccaagaacctcaggacagaagcgagagcccattgctcctgctctgctgcctgtctccctgacccatgatctggcaagttaggcacagtcagacatggacagttgatccatgaggaaaagatgctctcccacctaaggccaggaatctgagagcaggactggctgagctcccagggcaaggggttcactaatgcttatcaataaagaatattgagcctggaa

SEQ ID NO: 295223 - DNA, 172 bp, Homo sapiens
gagttgctgactttgtaacatatgaatatataaaaatcccttgcaattcaggtagtcaatgcaagggatttttatatattcatatgttacaaagtcagcaactctcctgttggttcattattgaatgtgctgtaaattaagtcgtttgcaattaaaacaaggtttgcccaca

SEQ ID NO: 295224 - DNA, 138 bp, Homo sapiens
ttttttttttgcgggcaaaccttgttgcaagggatttttatatattcatatgttacaaagtcagcaactctcctgttggttcattattgaatgtgctgtaaattaagtcgtttgcaattaaaacaaggtttgcccaca

SEQ ID NO: 295225 - DNA, 2045 bp, Homo sapiens
agtccgccccgccccctccccgtccccgccgctgcagccgtcgccttcggagcgaagggtaccgacccggcagaagctcggagctctcggggtatcgaggaggcaggcccgcgggcgcacgggcgagcgggccgggagccggagcggcggaggagccggcagcagcggcgcggcgggctccaggcgaggcggtcgacgctcctgaaaacttgcgcgcgcgctcgcgccactgcgcccggagcgatgaagatggtcgcgccctggacgcggttctactccaacagctgctgcttgtgctgccatgtccgcaccggcaccatcctgctcggcgtctggtatctgatcatcaatgctgtggtactgttgattttattgagtgccctggctgatccggatcagtataacttttcaagttctgaactgggaggtgactttgagttcatggatgatgccaacatgtgcattgccattgcgatttctcttctcatgatcctgatatgtgctatggctacttacggagcgtacaagcaacgcgcagcctggatcatcccattcttctgttaccagatctttgactttgccctgaacatgttggttgcaatcactgtgcttatttatccaaactccattcaggaatacatacggcaactgcctcctaattttccctacagagatgatgtcatgtcagtgaatcctacctgtttggtccttattattcttctgtttattagcattatcttgacttttaagggttacttgattagctgtgtttggaactgctaccgatacatcaatggtaggaactcctctgatgtcctggtttatgttaccagcaatgacactacggtgctgctacccccgtatgatgatgccactgtgaatggtgctgccaaggagccaccgccaccttacgtgtctgcctaagccttcaagtgggcggagctgagggcagcagcttgactttgcagacatctgagcaatagttctgttatttcacttttgccatgagcctctctgagcttgtttgttgctgaaatgctactttttaaaatttagatgttagattgaaaactgtagttttcaacatatgctttgctagaacactgtgatagattaactgtagaattcttcctgtacgattggggatataacgggcttcactaaccttccctaggcattgaaacttcccccaaatctgatggacctagaagtctgcttttgtacctgctgggccccaaagttgggcatttttctctctgttccctctcttttgaaaatgtaaaataaaaccaaaaatagacaactttttcttcagccattccagcatagagaacaaaaccttatggaaacaggaatgtcaattgtgtaatcattgttctaattaggtaaatagaagtccttatgtatgtgttacaagaatttcccccacaacatcctttatgactgaagttcaatgacagtttgtgtttggtggtaaaggattttctccatggcctgaattaagaccattagaaagcaccaggccgtgggagcagtgaccatctgctgactgttcttgtggatcttgtgtccagggacatggggtgacatgcctcgtatgtgttagagggtggaatggatgtgtttggcgctgcatgggatctggtgcccctcttctcctggattcacatccccacccagggcccgcttttactaagtgttctgccctagattggttcaaggaggtcatccaactgactttatcaagtggaattgggatatatttgatatacttctgcctaacaacatggaaaagggttttcttttccctgcaagctacatcctactgctttgaacttccaagtatgtctagtcaccttttaaaatgtaaacattttcagaaaaatgaggattgccttccttgtatgcgctttttaccttgactacctgaattgcaagggatttttatatattcatatgttacaaagtcagcaactctcctgttggttcattattgaatgtgctgtaaattaagtcgtttgcaattaaaacaaggtttgcccaca

SEQ ID NO: 295226 - DNA, 2225 bp, Homo sapiens
agtccgccccgccccctccccgtccccgccgctgcagccgtcgccttcggagcgaagggtaccgacccggcagaagctcggagctctcggggtatcgaggaggcaggcccgcgggcgcacgggcgagcgggccgggagccggagcggcggaggagccggcagcagcggcgcggcgggctccaggcgaggcggtcgacgctcctgaaaacttgcgcgcgcgctcgcgccactgcgcccggagcgatgaagatggtcgcgccctggacgcggttctactccaacagctgctgcttgtgctgccatgtccgcaccggcaccatcctgctcggcgtctggtatctgatcatcaatgctgtggtactgttgattttattgagtgccctggctgatccggatcagtataacttttcaagttctgaactgggaggtgactttgagttcatggatgatgccaacatgtgcattgccattgcgatttctcttctcatgatcctgatatgtgctatggctacttacggagcgtacaagcaacgcgcagcctggatcatcccattcttctgttaccagatctttgactttgccctgaacatgttggttgcaatcactgtgcttatttatccaaactccattcaggaatacatacggcaactgcctcctaattttccctacagagatgatgtcatgtcagtgaatcctacctgtttggtccttattattcttctgtttattagcattatcttgacttttaagggttacttgattagctgtgtttggaactgctaccgatacatcaatggtaggaactcctctgatgtcctggtttatgttaccagcaatgacactacggtgctgctacccccgtatgatgatgccactgtgaatggtgctgccaaggagccaccgccaccttacgtgtctgcctaagccttcaagtgggcggagctgagggcagcagcttgactttgcagacatctgagcaatagttctgttatttcacttttgccatgagcctctctgagcttgtttgttgctgaaatgctactttttaaaatttagatgttagattgaaaactgtagttttcaacatatgctttgctagaacactgtgatagattaactgtagaattcttcctgtacgattggggatataacgggcttcactaaccttccctaggcattgaaacttcccccaaatctgatggacctagaagtctgcttttgtacctgctgggccccaaagttgggcatttttctctctgttccctctcttttgaaaatgtaaaataaaaccaaaaatagacaactttttcttcagccattccagcatagagaacaaaaccttatggaaacaggaatgtcaattgtgtaatcattgttctaattaggtaaatagaagtccttatgtatgtgttacaagaatttcccccacaacatcctttatgactgaagttcaatgacagtttgtgtttggtggtaaaggattttctccatggcctgaattaagaccattagaaagcaccaggccgtgggagcagtgaccatctgctgactgttcttgtggatcttgtgtccagggacatggggtgacatgcctcgtatgtgttagagggtggaatggatgtgtttggcgctgcatgggatctggtgcccctcttctcctggattcacatccccacccagggcccgcttttactaagtgttctgccctagattggttcaaggaggtcatccaactgactttatcaagtggaattgggatatatttgatatacttctgcctaacaacatggaaaagggttttcttttccctgcaagctacatcctactgctttgaacttccaagtatgtctagtcaccttttaaaatgtaaacattttcagaaaaatgaggattgccttccttgtatgcgctttttaccttgactacctgaattgcaagggatttttatatattcatatgttacaaagtcagcaactctcctgttggttcattattgaatgtgctgtaaattaagtcgtttgcaattaaaacaaggtttgcccacaaaaaaaaaaaagggggcgcctaaaatatccccgaaggtccacgctaccggacccaggttttggacaaaggccaaggcgccgtaaaaacacagaggcggcgaaacacgcgacggaaccgcgcgggacggaagcccaccggggcaaggacaccacagagacgcgagaaacccgtcacggcag

SEQ ID NO: 295227 - DNA, 2319 bp, Homo sapiens
agtccgccccgccccctccccgtccccgccgctgcagccgtcgccttcggagcgaagggtaccgacccggcagaagctcggagctctcggggtatcgaggaggcaggcccgcgggcgcacgggcgagcgggccgggagccggagcggcggaggagccggcagcagcggcgcggcgggctccaggcgaggcggtcgacgctcctgaaaacttgcgcgcgcgctcgcgccactgcgcccggagcgatgaagatggtcgcgccctggacgcggttctactccaacagctgctgcttgtgctgccatgtccgcaccggcaccatcctgctcggcgtctggtatctgatcatcaatgctgtggtactgttgattttattgagtgccctggctgatccggatcagtataacttttcaagttctgaactgggaggtgactttgagttcatggatgatgccaacatgtgcattgccattgcgatttctcttctcatgatcctgatatgtgctatggctacttacggagcgtacaagcaacgcgcagcctggatcatcccattcttctgttaccagatctttgactttgccctgaacatgttggttgcaatcactgtgcttatttatccaaactccattcaggaatacatacggcaactgcctcctaattttccctacagagatgatgtcatgtcagtgaatcctacctgtttggtccttattattcttctgtttattagcattatcttgacttttaagggttacttgattagctgtgtttggaactgctaccgatacatcaatggtaggaactcctctgatgtcctggtttatgttaccagcaatgacactacggtgctgctacccccgtatgatgatgccactgtgaatggtgctgccaaggagccaccgccaccttacgtgtctgcctaagccttcaagtgggcggagctgagggcagcagcttgactttgcagacatctgagcaatagttctgttatttcacttttgccatgagcctctctgagcttgtttgttgctgaaatgctactttttaaaatttagatgttagattgaaaactgtagttttcaacatatgctttgctagaacactgtgatagattaactgtagaattcttcctgtacgattggggatataacgggcttcactaaccttccctaggcattgaaacttcccccaaatctgatggacctagaagtctgcttttgtacctgctgggccccaaagttgggcatttttctctctgttccctctcttttgaaaatgtaaaataaaaccaaaaatagacaactttttcttcagccattccagcatagagaacaaaaccttatggaaacaggaatgtcaattgtgtaatcattgttctaattaggtaaatagaagtccttatgtatgtgttacaagaatttcccccacaacatcctttatgactgaagttcaatgacagtttgtgtttggtggtaaaggattttctccatggcctgaattaagaccattagaaagcaccaggccgtgggagcagtgaccatctgctgactgttcttgtggatcttgtgtccagggacatggggtgacatgcctcgtatgtgttagagggtggaatggatgtgtttggcgctgcatgggatctggtgcccctcttctcctggattcacatccccacccagggcccgcttttactaagtgttctgccctagattggttcaaggaggtcatccaactgactttatcaagtggaattgggatatatttgatatacttctgcctaacaacatggaaaagggttttcttttccctgcaagctacatcctactgctttgaacttccaagtatgtctagtcaccttttaaaatgtaaacattttcagaaaaatgaggattgccttccttgtatgcgctttttaccttgactacctgaattgcaagggatttttatatattcatatgttacaaagtcagcaactctcctgttggttcattattgaatgtgctgtaaattaagtcgtttgcaattaaaacaaggtttgcccacacacaacagcatgccgcgcacattcctacctacacatgcaactaggttctcctgatcccttcatcaattgagtaggatagcttcgctccccaattgacgaactacatagcgcgcgcccgcctattcaggctgtgccaccatcctaactttatcagcgatactttaccacgcgctcatctagtggacatgtgctttgacaccatgcttctcaccatctcatatatgctgcactgcccgccttaccaagctcgcctgccctctgctacgattctgta

SEQ ID NO: 295228 - DNA, 2387 bp, Homo sapiens
agtccgccccgccccctccccgtccccgccgctgcagccgtcgccttcggagcgaagggtaccgacccggcagaagctcggagctctcggggtatcgaggaggcaggcccgcgggcgcacgggcgagcgggccgggagccggagcggcggaggagccggcagcagcggcgcggcgggctccaggcgaggcggtcgacgctcctgaaaacttgcgcgcgcgctcgcgccactgcgcccggagcgatgaagatggtcgcgccctggacgcggttctactccaacagctgctgcttgtgctgccatgtccgcaccggcaccatcctgctcggcgtctggtatctgatcatcaatgctgtggtactgttgattttattgagtgccctggctgatccggatcagtataacttttcaagttctgaactgggaggtgactttgagttcatggatgatgccaacatgtgcattgccattgcgatttctcttctcatgatcctgatatgtgctatggctacttacggagcgtacaagcaacgcgcagcctggatcatcccattcttctgttaccagatctttgactttgccctgaacatgttggttgcaatcactgtgcttatttatccaaactccattcaggaatacatacggcaactgcctcctaattttccctacagagatgatgtcatgtcagtgaatcctacctgtttggtccttattattcttctgtttattagcattatcttgacttttaagggttacttgattagctgtgtttggaactgctaccgatacatcaatggtaggaactcctctgatgtcctggtttatgttaccagcaatgacactacggtgctgctacccccgtatgatgatgccactgtgaatggtgctgccaaggagccaccgccaccttacgtgtctgcctaagccttcaagtgggcggagctgagggcagcagcttgactttgcagacatctgagcaatagttctgttatttcacttttgccatgagcctctctgagcttgtttgttgctgaaatgctactttttaaaatttagatgttagattgaaaactgtagttttcaacatatgctttgctagaacactgtgatagattaactgtagaattcttcctgtacgattggggatataacgggcttcactaaccttccctaggcattgaaacttcccccaaatctgatggacctagaagtctgcttttgtacctgctgggccccaaagttgggcatttttctctctgttccctctcttttgaaaatgtaaaataaaaccaaaaatagacaactttttcttcagccattccagcatagagaacaaaaccttatggaaacaggaatgtcaattgtgtaatcattgttctaattaggtaaatagaagtccttatgtatgtgttacaagaatttcccccacaacatcctttatgactgaagttcaatgacagtttgtgtttggtggtaaaggattttctccatggcctgaattaagaccattagaaagcaccaggccgtgggagcagtgaccatctgctgactgttcttgtggatcttgtgtccagggacatggggtgacatgcctcgtatgtgttagagggtggaatggatgtgtttggcgctgcatgggatctggtgcccctcttctcctggattcacatccccacccagggcccgcttttactaagtgttctgccctagattggttcaaggaggtcatccaactgactttatcaagtggaattgggatatatttgatatacttctgcctaacaacatggaaaagggttttcttttccctgcaagctacatcctactgctttgaacttccaagtatgtctagtcaccttttaaaatgtaaacattttcagaaaaatgaggattgccttccttgtatgcgctttttaccttgactacctgaattgcaagggatttttatatattcatatgttacaaagtcagcaactctcctgttggttcattattgaatgtgctgtaaattaagtcgtttgcaattaaaacaaggtttgcccacaaaacaaaaaagcagatcagcacacagacaccaagaagaagagacaatgcaaaagcaacaacgaaccgacgtacgccacgacacacacaacaaacagtaacacggaagcacacacaacgcacacaccacccacaccaacaccagcccgaaaaaaaaacaacggagcagggctcctaacaaccacgcgcgggccactccccgacgcgcacgtagtcgcaggggcgccgccagctgccataacagagcgccagacaggaccaccacgacacatccgactcgatcaacagaacacatgtgtgggaacagccacaccacaaagcgacgcgaatacagtgtaggccgc

SEQ ID NO: 295229 - DNA, 2105 bp, Homo sapiens
agtccgccccgccccctccccgtccccgccgctgcagccgtcgccttcggagcgaagggtaccgacccggcagaagctcggagctctcggggtatcgaggaggcaggcccgcgggcgcacgggcgagcgggccgggagccggagcggcggaggagccggcagcagcggcgcggcgggctccaggcgaggcggtcgacgctcctgaaaacttgcgcgcgcgctcgcgccactgcgcccggagcgatgaagatggtcgcgccctggacgcggttctactccaacagctgctgcttgtgctgccatgtccgcaccggcaccatcctgctcggcgtctggtatctgatcatcaatgctgtggtactgttgattttattgagtgccctggctgatccggatcagtataacttttcaagttctgaactgggaggtgactttgagttcatggatgatgccaacatgtgcattgccattgcgatttctcttctcatgatcctgatatgtgctatggctacttacggagcgtacaagcaacgcgcagcctggatcatcccattcttctgttaccagatctttgactttgccctgaacatgttggttgcaatcactgtgcttatttatccaaactccattcaggaatacatacggcaactgcctcctaattttccctacagagatgatgtcatgtcagtgaatcctacctgtttggtccttattattcttctgtttattagcattatcttgacttttaagggttacttgattagctgtgtttggaactgctaccgatacatcaatggtaggaactcctctgatgtcctggtttatgttaccagcaatgacactacggtgctgctacccccgtatgatgatgccactgtgaatggtgctgccaaggagccaccgccaccttacgtgtctgcctaagccttcaagtgggcggagctgagggcagcagcttgactttgcagacatctgagcaatagttctgttatttcacttttgccatgagcctctctgagcttgtttgttgctgaaatgctactttttaaaatttagatgttagattgaaaactgtagttttcaacatatgctttgctagaacactgtgatagattaactgtagaattcttcctgtacgattggggatataacgggcttcactaaccttccctaggcattgaaacttcccccaaatctgatggacctagaagtctgcttttgtacctgctgggccccaaagttgggcatttttctctctgttccctctcttttgaaaatgtaaaataaaaccaaaaatagacaactttttcttcagccattccagcatagagaacaaaaccttatggaaacaggaatgtcaattgtgtaatcattgttctaattaggtaaatagaagtccttatgtatgtgttacaagaatttcccccacaacatcctttatgactgaagttcaatgacagtttgtgtttggtggtaaaggattttctccatggcctgaattaagaccattagaaagcaccaggccgtgggagcagtgaccatctgctgactgttcttgtggatcttgtgtccagggacatggggtgacatgcctcgtatgtgttagagggtggaatggatgtgtttggcgctgcatgggatctggtgcccctcttctcctggattcacatccccacccagggcccgcttttactaagtgttctgccctagattggttcaaggaggtcatccaactgactttatcaagtggaattgggatatatttgatatacttctgcctaacaacatggaaaagggttttcttttccctgcaagctacatcctactgctttgaacttccaagtatgtctagtcaccttttaaaatgtaaacattttcagaaaaatgaggattgccttccttgtatgcgctttttaccttgactacctgaattgcaagggatttttatatattcatatgttacaaagtcagcaactctcctgttggttcattattgaatgtgctgtaaattaagtcgtttgcaattaaaacaaggtttgcccacaaaaaacaacaacaaacaaacaaaaacgaaaacaacaaaaacaaaacaaaacacaaaaagg

SEQ ID NO: 295230 - DNA, 1522 bp, Homo sapiens
tataagtgctatagatgggcccggtgtgtaatcaggccgaggagatctccgacgggttcctgaacatgttggttgcaatcactgtgcttatttatccaaactccattcaggaatacatacggcaactgcctcctaattttccctacagagatgatgtcatgtcagtgaatcctacctgtttggtccttattattcttctgtttattagcattatcttgacttttaagggttacttgattagctgtgtttggaactgctaccgatacatcaatggtaggaactcctctgatgtcctggtttatgttaccagcaatgacactacggtgctgctacccccgtatgatgatgccactgtgaatggtgctgccaaggagccaccgccaccttacgtgtctgcctaagccttcaagtgggcggagctgagggcagcagcttgactttgcagacatctgagcaatagttctgttatttcacttttgccatgagcctctctgagcttgtttgttgctgaaatgctactttttaaaatttagatgttagattgaaaactgtagttttcaacatatgctttgctagaacactgtgatagattaactgtagaattcttcctgtacgattggggatataacgggcttcactaaccttccctaggcattgaaacttcccccaaatctgatggacctagaagtctgcttttgtacctgctgggccccaaagttgggcatttttctctctgttccctctcttttgaaaatgtaaaataaaaccaaaaatagacaactttttcttcagccattccagcatagagaacaaaaccttatggaaacaggaatgtcaattgtgtaatcattgttctaattaggtaaatagaagtccttatgtatgtgttacaagaatttcccccacaacatcctttatgactgaagttcaatgacagtttgtgtttggtggtaaaggattttctccatggcctgaattaagaccattagaaagcaccaggccgtgggagcagtgaccatctgctgactgttcttgtggatcttgtgtccagggacatggggtgacatgcctcgtatgtgttagagggtggaatggatgtgtttggcgctgcatgggatctggtgcccctcttctcctggattcacatccccacccagggcccgcttttactaagtgttctgccctagattggttcaaggaggtcatccaactgactttatcaagtggaattgggatatatttgatatacttctgcctaacaacatggaaaagggttttcttttccctgcaagctacatcctactgctttgaacttccaagtatgtctagtcaccttttaaaatgtaaacattttcagaaaaatgaggattgccttccttgtatgcgctttttaccttgactacctgaattgcaagggatttttatatattcatatgttacaaagtcagcaactctcctgttggttcattattgaatgtgctgtaaattaagtcgtttgcaattaaaacaaggtttgcccaca

SEQ ID NO: 295231 - DNA, 2060 bp, Homo sapiens
agtccgccccgccccctccccgtccccgccgctgcagccgtcgccttcggagcgaagggtaccgacccggcagaagctcggagctctcggggtatcgaggaggcaggcccgcgggcgcacgggcgagcgggccgggagccggagcggcggaggagccggcagcagcggcgcggcgggctccaggcgaggcggtcgacgctcctgaaaacttgcgcgcgcgctcgcgccactgcgcccggagcgatgaagatggtcgcgccctggacgcggttctactccaacagctgctgcttgtgctgccatgtccgcaccggcaccatcctgctcggcgtctggtatctgatcatcaatgctgtggtactgttgattttattgagtgccctggctgatccggatcagtataacttttcaagttctgaactgggaggtgactttgagttcatggatgatgccaacatgtgcattgccattgcgatttctcttctcatgatcctgatatgtgctatggctacttacggagcgtacaagcaacgcgcagcctggatcatcccattcttctgttaccagatctttgactttgccctgaacatgttggttgcaatcactgtgcttatttatccaaactccattcaggaatacatacggcaactgcctcctaattttccctacagagatgatgtcatgtcagtgaatcctacctgtttggtccttattattcttctgtttattagcattatcttgacttttaagggttacttgattagctgtgtttggaactgctaccgatacatcaatggtaggaactcctctgatgtcctggtttatgttaccagcaatgacactacggtgctgctacccccgtatgatgatgccactgtgaatggtgctgccaaggagccaccgccaccttacgtgtctgcctaagccttcaagtgggcggagctgagggcagcagcttgactttgcagacatctgagcaatagttctgttatttcacttttgccatgagcctctctgagcttgtttgttgctgaaatgctactttttaaaatttagatgttagattgaaaactgtagttttcaacatatgctttgctagaacactgtgatagattaactgtagaattcttcctgtacgattggggatataacgggcttcactaaccttccctaggcattgaaacttcccccaaatctgatggacctagaagtctgcttttgtacctgctgggccccaaagttgggcatttttctctctgttccctctcttttgaaaatgtaaaataaaaccaaaaatagacaactttttcttcagccattccagcatagagaacaaaaccttatggaaacaggaatgtcaattgtgtaatcattgttctaattaggtaaatagaagtccttatgtatgtgttacaagaatttcccccacaacatcctttatgactgaagttcaatgacagtttgtgtttggtggtaaaggattttctccatggcctgaattaagaccattagaaagcaccaggccgtgggagcagtgaccatctgctgactgttcttgtggatcttgtgtccagggacatggggtgacatgcctcgtatgtgttagagggtggaatggatgtgtttggcgctgcatgggatctggtgcccctcttctcctggattcacatccccacccagggcccgcttttactaagtgttctgccctagattggttcaaggaggtcatccaactgactttatcaagtggaattgggatatatttgatatacttctgcctaacaacatggaaaagggttttcttttccctgcaagctacatcctactgctttgaacttccaagtatgtctagtcaccttttaccccgccccgtcttcaggtaaatcaagggtctgctccggggcacatttctagcttggccgccgtttgtgaccttgggcaagttcactatactctatgtgtgccaagacttcctcctctgtaaatggtgcacagtccctgcccctcccaacctcacaggcatgttgtaagaataaattaggtaacgtgtaccaaaaaaa

SEQ ID NO: 295232 - DNA, 1253 bp, Homo sapiens
acaacccgccccaaccatgtgtggcgccgtcctcccacactcggtccccttcaggtgctgctacccccgtatgatgatgccactgtgaatggtgctgccaaggagccaccgccaccttacgtgtctgcctaagccttcaagtgggcggagctgagggcagcagcttgactttgcagacatctgagcaatagttctgttatttcacttttgccatgagcctctctgagcttgtttgttgctgaaatgctactttttaaaatttagatgttagattgaaaactgtagttttcaacatatgctttgctagaacactgtgatagattaactgtagaattcttcctgtacgattggggatataacgggcttcactaaccttccctaggcattgaaacttcccccaaatctgatggacctagaagtctgcttttgtacctgctgggccccaaagttgggcatttttctctctgttccctctcttttgaaaatgtaaaataaaaccaaaaatagacaactttttcttcagccattccagcatagagaacaaaaccttatggaaacaggaatgtcaattgtgtaatcattgttctaattaggtaaatagaagtccttatgtatgtgttacaagaatttcccccacaacatcctttatgactgaagttcaatgacagtttgtgtttggtggtaaaggattttctccatggcctgaattaagaccattagaaagcaccaggccgtgggagcagtgaccatctgctgactgttcttgtggatcttgtgtccagggacatggggtgacatgcctcgtatgtgttagagggtggaatggatgtgtttggcgctgcatgggatctggtgcccctcttctcctggattcacatccccacccagggcccgcttttactaagtgttctgccctagattggttcaaggaggtcatccaactgactttatcaagtggaattgggatatatttgatatacttctgcctaacaacatggaaaagggttttcttttccctgcaagctacatcctactgctttgaacttccaagtatgtctagtcaccttttaaaatgtaaacattttcagaaaaatgaggattgccttccttgtatgcgctttttaccttgactacctgaattgcaagggatttttatatattcatatgttacaaagtcagcaactctcctgttggttcattattgaatgtgctgtaaattaagtcgtttgcaattaaaacaaggtttgcccaca

SEQ ID NO: 295233 - DNA, 1256 bp, Homo sapiens
attaatttacatatcgcccgttatataacgacacacggaacaataatatttcgtgaggtgctgctacccccgtatgatgatgccactgtgaatggtgctgccaaggagccaccgccaccttacgtgtctgcctaagccttcaagtgggcggagctgagggcagcagcttgactttgcagacatctgagcaatagttctgttatttcacttttgccatgagcctctctgagcttgtttgttgctgaaatgctactttttaaaatttagatgttagattgaaaactgtagttttcaacatatgctttgctagaacactgtgatagattaactgtagaattcttcctgtacgattggggatataacgggcttcactaaccttccctaggcattgaaacttcccccaaatctgatggacctagaagtctgcttttgtacctgctgggccccaaagttgggcatttttctctctgttccctctcttttgaaaatgtaaaataaaaccaaaaatagacaactttttcttcagccattccagcatagagaacaaaaccttatggaaacaggaatgtcaattgtgtaatcattgttctaattaggtaaatagaagtccttatgtatgtgttacaagaatttcccccacaacatcctttatgactgaagttcaatgacagtttgtgtttggtggtaaaggattttctccatggcctgaattaagaccattagaaagcaccaggccgtgggagcagtgaccatctgctgactgttcttgtggatcttgtgtccagggacatggggtgacatgcctcgtatgtgttagagggtggaatggatgtgtttggcgctgcatgggatctggtgcccctcttctcctggattcacatccccacccagggcccgcttttactaagtgttctgccctagattggttcaaggaggtcatccaactgactttatcaagtggaattgggatatatttgatatacttctgcctaacaacatggaaaagggttttcttttccctgcaagctacatcctactgctttgaacttccaagtatgtctagtcaccttttaaaatgtaaacattttcagaaaaatgaggattgccttccttgtatgcgctttttaccttgactacctgaattgcaagggatttttatatattcatatgttacaaagtcagcaactctcctgttggttcattattgaatgtgctgtaaattaagtcgtttgcaattaaaacaaggtttgcccaca

SEQ ID NO: 295234 - DNA, 1253 bp, Homo sapiens
aaaaatatacatgagtagaaaaatacgagtccacaacataaaaaaaactttcaggtgctgctacccccgtatgatgatgccactgtgaatggtgctgccaaggagccaccgccaccttacgtgtctgcctaagccttcaagtgggcggagctgagggcagcagcttgactttgcagacatctgagcaatagttctgttatttcacttttgccatgagcctctctgagcttgtttgttgctgaaatgctactttttaaaatttagatgttagattgaaaactgtagttttcaacatatgctttgctagaacactgtgatagattaactgtagaattcttcctgtacgattggggatataacgggcttcactaaccttccctaggcattgaaacttcccccaaatctgatggacctagaagtctgcttttgtacctgctgggccccaaagttgggcatttttctctctgttccctctcttttgaaaatgtaaaataaaaccaaaaatagacaactttttcttcagccattccagcatagagaacaaaaccttatggaaacaggaatgtcaattgtgtaatcattgttctaattaggtaaatagaagtccttatgtatgtgttacaagaatttcccccacaacatcctttatgactgaagttcaatgacagtttgtgtttggtggtaaaggattttctccatggcctgaattaagaccattagaaagcaccaggccgtgggagcagtgaccatctgctgactgttcttgtggatcttgtgtccagggacatggggtgacatgcctcgtatgtgttagagggtggaatggatgtgtttggcgctgcatgggatctggtgcccctcttctcctggattcacatccccacccagggcccgcttttactaagtgttctgccctagattggttcaaggaggtcatccaactgactttatcaagtggaattgggatatatttgatatacttctgcctaacaacatggaaaagggttttcttttccctgcaagctacatcctactgctttgaacttccaagtatgtctagtcaccttttaaaatgtaaacattttcagaaaaatgaggattgccttccttgtatgcgctttttaccttgactacctgaattgcaagggatttttatatattcatatgttacaaagtcagcaactctcctgttggttcattattgaatgtgctgtaaattaagtcgtttgcaattaaaacaaggtttgcccaca

SEQ ID NO: 295235 - DNA, 1254 bp, Homo sapiens
acccaaatttatatataattccgacacaatagaataaagttagacgaaaattagagtgctgctacccccgtatgatgatgccactgtgaatggtgctgccaaggagccaccgccaccttacgtgtctgcctaagccttcaagtgggcggagctgagggcagcagcttgactttgcagacatctgagcaatagttctgttatttcacttttgccatgagcctctctgagcttgtttgttgctgaaatgctactttttaaaatttagatgttagattgaaaactgtagttttcaacatatgctttgctagaacactgtgatagattaactgtagaattcttcctgtacgattggggatataacgggcttcactaaccttccctaggcattgaaacttcccccaaatctgatggacctagaagtctgcttttgtacctgctgggccccaaagttgggcatttttctctctgttccctctcttttgaaaatgtaaaataaaaccaaaaatagacaactttttcttcagccattccagcatagagaacaaaaccttatggaaacaggaatgtcaattgtgtaatcattgttctaattaggtaaatagaagtccttatgtatgtgttacaagaatttcccccacaacatcctttatgactgaagttcaatgacagtttgtgtttggtggtaaaggattttctccatggcctgaattaagaccattagaaagcaccaggccgtgggagcagtgaccatctgctgactgttcttgtggatcttgtgtccagggacatggggtgacatgcctcgtatgtgttagagggtggaatggatgtgtttggcgctgcatgggatctggtgcccctcttctcctggattcacatccccacccagggcccgcttttactaagtgttctgccctagattggttcaaggaggtcatccaactgactttatcaagtggaattgggatatatttgatatacttctgcctaacaacatggaaaagggttttcttttccctgcaagctacatcctactgctttgaacttccaagtatgtctagtcaccttttaaaatgtaaacattttcagaaaaatgaggattgccttccttgtatgcgctttttaccttgactacctgaattgcaagggatttttatatattcatatgttacaaagtcagcaactctcctgttggttcattattgaatgtgctgtaaattaagtcgtttgcaattaaaacaaggtttgcccaca

SEQ ID NO: 295236 - DNA, 1252 bp, Homo sapiens
aaaaatttaatatattgtatctatactgtggcgtattaataaataacttctaggtgctgctacccccgtatgatgatgccactgtgaatggtgctgccaaggagccaccgccaccttacgtgtctgcctaagccttcaagtgggcggagctgagggcagcagcttgactttgcagacatctgagcaatagttctgttatttcacttttgccatgagcctctctgagcttgtttgttgctgaaatgctactttttaaaatttagatgttagattgaaaactgtagttttcaacatatgctttgctagaacactgtgatagattaactgtagaattcttcctgtacgattggggatataacgggcttcactaaccttccctaggcattgaaacttcccccaaatctgatggacctagaagtctgcttttgtacctgctgggccccaaagttgggcatttttctctctgttccctctcttttgaaaatgtaaaataaaaccaaaaatagacaactttttcttcagccattccagcatagagaacaaaaccttatggaaacaggaatgtcaattgtgtaatcattgttctaattaggtaaatagaagtccttatgtatgtgttacaagaatttcccccacaacatcctttatgactgaagttcaatgacagtttgtgtttggtggtaaaggattttctccatggcctgaattaagaccattagaaagcaccaggccgtgggagcagtgaccatctgctgactgttcttgtggatcttgtgtccagggacatggggtgacatgcctcgtatgtgttagagggtggaatggatgtgtttggcgctgcatgggatctggtgcccctcttctcctggattcacatccccacccagggcccgcttttactaagtgttctgccctagattggttcaaggaggtcatccaactgactttatcaagtggaattgggatatatttgatatacttctgcctaacaacatggaaaagggttttcttttccctgcaagctacatcctactgctttgaacttccaagtatgtctagtcaccttttaaaatgtaaacattttcagaaaaatgaggattgccttccttgtatgcgctttttaccttgactacctgaattgcaagggatttttatatattcatatgttacaaagtcagcaactctcctgttggttcattattgaatgtgctgtaaattaagtcgtttgcaattaaaacaaggtttgcccaca

SEQ ID NO: 295237 - DNA, 1348 bp, Homo sapiens
agtccgccccgccccctccccgtccccgccgctgcagccgtcgccttcggagcgaagggtaccgacccggcagaagctcggagctctcggggtatcgaggaggcaggcccgcgggcgcacgggcgagcgggccgggagccggagcggcggaggagccggcagcagcggcgcggcgggctccaggcgaggcggtcgacgctcctgaaaacttgcgcgcgcgctcgcgccactgcgcccggagcgatgaagatggtcgcgccctggacgcggttctactccaacagctgctgcttgtgctgccatgtccgcaccggcaccatcctgctcggcgtctggtatctgatcatcaatgctgtggtactgttgattttattgagtgccctggctgatccggatcagtataacttttcaagttctgaactgggaggtgactttgagttcatggatgatgccaacatgtgcattgccattgcgatttctcttctcatgatcctgatatgtgctatggctacttacggagcgtacaagcaacgcgcagcctggatcatcccattcttctgttaccagatctttgactttgccctgaacatgttggttgcaatcactgtgcttatttatccaaactccattcaggaatacatacggcaactgcctcctaattttccctacagagatgatgtcatgtcagtgaatcctacctgtttggtccttattattcttctgtttattagcattatcttgacttttaagggttacttgattagctgtgtttggaactgctaccgatacatcaatggtaggaactcctctgatgtcctggtttatgttaccagcaatgacactacggtgctgctacccccgtatgatgatgccactgtgaatggtgctgccaaggagccaccgccaccttacgtgtctgcctaagccttcaagtgggcggagctgagggcagcagcttgactttgcagacatctgagcaatagttctgttatttcacttttgccatgagcctctctgagcttgtttgttgctgaaatgctactttttaaaatttagatgttagattgaaaactgtagttttcaacatatgctttgctagaacactgtgatagattaactgtagaattcttcctgtacgattggggatataacgggcttcactaaccttccctaggcattgaaacttcccccaaatctgatggacctagaagtctgcttttgtacctgctgggccccaaagttgggcatttttctctctgttccctctcttttgaaaatgtaaaataactcaacagccccccaactagactaaataaaacaaagaatgggcctctttggcctaagagga

SEQ ID NO: 295238 - DNA, 1329 bp, Homo sapiens
agtccgccccgccccctccccgtccccgccgctgcagccgtcgccttcggagcgaagggtaccgacccggcagaagctcggagctctcggggtatcgaggaggcaggcccgcgggcgcacgggcgagcgggccgggagccggagcggcggaggagccggcagcagcggcgcggcgggctccaggcgaggcggtcgacgctcctgaaaacttgcgcgcgcgctcgcgccactgcgcccggagcgatgaagatggtcgcgccctggacgcggttctactccaacagctgctgcttgtgctgccatgtccgcaccggcaccatcctgctcggcgtctggtatctgatcatcaatgctgtggtactgttgattttattgagtgccctggctgatccggatcagtataacttttcaagttctgaactgggaggtgactttgagttcatggatgatgccaacatgtgcattgccattgcgatttctcttctcatgatcctgatatgtgctatggctacttacggagcgtacaagcaacgcgcagcctggatcatcccattcttctgttaccagatctttgactttgccctgaacatgttggttgcaatcactgtgcttatttatccaaactccattcaggaatacatacggcaactgcctcctaattttccctacagagatgatgtcatgtcagtgaatcctacctgtttggtccttattattcttctgtttattagcattatcttgacttttaagggttacttgattagctgtgtttggaactgctaccgatacatcaatggtaggaactcctctgatgtcctggtttatgttaccagcaatgacactacggtgctgctacccccgtatgatgatgccactgtgaatggtgctgccaaggagccaccgccaccttacgtgtctgcctaagccttcaagtgggcggagctgagggcagcagcttgactttgcagacatctgagcaatagttctgttatttcacttttgccatgagcctctctgagcttgtttgttgctgaaatgctactttttaaaatttagatgttagattgaaaactgtagttttcaacatatgctttgctagaacactgtgatagattaactgtagaattcttcctgtacgattggggatataacgggcttcactaaccttccctaggcattgaaacttcccccaaatctgatggacctagaagtctgcttttgtacctgctgggccccaaagttgggcatgtgttgtcgttccttctattaaaaacccttcggtgcggtcttctttgaaagagaacgtggtgaaaaaattaaacccaaatt

SEQ ID NO: 295239 - DNA, 697 bp, Homo sapiens
  misc_feature (16)..(16): n is a, c, g, or t
  misc_feature (20)..(20): n is a, c, g, or t
cctagttttagaagtncaanagcattgttctaattaggtaaatagaagtccttatgtatgtgttacaagaatttcccccacaacatcctttatgactgaagttcaatgacagtttgtgtttggtggtaaaggattttctccatggcctgaattaagaccattagaaagcaccaggccgtgggagcagtgaccatctgctgactgttcttgtggatcttgtgtccagggacatggggtgacatgcctcgtatgtgttagagggtggaatggatgtgtttggcgctgcatgggatctggtgcccctcttctcctggattcacatccccacccagggcccgcttttactaagtgttctgccctagattggttcaaggaggtcatccaactgactttatcaagtggaattgggatatatttgatatacttctgcctaacaacatggaaaagggttttcttttccctgcaagctacatcctactgctttgaacttccaagtatgtctagtcaccttttaaaatgtaaacattttcagaaaaatgaggattgccttccttgtatgcgctttttaccttgactacctgaattgcaagggatttttatatattcatatgttacaaagtcagcaactctcctgttggttcattattgaatgtgctgtaaattaagtcgtttgcaattaaaacaaggtttgcccaca

SEQ ID NO: 295240 - DNA, 648 bp, Homo sapiens
agtccgccccgccccctccccgtccccgccgctgcagccgtcgccttcggagcgaagggtaccgacccggcagaagctcggagctctcggggtatcgaggaggcaggcccgcgggcgcacgggcgagcgggccgggagccggagcggcggaggagccggcagcagcggcgcggcgggctccaggcgaggcggtcgacgctcctgaaaacttgcgcgcgcgctcgcgccactgcgcccggagcgatgaagatggtcgcgccctggacgcggttctactccaacagctgctgcttgtgctgccatgtccgcaccggcaccatcctgctcggcgtctggtatctgatcatcaatgctgtggtactgttgattttattgagtgccctggctgatccggatcagtataacttttcaagttctgaactgggaggtgactttgagttcatggatgatgccaacatgtgcattgccattgcgatttctcttctcatgatcctgatatgtgctatggctacttacggagcgtacaagcaacgcgcagcctggatcatcccattcttctgttaccagatctttgactttgccctgttggttcattattgaatgtgctgtaaattaagtcgtttgcaattaaaacaaggtttgcccaca

SEQ ID NO: 295241 - DNA, 371 bp, Homo sapiens
ttgactacctgaattgcaagggatttttatatattcatatgttacaaagtcagcaactctcctgttggttcattattgaatgtgctgtaaattaagtcgtttgcaattaaaacaaggtttgcccacaatccaagatgaccttgtgattttgtgctgattgtgtctgaggacctttccctccacatatggtctggcagatgcacccagttcagcctaaggagtaggcttttttttgggggggggaggtcgggtgggggggatttttaatcttttaattttcaagatggttaaaatattgaaatgtttaagtggataactatattattcataaaatgactgagtgaaaactaatacactatgagatgaaaagt

SEQ ID NO: 295242 - DNA, 2169 bp, Homo sapiens
  misc_feature (2073)..(2073): n is a, c, g, or t
agtccgccccgccccctccccgtccccgccgctgcagccgtcgccttcggagcgaagggtaccgacccggcagaagctcggagctctcggggtatcgaggaggcaggcccgcgggcgcacgggcgagcgggccgggagccggagcggcggaggagccggcagcagcggcgcggcgggctccaggcgaggcggtcgacgctcctgaaaacttgcgcgcgcgctcgcgccactgcgcccggagcgatgaagatggtcgcgccctggacgcggttctactccaacagctgctgcttgtgctgccatgtccgcaccggcaccatcctgctcggcgtctggtatctgatcatcaatgctgtggtactgttgattttattgagtgccctggctgatccggatcagtataacttttcaagttctgaactgggaggtgactttgagttcatggatgatgccaacatgtgcattgccattgcgatttctcttctcatgatcctgatatgtgctatggctacttacggagcgtacaagcaacgcgcagcctggatcatcccattcttctgttaccagatctttgactttgccctgaacatgttggttgcaatcactgtgcttatttatccaaactccattcaggaatacatacggcaactgcctcctaattttccctacagagatgatgtcatgtcagtgaatcctacctgtttggtccttattattcttctgtttattagcattatcttgacttttaagggttacttgattagctgtgtttggaactgctaccgatacatcaatggtaggaactcctctgatgtcctggtttatgttaccagcaatgacactacggtgctgctacccccgtatgatgatgccactgtgaatggtgctgccaaggagccaccgccaccttacgtgtctgcctaagccttcaagtgggcggagctgagggcagcagcttgactttgcagacatctgagcaatagttctgttatttcacttttgccatgagcctctctgagcttgtttgttgctgaaatgctactttttaaaatttagatgttagattgaaaactgtagttttcaacatatgctttgctagaacactgtgatagattaactgtagaattcttcctgtacgattggggatataacgggcttcactaaccttccctaggcattgaaacttcccccaaatctgatggacctagaagtctgcttttgtacctgctgggccccaaagttgggcatttttctctctgttccctctcttttgaaaatgtaaaataaaaccaaaaatagacaactttttcttcagccattccagcatagagaacaaaaccttatggaaacaggaatgtcaattgtgtaatcattgttctaattaggtaaatagaagtccttatgtatgtgttacaagaatttcccccacaacatcctttatgactgaagttcaatgacagtttgtgtttggtggtaaaggattttctccatggcctgaattaagaccattagaaagcaccaggccgtgggagcagtgaccatctgctgactgttcttgtggatcttgtgtccagggacatggggtgacatgcctcgtatgtgttagagggtggaatggatgtgtttggcgctgcatgggatctggtgcccctcttctcctggattcacatccccacccagggcccgcttttactaagtgttctgccctagattggttcaaggaggtcatccaactgactttatcaagtggaattgggatatatttgatatacttctgcctaacaacatggaaaagggttttcttttccctgcaagctacatcctactgctttgaacttccaagtatgtctagtcaccttttaaaatgtaaacattttcagaaaaatgaggattgccttccttgtatgcgctttttaccttgactacctgaattgcaagggatttttatatattcatatgttacaaagtcagcaactctcctgttggttcattattgaatgtgctgtaaattaagtcgtttgcaattaaaacaaggtttgcccacaaaaaaaaaaacaaaaaaaaaaaaaaaanacgaagacacacgaacaggaacagcggaggcggaggaagggcaaagaagacgaaaaacgagagggaaggaaggcaagaagagcggggggggagacg

SEQ ID NO: 295243 - DNA, 2069 bp, Homo sapiens
agtccgccccgccccctccccgtccccgccgctgcagccgtcgccttcggagcgaagggtaccgacccggcagaagctcggagctctcggggtatcgaggaggcaggcccgcgggcgcacgggcgagcgggccgggagccggagcggcggaggagccggcagcagcggcgcggcgggctccaggcgaggcggtcgacgctcctgaaaacttgcgcgcgcgctcgcgccactgcgcccggagcgatgaagatggtcgcgccctggacgcggttctactccaacagctgctgcttgtgctgccatgtccgcaccggcaccatcctgctcggcgtctggtatctgatcatcaatgctgtggtactgttgattttattgagtgccctggctgatccggatcagtataacttttcaagttctgaactgggaggtgactttgagttcatggatgatgccaaaattctttttaatctttcggcagacatgtgcattgccattgcgatttctcttctcatgatcctgatatgtgctatggctacttacggagcgtacaagcaacgcgcagcctggatcatcccattcttctgttaccagatctttgactttgccctgaacatgttggttgcaatcactgtgcttatttatccaaactccattcaggaatacatacggcaactgcctcctaattttccctacagagatgatgtcatgtcagtgaatcctacctgtttggtccttattattcttctgtttattagcattatcttgacttttaagggttacttgattagctgtgtttggaactgctaccgatacatcaatggtaggaactcctctgatgtcctggtttatgttaccagcaatgacactacggtgctgctacccccgtatgatgatgccactgtgaatggtgctgccaaggagccaccgccaccttacgtgtctgcctaagccttcaagtgggcggagctgagggcagcagcttgactttgcagacatctgagcaatagttctgttatttcacttttgccatgagcctctctgagcttgtttgttgctgaaatgctactttttaaaatttagatgttagattgaaaactgtagttttcaacatatgctttgctagaacactgtgatagattaactgtagaattcttcctgtacgattggggatataacgggcttcactaaccttccctaggcattgaaacttcccccaaatctgatggacctagaagtctgcttttgtacctgctgggccccaaagttgggcatttttctctctgttccctctcttttgaaaatgtaaaataaaaccaaaaatagacaactttttcttcagccattccagcatagagaacaaaaccttatggaaacaggaatgtcaattgtgtaatcattgttctaattaggtaaatagaagtccttatgtatgtgttacaagaatttcccccacaacatcctttatgactgaagttcaatgacagtttgtgtttggtggtaaaggattttctccatggcctgaattaagaccattagaaagcaccaggccgtgggagcagtgaccatctgctgactgttcttgtggatcttgtgtccagggacatggggtgacatgcctcgtatgtgttagagggtggaatggatgtgtttggcgctgcatgggatctggtgcccctcttctcctggattcacatccccacccagggcccgcttttactaagtgttctgccctagattggttcaaggaggtcatccaactgactttatcaagtggaattgggatatatttgatatacttctgcctaacaacatggaaaagggttttcttttccctgcaagctacatcctactgctttgaacttccaagtatgtctagtcaccttttaaaatgtaaacattttcagaaaaatgaggattgccttccttgtatgcgctttttaccttgactacctgaattgcaagggatttttatatattcatatgttacaaagtcagcaactctcctgttggttcattattgaatgtgctgtaaattaagtcgtttgcaattaaaacaaggtttgcccaca

SEQ ID NO: 295244 - DNA, 1642 bp, Homo sapiens
ggtcccgtcttatagtgttgggaggtgacttcgagttcatgtgatatgccaacatgtgcattgccattgcgatttctcttctcatgatcctgatatgtgctatggctacttacggagcgtacaagcaacgcgcagcctggatcatcccattcttctgttaccagatctttgactttgccctgaacatgttggttgcaatcactgtgcttatttatccaaactccattcaggaatacatacggcaactgcctcctaattttccctacagagatgatgtcatgtcagtgaatcctacctgtttggtccttattattcttctgtttattagcattatcttgacttttaagggttacttgattagctgtgtttggaactgctaccgatacatcaatggtaggaactcctctgatgtcctggtttatgttaccagcaatgacactacggtgctgctacccccgtatgatgatgccactgtgaatggtgctgccaaggagccaccgccaccttacgtgtctgcctaagccttcaagtgggcggagctgagggcagcagcttgactttgcagacatctgagcaatagttctgttatttcacttttgccatgagcctctctgagcttgtttgttgctgaaatgctactttttaaaatttagatgttagattgaaaactgtagttttcaacatatgctttgctagaacactgtgatagattaactgtagaattcttcctgtacgattggggatataacgggcttcactaaccttccctaggcattgaaacttcccccaaatctgatggacctagaagtctgcttttgtacctgctgggccccaaagttgggcatttttctctctgttccctctcttttgaaaatgtaaaataaaaccaaaaatagacaactttttcttcagccattccagcatagagaacaaaaccttatggaaacaggaatgtcaattgtgtaatcattgttctaattaggtaaatagaagtccttatgtatgtgttacaagaatttcccccacaacatcctttatgactgaagttcaatgacagtttgtgtttggtggtaaaggattttctccatggcctgaattaagaccattagaaagcaccaggccgtgggagcagtgaccatctgctgactgttcttgtggatcttgtgtccagggacatggggtgacatgcctcgtatgtgttagagggtggaatggatgtgtttggcgctgcatgggatctggtgcccctcttctcctggattcacatccccacccagggcccgcttttactaagtgttctgccctagattggttcaaggaggtcatccaactgactttatcaagtggaattgggatatatttgatatacttctgcctaacaacatggaaaagggttttcttttccctgcaagctacatcctactgctttgaacttccaagtatgtctagtcaccttttaaaatgtaaacattttcagaaaaatgaggattgccttccttgtatgcgctttttaccttgactacctgaattgcaagggatttttatatattcatatgttacaaagtcagcaactctcctgttggttcattattgaatgtgctgtaaattaagtcgtttgcaattaaaacaaggtttgcccaca

SEQ ID NO: 295245 - DNA, 1563 bp, Homo sapiens
  misc_feature (18)..(18): n is a, c, g, or t
  misc_feature (30)..(30): n is a, c, g, or t
agctgacctagaggattnccaggcaaagcnctacggcgcgtacaagcaacgcgcagcctggatcatcccattcttctgttaccagatctttgactttgccctgaacatgttggttgcaatcactgtgcttatttatccaaactccattcaggaatacatacggcaactgcctcctaattttccctacagagatgatgtcatgtcagtgaatcctacctgtttggtccttattattcttctgtttattagcattatcttgacttttaagggttacttgattagctgtgtttggaactgctaccgatacatcaatggtaggaactcctctgatgtcctggtttatgttaccagcaatgacactacggtgctgctacccccgtatgatgatgccactgtgaatggtgctgccaaggagccaccgccaccttacgtgtctgcctaagccttcaagtgggcggagctgagggcagcagcttgactttgcagacatctgagcaatagttctgttatttcacttttgccatgagcctctctgagcttgtttgttgctgaaatgctactttttaaaatttagatgttagattgaaaactgtagttttcaacatatgctttgctagaacactgtgatagattaactgtagaattcttcctgtacgattggggatataacgggcttcactaaccttccctaggcattgaaacttcccccaaatctgatggacctagaagtctgcttttgtacctgctgggccccaaagttgggcatttttctctctgttccctctcttttgaaaatgtaaaataaaaccaaaaatagacaactttttcttcagccattccagcatagagaacaaaaccttatggaaacaggaatgtcaattgtgtaatcattgttctaattaggtaaatagaagtccttatgtatgtgttacaagaatttcccccacaacatcctttatgactgaagttcaatgacagtttgtgtttggtggtaaaggattttctccatggcctgaattaagaccattagaaagcaccaggccgtgggagcagtgaccatctgctgactgttcttgtggatcttgtgtccagggacatggggtgacatgcctcgtatgtgttagagggtggaatggatgtgtttggcgctgcatgggatctggtgcccctcttctcctggattcacatccccacccagggcccgcttttactaagtgttctgccctagattggttcaaggaggtcatccaactgactttatcaagtggaattgggatatatttgatatacttctgcctaacaacatggaaaagggttttcttttccctgcaagctacatcctactgctttgaacttccaagtatgtctagtcaccttttaaaatgtaaacattttcagaaaaatgaggattgccttccttgtatgcgctttttaccttgactacctgaattgcaagggatttttatatattcatatgttacaaagtcagcaactctcctgttggttcattattgaatgtgctgtaaattaagtcgtttgcaattaaaacaaggtttgcccaca

SEQ ID NO: 295246 - DNA, 1991 bp, Homo sapiens
agtccgccccgccccctccccgtccccgccgctgcagccgtcgccttcggagcgaagggtaccgacccggcagaagctcggagctctcggggtatcgaggaggcaggcccgcgggcgcacgggcgagcgggccgggagccggagcggcggaggagccggcagcagcggcgcggcgggctccaggcgaggcggtcgacgctcctgaaaacttgcgcgcgcgctcgcgccactgcgcccggagcgatgaagatggtcgcgccctggacgcggttctactccaacagctgctgcttgtgctgccatgtccgcaccggcaccatcctgctcggcgtctggtatctgatcatcaatgctgtggtactgttgattttattgagtgccctggctgatccggatcagtataacttttcaagttctgaactgggaggtgactttgagttcatggatgatgccaacatgtgcattgccattgcgatttctcttctcatgatcctgatatgtgctatggctacttacggagcgtacaagcaacgcgcagcctggatcatcccattcttctgttaccagatctttgactttgccctgaacatgttggttgcaatcactgtgcttatttatccaaactccattcaggaatacatacggcaactgcctcctaattttccctacagagatgatgtcatgtcagtgaatcctacctgtttggtccttattattcttctgtttattagcattatcttgacttttaagggttacttgattagctgtgtttggaactgctaccgatacatcaatggtaggaactcctctgatgtcctggtttatgttaccagcaatgacactacggtgctgctacccccgtatgatgatgccactgtgaatggtgctgccaaggagccaccgccaccttacgtgtctgcctaagccttcaagtgggcggagctgagggcagcagcttgactttgcagacatctgagcaatagttctgttatttcacttttgccatgagcctctctgagcttgtttgttgctgaaatgctactttttaaaatttagatgttagattgaaaactgtagttttcaacatatgctttgctagaacactgtgatagattaactgtagaattcttcctgtacgattggggatataacgggcttcactaaccttccctaggcattgaaacttcccccaaatctgatggacctagaagtctgcttttgtacctgctgggccccaaagttgggcatttttctctctgttccctctcttttgaaaatgtaaaataaaaccaaaaatagacaactttttcttcagccattccagcatagagaacaaaacaagtccttatgtatgtgttacaagaatttcccccacaacatcctttatgactgaagttcaatgacagtttgtgtttggtggtaaaggattttctccatggcctgaattaagaccattagaaagcaccaggccgtgggagcagtgaccatctgctgactgttcttgtggatcttgtgtccagggacatggggtgacatgcctcgtatgtgttagagggtggaatggatgtgtttggcgctgcatgggatctggtgcccctcttctcctggattcacatccccacccagggcccgcttttactaagtgttctgccctagattggttcaaggaggtcatccaactgactttatcaagtggaattgggatatatttgatatacttctgcctaacaacatggaaaagggttttcttttccctgcaagctacatcctactgctttgaacttccaagtatgtctagtcaccttttaaaatgtaaacattttcagaaaaatgaggattgccttccttgtatgcgctttttaccttgactacctgaattgcaagggatttttatatattcatatgttacaaagtcagcaactctcctgttggttcattattgaatgtgctgtaaattaagtcgtttgcaattaaaacaaggtttgcccaca

SEQ ID NO: 295247 - DNA, 1363 bp, Homo sapiens
tagggtcgaggctgggggtgaatcggccgaggtatcttctgtttattagcattatcttgacttttaagggttacttgattagctgtgtttggaactgctaccgatacatcaatggtaggaactcctctgatgtcctggtttatgttaccagcaatgacactacggtgctgctacccccgtatgatgatgccactgtgaatggtgctgccaaggagccaccgccaccttacgtgtctgcctaagccttcaagtgggcggagctgagggcagcagcttgactttgcagacatctgagcaatagttctgttatttcacttttgccatgagcctctctgagcttgtttgttgctgaaatgctactttttaaaatttagatgttagattgaaaactgtagttttcaacatatgctttgctagaacactgtgatagattaactgtagaattcttcctgtacgattggggatataacgggcttcactaaccttccctaggcattgaaacttcccccaaatctgatggacctagaagtctgcttttgtacctgctgggccccaaagttgggcatttttctctctgttccctctcttttgaaaatgtaaaataaaaccaaaaatagacaactttttcttcagccattccagcatagagaacaaaaccttatggaaacaggaatgtcaattgtgtaatcattgttctaattaggtaaatagaagtccttatgtatgtgttacaagaatttcccccacaacatcctttatgactgaagttcaatgacagtttgtgtttggtggtaaaggattttctccatggcctgaattaagaccattagaaagcaccaggccgtgggagcagtgaccatctgctgactgttcttgtggatcttgtgtccagggacatggggtgacatgcctcgtatgtgttagagggtggaatggatgtgtttggcgctgcatgggatctggtgcccctcttctcctggattcacatccccacccagggcccgcttttactaagtgttctgccctagattggttcaaggaggtcatccaactgactttatcaagtggaattgggatatatttgatatacttctgcctaacaacatggaaaagggttttcttttccctgcaagctacatcctactgctttgaacttccaagtatgtctagtcaccttttaaaatgtaaacattttcagaaaaatgaggattgccttccttgtatgcgctttttaccttgactacctgaattgcaagggatttttatatattcatatgttacaaagtcagcaactctcctgttggttcattattgaatgtgctgtaaattaagtcgtttgcaattaaaacaaggtttgcccaca

SEQ ID NO: 295248 - DNA, 927 bp, Homo sapiens
agtccgccccgccccctccccgtccccgccgctgcagccgtcgccttcggagcgaagggtaccgacccggcagaagctcggagctctcggggtatcgaggaggcaggcccgcgggcgcacgggcgagcgggccgggagccggagcggcggaggagccggcagcagcggcgcggcgggctccaggcgaggcggtcgacgctcctgaaaacttgcgcgcgcgctcgcgccactgcgcccggagcgatgaagatggtcgcgccctggacgcggttctactccaacagctgctgcttgtgctgccatgtccgcaccggcaccatcctgctcggcgtctggtatctgatcatcaatgctgtggtactgttgattttattgagtgccctggctgatccggatcagtataacttttcaagttctgaactgggaggtgactttgagttcatggatgatgccaacatgtgcattgccattgcgatttctcttctcatgatcctgatatgtgctatggctacttacggagcgtacaagcaacgcgcagcctggatcatcccattcttctgttaccagatctttgactttgccctgaacatgttggttgcaatcactgtgcttatttatccaaactccattcaggaatacatacggcaactgcctcctaattttccctacagagatgatgtcatgtcagtgaatcctacctgtttggtccttattattcttctgtttattagcattatcttgacttttaagggttacttgattagctgtgtttggaactgctaccgatacatcaatggtaggaactcctctgatgtcctggtttatgttaccagcaatgacactacgggttgtacccgttgatgatgcctgtaatgtgtgcaggagccggccttgtgttggtagctaagggggaagggagagtgattg

SEQ ID NO: 295249 - DNA, 628 bp, Homo sapiens
aacttagaaaatggattctatataaatgaccaaaaagcagatcttctgctcctggaaaataaaaaattaaaagaatatattttatacttgaagaataacatagagaaatacagagaaggacaagaagccctcatgcacacctcaagcgacttgtctcggcaactaatagctcaggaggcacaatataaggatttgtgggctgaatttcagaccacagttaagatcttggtggacaatggtgaagagaccttgcaagacataaacaatctaacagacaagctgcgtgaaagagatgaaaaaatgcagcatgtcagtacatggctacgagggagtcttgaagggctgcgtttgcttgtggaacaggaatcaccaatggaccttcttaagaagaagaaacacattcgtacaagggttcatttcccagtggttaaatgtactgagaaaaatacattaacaaagtaactcaaggatacaactgctgtgaattcaaaagacagactactacaggaaaagaacaataatccaaacaaatcttgaaccaatctataaacagaaaacctgttatataaattattatctatttttgcaatacatcaaaatactgtattgatgaaaataaatagataac

SEQ ID NO: 295250 - DNA, 1915 bp, Homo sapiens
gcggccgcgcgcactcgcacccgctgcccccgaggccctcctgcactctccccggcgccgctctccggccctcgccctgtccgccgccaccgccgccgccgccagagtcgccatgcagatcccgcgcgccgctcttctcccgctgctgctgctgctgctggcggcgcccgcctcggcgcagctgtcccgggccggccgctcggcgcctttggccgccgggtgcccagaccgggcgcgcgcaggccggcctctgtgtgtgcgccagcagcgagccggtgtgcggcagcgacgccaacacctacgccaacctgtgccagctgcgcgccgccagccgccgctccgagaggctgcaccggccgccggtcatcgtcctgcagcgcggagcctgcggccaagggcaggaagatcccaacagtttgcgccataaatataactttatcgcggacgtggtggagaagatcgcccctgccgtggttcatatcgaattgtttcgcaagcttccgttttctaaacgagaggtgccggtggctagtgggtctgggtttattgtgtcggaagatggactgatcgtgacaaatgcccacgtggtgaccaacaagcaccgggtcaaagttgagctgaagaacggtgccacttacgaagccaaaatcaaggatgtggatgagaaagcagacatcgcactcatcaaaattgaccaccagggcaagctgcctgtcctgctgcttggccgctcctcagagctgcggccgggagagttcgtggtcgccatcggaagcccgttttcccttcaaaacacagtcaccaccgggatcgtgagcaccacccagcgaggcggcaaagagctggggctccgcaactcagacatggactacatccagaccgacgccatcatcaactatggaaactcgggaggcccgttagtaaacctggacggtgaagtgattggaattaacactttgaaagtgacagctggaatctcctttgcaatcccatctgataagattaaaaagttcctcacggagtcccatgaccgacaggccaaaggaaaagccatcaccaagaagaagtatattggtatccgaatgatgtcactcacgtccagcaaagccaaagagctgaaggaccggcaccgggacttcccagacgtgatctcaggagcgtatataattgaagtaattcctgataccccagcagaagctggtggtctcaaggaaaacgacgtcataatcagcatcaatggacagtccgtggtctccgccaatgatgtcagcgacgtcattaaaagggaaagcaccctgaacatggtggtccgcaggggtaatgaagatatcatgatcacagtgattcccgaagaaattgacccataggcagaggcatgagctggacttcatgtttccctcaaagactctcccgtggatgacggatgaggactctgggctgctggaataggacactcaagacttttgactgccattttgtttgttcagtggagactccctggccaacagaatccttcttgatagtttgcaggcaaaacaaatgtaatgttgcagatccgcaggcagaagctctgcccttctgtatcctatgtatgcagtgtgctttttcttgccagcttgggccattcttgcttagacagtcagcatttgtctcctcctttaactgagtcatcatcttagtccaactaatgcagtcgatacaatgcgtagatagaagaagccccacgggagccaggatgggactggtcgtgtttgtgcttttctccaagtcagcacccaaaggtcaatgcacagagaccccgggtgggtgagcgctggcttctcaaacggccgaagttgcctcttttaggaatctctttggaattgggagcacgatgactctgagtttgagctattaaagtacttcttacacattg

SEQ ID NO: 295251 - DNA, 1031 bp, Homo sapiens
  misc_feature (1016)..(1016): n is a, c, g, or t
gcggccgcgcgcactcgcacccgctgcccccgaggccctcctgcactctccccggcgccgctctccggccctcgccctgtccgccgccaccgccgccgccgccagagtcgccatgcagatcccgcgcgccgctcttctcccgctgctgctgctgctgctggcggcgcccgcctcggcgcagctgtcccgggccggccgctcggcgcctttggccgccgggtgcccagaccgctgcgagccggcgcgctgcccgccgcagccggagcactgcgagggcggccgggcccgggacgcgtgcggctgctgcgaggtgtgcggcgcgcccgagggcgccgcgtgcggcctgcaggagggcccgtgcggcgaggggctgcagtgcgtggtgcccttcggggtgccagcctcggccacggtgcggcggcgcgcgcaggccggcctctgtgtgtgcgccagcagcgagccggtgtgcggcagcgacgccaacacctacgccaacctgtgccagctgcgcgccgccagccgccgctccgagaggctgcaccggccgccggtcatcgtcctgcagcgcggagcctgcggccaagggcaggaagatcccaacagtttgcgccataaatataactttatcgcggacgtggtggagaagatcgcccctgccgtggttcatatcgaattgtttcgcaagcttccgttttctaaacgagaggtgccggtggctagtgggtctgggtttattgtgtcggaagatggactgatcgtgacaaatgcccacgtggtgaccaacaagcaccgggtcaaagttgagctgaagaacggtgccacttacgaagccaaaatcaaggatgtggatgagaaagcagacatcgcactcatcaaaattgaccaccagaatgacacaggcagctgctgtctgtgttgcgtctcaagtggcggaatctgtccatcgagcgtttctcaacatcacacggtcgtacacacacgagcgcaaatggtcgcatcaacatgatcatcaacgngctctcatagaatcg

SEQ ID NO: 295252 - DNA, 2041 bp, Homo sapiens
tgtgaagagactgaagcccatcgatgaatactgccgggcacttgtccggctgcccccccacatctcacagtgtgacgaagtcttccggttcttcgaggctcgacccgaggatgtcaaccctccaaaagaggactatggcagttccaagaggaaatcagggcaggaagatcccaacagtttgcgccataaatataactttatcgcggacgtggtggagaagatcgcccctgccgtggttcatatcgaattgtttcgcaagtaaagagagccttcctttttcctataacctccgaagctttcaccgccactagcaaaacatgagagctatttttgagatacattaaagtgtcaaagtgtcactgaatatcttcctacttaagataagtgtgtctcccttagaacattttccctattcgactatataaatctacattcttgacccttctgaatgtttaaagaacctcgggctctgaagagattctctaagaatattttgtaagtggaagtttttgatgcatcgatggctaggtgtgtgtggctgttgcacaacccattaatcaatgcgttgaagcgttcattttaaggtgctacaggcttaagtgtgtactcctttggattttaggcttccgttttctaaacgagaggtgccggtggctagtgggtctgggtttattgtgtcggaagatggactgatcgtgacaaatgcccacgtggtgaccaacaagcaccgggtcaaagttgagctgaagaacggtgccacttacgaagccaaaatcaaggatgtggatgagaaagcagacatcgcactcatcaaaattgaccaccagggcaagctgcctgtcctgctgcttggccgctcctcagagctgcggccgggagagttcgtggtcgccatcggaagcccgttttcccttcaaaacacagtcaccaccgggatcgtgagcaccacccagcgaggcggcaaagagctggggctccgcaactcagacatggactacatccagaccgacgccatcatcaactatggaaactcgggaggcccgttagtaaacctggacggtgaagtgattggaattaacactttgaaagtgacagctggaatctcctttgcaatcccatctgataagattaaaaagttcctcacggagtcccatgaccgacaggccaaaggaaaagccatcaccaagaagaagtatattggtatccgaatgatgtcactcacgtccagcaaagccaaagagctgaaggaccggcaccgggacttcccagacgtgatctcaggagcgtatataattgaagtaattcctgataccccagcagaagctggtggtctcaaggaaaacgacgtcataatcagcatcaatggacagtccgtggtctccgccaatgatgtcagcgacgtcattaaaagggaaagcaccctgaacatggtggtccgcaggggtaatgaagatatcatgatcacagtgattcccgaagaaattgacccataggcagaggcatgagctggacttcatgtttccctcaaagactctcccgtggatgacggatgaggactctgggctgctggaataggacactcaagacttttgactgccattttgtttgttcagtggagactccctggccaacagaatccttcttgatagtttgcaggcaaaacaaatgtaatgttgcagatccgcaggcagaagctctgcccttctgtatcctatgtatgcagtgtgctttttcttgccagcttgggccattcttgcttagacagtcagcatttgtctcctcctttaactgagtcatcatcttagtccaactaatgcagtcgatacaatgcgtagatagaagaagccccacgggagccaggatgggactggtcgtgtttgtgcttttctccaagtcagcacccaaaggtcaatgcacagagaccccgggtgggtgagcgctggcttctcaaacggccgaagttgcctcttttaggaatctctttggaattgggagcacgatgactctgagtttgagctattaaagtacttcttacacattg

SEQ ID NO: 295253 - DNA, 2324 bp, Homo sapiens
gcggccgcgcgcactcgcacccgctgcccccgaggccctcctgcactctccccggcgccgctctccggccctcgccctgtccgccgccaccgccgccgccgccagagtcgccatgcagatcccgcgcgccgctcttctcccgctgctgctgctgctgctggcggcgcccgcctcggcgcagctgtcccgggccggccgctcggcgcctttggccgccgggtgcccagaccgctgcgagccggcgcgctgcccgccgcagccggagcactgcgagggcggccgggcccgggacgcgtgcggctgctgcgaggtgtgcggcgcgcccgagggcgccgcgtgcggcctgcaggagggcccgtgcggcgaggggctgcagtgcgtggtgcccttcggggtgccagcctcggccacggtgcggcggcgcgcgcaggccggcctctgtgtgtgcgccagcagcgagccggtgtgcggcagcgacgccaacacctacgccaacctgtgccagctgcgcgccgccagccgccgctccgagaggctgcaccggccgccggtcatcgtcctgcagcgcggagcctgcggccaagggcaggaagatcccaacagtttgcgccataaatataactttatcgcggacgtggtggagaagatcgcccctgccgtggttcatatcgaattgtttcgcaagcttccgttttctaaacgagaggtgccggtggctagtgggtctgggtttattgtgtcggaagatggactgatcgtgacaaatgcccacgtggtgaccaacaagcaccgggtcaaagttgagctgaagaacggtgccacttacgaagccaaaatcaaggatgtggatgagaaagcagacatcgcactcatcaaaattgaccaccagggcaagctgcctgtcctgctgcttggccgctcctcagagctgcggccgggagagttcgtggtcgccatcggaagcccgttttcccttcaaaacacagtcaccaccgggatcgtgagcaccacccagcgaggcggcaaagagctggggctccgcaactcagacatggactacatccagaccgacgccatcatcaactatggaaactcgggaggcccgttagtaaacctggacggtgaagtgattggaattaacactttgaaagtgacagctggaatctcctttgcaatcccatctgataagattaaaaagttcctcacggagtcccatgaccgacaggccaaaggaaaagccatcaccaagaagaagtatattggtatccgaatgatgtcactcacgtccagcaaagccaaagagctgaaggaccggcaccgggacttcccagacgtgatctcaggagcgtatataattgaagtaattcctgataccccagcagaagctggtggtctcaaggaaaacgacgtcataatcagcatcaatggacagtccgtggtctccgccaatgatgtcagcgacgtcattaaaagggaaagcaccctgaacatggtggtccgcaggggtaatgaagatatcatgatcacagtgattcccgaagaaattgacccataggcagaggcatgagctggacttcatgtttccctcaaagactctcccgtggatgacggatgaggactctgggctgctggaataggacactcaagacttttgactgccattttgtttgttcagtggagactccctggccaacagaatccttcttgatagtttgcaggcaaaacaaatgtaatgttgcagatccgcaggcagaagctctgcccttctgtatcctatgtatgcagtgtgctttttcttgccagcttgggccattcttgcttagacagtcagcatttgtctcctcctttaactgagtcatcatcttagtccaactaatgcagtcgatacaatgcgtagatagaagaagccccacgggagccaggatgggactggtcgtgtttgtgcttttctccaagtcagcacccaaaggtcaatgcacagagaccccgggtgggtgagcgctggcttctcaaacggccgaagttgcctcttttaggaatctctttggaattgggagcacgatgactctgagtttgagctattaaagtacttcttacacattgaaaaaaaaaaaaaaaaaacaaaaaaaaacaacaacaaaaaacacaaaaacaaaacaccaccacaccacaacacaacaaaccaaaaacaaaacactcaaacgtagcaaaaaactaatacaaacagaacaaacagcaaaacaaccaacaaaacacaaacatacgccacagatacacaaaccgcacacgcaccatcaaccacgactaacccaccaagcacacac

SEQ ID NO: 295254 - DNA, 2049 bp, Homo sapiens
gcggccgcgcgcactcgcacccgctgcccccgaggccctcctgcactctccccggcgccgctctccggccctcgccctgtccgccgccaccgccgccgccgccagagtcgccatgcagatcccgcgcgccgctcttctcccgctgctgctgctgctgctggcggcgcccgcctcggcgcagctgtcccgggccggccgctcggcgcctttggccgccgggtgcccagaccgctgcgagccggcgcgctgcccgccgcagccggagcactgcgagggcggccgggcccgggacgcgtgcggctgctgcgaggtgtgcggcgcgcccgagggcgccgcgtgcggcctgcaggagggcccgtgcggcgaggggctgcagtgcgtggtgcccttcggggtgccagcctcggccacggtgcggcggcgcgcgcaggccggcctctgtgtgtgcgccagcagcgagccggtgtgcggcagcgacgccaacacctacgccaacctgtgccagctgcgcgccgccagccgccgctccgagaggctgcaccggccgccggtcatcgtcctgcagcgcggagcctgcggccaagggcaggaagatcccaacagtttgcgccataaatataactttatcgcggacgtggtggagaagatcgcccctgccgtggttcatatcgaattgtttcgcaagcttccgttttctaaacgagaggtgccggtggctagtgggtctgggtttattgtgtcggaagatggactgatcgtgacaaatgcccacgtggtgaccaacaagcaccgggtcaaagttgagctgaagaacggtgccacttacgaagccaaaatcaaggatgtggatgagaaagcagacatcgcactcatcaaaattgaccaccagggcaagctgcctgtcctgctgcttggccgctcctcagagctgcggccgggagagttcgtggtcgccatcggaagcccgttttcccttcaaaacacagtcaccaccgggatcgtgagcaccacccagcgaggcggcaaagagctggggctccgcaactcagacatggactacatccagaccgacgccatcatcaactatggaaactcgggaggcccgttagtaaacctggacggtgaagtgattggaattaacactttgaaagtgacagctggaatctcctttgcaatcccatctgataagattaaaaagttcctcacggagtcccatgaccgacaggccaaaggaaaagccatcaccaagaagaagtatattggtatccgaatgatgtcactcacgtccagcaaagccaaagagctgaaggaccggcaccgggacttcccagacgtgatctcaggagcgtatataattgaagtaattcctgataccccagcagaagctggtggtctcaaggaaaacgacgtcataatcagcatcaatggacagtccgtggtctccgccaatgatgtcagcgacgtcattatcacagtgattcccgaagaaattgacccataggcagaggcatgagctggacttcatgtttccctcaaagactctcccgtggatgacggatgaggactctgggctgctggaataggacactcaagacttttgactgccattttgtttgttcagtggagactccctggccaacagaatccttcttgatagtttgcaggcaaaacaaatgtaatgttgcagatccgcaggcagaagctctgcccttctgtatcctatgtatgcagtgtgctttttcttgccagcttgggccattcttgcttagacagtcagcatttgtctcctcctttaactgagtcatcatcttagtccaactaatgcagtcgatacaatgcgtagatagaagaagccccacgggagccaggatgggactggtcgtgtttgtgcttttctccaagtcagcacccaaaggtcaatgcacagagaccccgggtgggtgagcgctggcttctcaaacggccgaagttgcctcttttaggaatctctttggaattgggagcacgatgactctgagtttgagctattaaagtacttcttacacattg

SEQ ID NO: 295255 - DNA, 2011 bp, Homo sapiens
gcggccgcgcgcactcgcacccgctgcccccgaggccctcctgcactctccccggcgccgctctccggccctcgccctgtccgccgccaccgccgccgccgccagagtcgccatgcagatcccgcgcgccgctcttctcccgctgctgctgctgctgctggcggcgcccgcctcggcgcagctgtcccgggccggccgctcggcgcctttggccgccgggtgcccagaccgctgcgagccggcgcgctgcccgccgcagccggagcactgcgagggcggccgggcccgggacgcgtgcggctgctgcgaggtgtgcggcgcgcccgagggcgccgcgtgcggcctgcaggagggcccgtgcggcgaggggctgcagtgcgtggtgcccttcggggtgccagcctcggccacggtgcggcggcgcgcgcaggccggcctctgtgtgtgcgccagcagcgagccggtgtgcggcagcgacgccaacacctacgccaacctgtgccagctgcgcgccgccagccgccgctccgagaggctgcaccggccgccggtcatcgtcctgcagcgcggagcctgcggccaagggcaggaagatcccaacagtttgcgccataaatataactttatcgcggacgtggtggagaagatcgcccctgccgtggttcatatcgaattgtttcgcaagcttccgttttctaaacgagaggtgccggtggctagtgggtctgggtttattgtgtcggaagatggactgatcgtgacaaatgcccacgtggtgaccaacaagcaccgggtcaaagttgagctgaagaacggtgccacttacgaagccaaaatcaaggatgtggatgagaaagcagacatcgcactcatcaaaattgaccaccagggcaagctgcctgtcctgctgcttggccgctcctcagagctgcggccgggagagttcgtggtcgccatcggaagcccgttttcccttcaaaacacagtcaccaccgggatcgtgagcaccacccagcgaggcggcaaagagctggggctccgcaactcagacatggactacatccagaccgacgccatcatcaactatggaaactcgggaggcccgttagtaaacctggacggtgaagtgattggaattaacactttgaaagtgacagctggaatctcctttgcaatcccatctgataagattaaaaagttcctcacggagtcccatgaccgacaggccaaaggaaaagccatcaccaagaagaagtatattggtatccgaatgatgtcactcacgtccagcaaagccaaagagctgaaggaccggcaccgggacttcccagacgtgatctcaggagcgtatataattgaagtaattcctgataccccagcagaagctggtggtctcaaggaaaacgacgtcataatcagcatcaatggacagtccgtggtctccgccaatgatgtcagcgacgtcattaaaagggaaagcaccctgaacatggtggtccgcaggggtaatgaagatatcatgatcacagtgattcccgaagaaattgacccataggcagaggcatgagctggacttcatgtttccctcaaagactctcccgtggatgacggatgaggactctgggctgctggaataggacactcaagacttttgactgccattttgtttgttcagtggagactccctggccaacagaatccttcttgatagtttgcaggcaaaacaaatgtaatgttgcagatccgcaggcagaagctctgcccttctgtatcctatgtatgcagtgtgctttttcttgccagcttgggccattcttgcttagacaccaggatgggactggtcgtgtttgtgcttttctccaagtcagcacccaaaggtcaatgcacagagaccccgggtgggtgagcgctggcttctcaaacggccgaagttgcctcttttaggaatctctttggaattgggagcacgatgactctgagtttgagctattaaagtacttcttacacattg

SEQ ID NO: 295256 - DNA, 576 bp, Homo sapiens
tctagcaggatcttacgctggcccaatggcagaggcatgagctggacttcatgtttccctcaaagactctcccgtggatgacggatgaggactctgggctgctggaataggacactcaagacttttgactgccattttgtttgttcagtggagactccctggccaacagaatccttcttgatagtttgcaggcaaaacaaatgtaatgttgcagatccgcaggcagaagctctgcccttctgtatcctatgtatgcagtgtgctttttcttgccagcttgggccattcttgcttagacagtcagcatttgtctcctcctttaactgagtcatcatcttagtccaactaatgcagtcgatacaatgcgtagatagaagaagccccacgggagccaggatgggactggtcgtgtttgtgcttttctccaagtcagcacccaaaggtcaatgcacagagaccccgggtgggtgagcgctggcttctcaaacggccgaagttgcctcttttaggaatctctttggaattgggagcacgatgactctgagtttgagctattaaagtacttcttacacattg

SEQ ID NO: 295257 - DNA, 2103 bp, Homo sapiens
gcggccgcgcgcactcgcacccgctgcccccgaggccctcctgcactctccccggcgccgctctccggccctcgccctgtccgccgccaccgccgccgccgccagagtcgccatgcagatcccgcgcgccgctcttctcccgctgctgctgctgctgctggcggcgcccgcctcggcgcagctgtcccgggccggccgctcggcgcctttggccgccgggtgcccagaccgctgcgagccggcgcgctgcccgccgcagccggagcactgcgagggcggccgggcccgggacgcgtgcggctgctgcgaggtgtgcggcgcgcccgagggcgccgcgtgcggcctgcaggagggcccgtgcggcgaggggctgcagtgcgtggtgcccttcggggtgccagcctcggccacggtgcggcggcgcgcgcaggccggcctctgtgtgtgcgccagcagcgagccggtgtgcggcagcgacgccaacacctacgccaacctgtgccagctgcgcgccgccagccgccgctccgagaggctgcaccggccgccggtcatcgtcctgcagcgcggagcctgcggccaagggcaggaagatcccaacagtttgcgccataaatataactttatcgcggacgtggtggagaagatcgcccctgccgtggttcatatcgaattgtttcgcaagcttccgttttctaaacgagaggtgccggtggctagtgggtctgggtttattgtgtcggaagatggactgatcgtgacaaatgcccacgtggtgaccaacaagcaccgggtcaaagttgagctgaagaacggtgccacttacgaagccaaaatcaaggatgtggatgagaaagcagacatcgcactcatcaaaattgaccaccagggcaagctgcctgtcctgctgcttggccgctcctcagagctgcggccgggagagttcgtggtcgccatcggaagcccgttttcccttcaaaacacagtcaccaccgggatcgtgagcaccacccagcgaggcggcaaagagctggggctccgcaactcagacatggactacatccagaccgacgccatcatcaactatggaaactcgggaggcccgttagtaaacctggacggtgaagtgattggaattaacactttgaaagtgacagctggaatctcctttgcaatcccatctgataagattaaaaagttcctcacggagtcccatgaccgacaggccaaaggaaaagccatcaccaagaagaagtatattggtatccgaatgatgtcactcacgtccagcaaagccaaagagctgaaggaccggcaccgggacttcccagacgtgatctcaggagcgtatataattgaagtaattcctgataccccagcagaagctggtggtctcaaggaaaacgacgtcataatcagcatcaatggacagtccgtggtctccgccaatgatgtcagcgacgtcattaaaagggaaagcaccctgaacatggtggtccgcaggggtaatgaagatatcatgatcacagtgattcccgaagaaattgacccataggcagaggcatgagctggacttcatgtttccctcaaagactctcccgtggatgacggatgaggactctgggctgctggaataggacactcaagacttttgactgccattttgtttgttcagtggagactccctggccaacagaatccttcttgatagtttgcaggcaaaacaaatgtaatgttgcagatccgcaggcagaagctctgcccttctgtatcctatgtatgcagtgtgctttttcttgccagcttgggccattcttgcttagacagtcagcatttgtctcctcctttaactgagtcatcatcttagtccaactaatgcagtcgatacaatgcgtagatagaagaagccccacgggagccaggatgggactggtcgtgtttgtgcttttctccaagtcagcacccaaaggtcaatgcacagagaccccgggtgggtgagcgctggcttctcaaacggccgaagttgcctcttttaggaatctctttggaattgggagcacgatgactctgagtttgagctattaaagtacttcttacacattg

SEQ ID NO: 295258 - DNA, 1989 bp, Homo sapiens
gcggccgcgcgcactcgcacccgctgcccccgaggccctcctgcactctccccggcgccgctctccggccctcgccctgtccgccgccaccgccgccgccgccagagtcgccatgcagatcccgcgcgccgctcttctcccgctgctgctgctgctgctggcggcgcccgcccgggacgcgtgcggctgctgcgaggtgtgcggcgcgcccgagggcgccgcgtgcggcctgcaggagggcccgtgcggcgaggggctgcagtgcgtggtgcccttcggggtgccagcctcggccacggtgcggcggcgcgcgcaggccggcctctgtgtgtgcgccagcagcgagccggtgtgcggcagcgacgccaacacctacgccaacctgtgccagctgcgcgccgccagccgccgctccgagaggctgcaccggccgccggtcatcgtcctgcagcgcggagcctgcggccaagggcaggaagatcccaacagtttgcgccataaatataactttatcgcggacgtggtggagaagatcgcccctgccgtggttcatatcgaattgtttcgcaagcttccgttttctaaacgagaggtgccggtggctagtgggtctgggtttattgtgtcggaagatggactgatcgtgacaaatgcccacgtggtgaccaacaagcaccgggtcaaagttgagctgaagaacggtgccacttacgaagccaaaatcaaggatgtggatgagaaagcagacatcgcactcatcaaaattgaccaccagggcaagctgcctgtcctgctgcttggccgctcctcagagctgcggccgggagagttcgtggtcgccatcggaagcccgttttcccttcaaaacacagtcaccaccgggatcgtgagcaccacccagcgaggcggcaaagagctggggctccgcaactcagacatggactacatccagaccgacgccatcatcaactatggaaactcgggaggcccgttagtaaacctggacggtgaagtgattggaattaacactttgaaagtgacagctggaatctcctttgcaatcccatctgataagattaaaaagttcctcacggagtcccatgaccgacaggccaaaggaaaagccatcaccaagaagaagtatattggtatccgaatgatgtcactcacgtccagcaaagccaaagagctgaaggaccggcaccgggacttcccagacgtgatctcaggagcgtatataattgaagtaattcctgataccccagcagaagctggtggtctcaaggaaaacgacgtcataatcagcatcaatggacagtccgtggtctccgccaatgatgtcagcgacgtcattaaaagggaaagcaccctgaacatggtggtccgcaggggtaatgaagatatcatgatcacagtgattcccgaagaaattgacccataggcagaggcatgagctggacttcatgtttccctcaaagactctcccgtggatgacggatgaggactctgggctgctggaataggacactcaagacttttgactgccattttgtttgttcagtggagactccctggccaacagaatccttcttgatagtttgcaggcaaaacaaatgtaatgttgcagatccgcaggcagaagctctgcccttctgtatcctatgtatgcagtgtgctttttcttgccagcttgggccattcttgcttagacagtcagcatttgtctcctcctttaactgagtcatcatcttagtccaactaatgcagtcgatacaatgcgtagatagaagaagccccacgggagccaggatgggactggtcgtgtttgtgcttttctccaagtcagcacccaaaggtcaatgcacagagaccccgggtgggtgagcgctggcttctcaaacggccgaagttgcctcttttaggaatctctttggaattgggagcacgatgactctgagtttgagctattaaagtacttcttacacattg

SEQ ID NO: 295259 - DNA, 1502 bp, Homo sapiens
gtcgatctctagcaggatccccactgattgcggtcttcatagtcgatcgcccctgccgtggttcatatcgacttgtttcgcacgcttccgttttctaaacgagaggtgccggtggctagtgggtctgggtttattgtgtcggaagatggactgatcgtgacaaatgcccacgtggtgaccaacaagcaccgggtcaaagttgagctgaagaacggtgccacttacgaagccaaaatcaaggatgtggatgagaaagcagacatcgcactcatcaaaattgaccaccagggcaagctgcctgtcctgctgcttggccgctcctcagagctgcggccgggagagttcgtggtcgccatcggaagcccgttttcccttcaaaacacagtcaccaccgggatcgtgagcaccacccagcgaggcggcaaagagctggggctccgcaactcagacatggactacatccagaccgacgccatcatcaactatggaaactcgggaggcccgttagtaaacctggacggtgaagtgattggaattaacactttgaaagtgacagctggaatctcctttgcaatcccatctgataagattaaaaagttcctcacggagtcccatgaccgacaggccaaaggaaaagccatcaccaagaagaagtatattggtatccgaatgatgtcactcacgtccagcaaagccaaagagctgaaggaccggcaccgggacttcccagacgtgatctcaggagcgtatataattgaagtaattcctgataccccagcagaagctggtggtctcaaggaaaacgacgtcataatcagcatcaatggacagtccgtggtctccgccaatgatgtcagcgacgtcattaaaagggaaagcaccctgaacatggtggtccgcaggggtaatgaagatatcatgatcacagtgattcccgaagaaattgacccataggcagaggcatgagctggacttcatgtttccctcaaagactctcccgtggatgacggatgaggactctgggctgctggaataggacactcaagacttttgactgccattttgtttgttcagtggagactccctggccaacagaatccttcttgatagtttgcaggcaaaacaaatgtaatgttgcagatccgcaggcagaagctctgcccttctgtatcctatgtatgcagtgtgctttttcttgccagcttgggccattcttgcttagacagtcagcatttgtctcctcctttaactgagtcatcatcttagtccaactaatgcagtcgatacaatgcgtagatagaagaagccccacgggagccaggatgggactggtcgtgtttgtgcttttctccaagtcagcacccaaaggtcaatgcacagagaccccgggtgggtgagcgctggcttctcaaacggccgaagttgcctcttttaggaatctctttggaattgggagcacgatgactctgagtttgagctattaaagtacttcttacacattg

SEQ ID NO: 295260 - DNA, 1232 bp, Homo sapiens
aggagcgggacttcactgtgtccctgcgaaagactctcccgtggatgacggatgaggactctgggctgctggagtaggacactcaagacttttgactgccatttggttggttcagtgcgagactccctggccaacagaatccttcttgatagtttgcaggcaaaacaaatgtaatgttgcagggactacatccagaccgaggccatcatcaactatggaaactcgggaggcgcgttagtaaacctggacggtgaagtgattggaattaacactttgaaagtgacagctggaatctcctttgcaatcccatctgataagattaaaaagttcctcacggagtcccatgaccgacaggccaaaggaaaagccatcaccaagaagaagtatattggtatccgaatgatgtcactcacgtccagcaaagccaaagagctgaaggaccggcaccgggacttcccagacgtgatctcaggagcgtatataattgaagtaattcctgataccccagcagaagctggtggtctcaaggaaaacgacgtcataatcagcatcaatggacagtccgtggtctccgccaatgatgtcagcgacgtcattaaaagggaaagcaccctgaacatggtggtccgcaggggtaatgaagatatcatgatcacagtgattcccgaagaaattgacccataggcagaggcatgagctggacttcatgtttccctcaaagactctcccgtggatgacggatgaggactctgggctgctggaataggacactcaagacttttgactgccattttgtttgttcagtggagactccctggccaacagaatccttcttgatagtttgcaggcaaaacaaatgtaatgttgcagatccgcaggcagaagctctgcccttctgtatcctatgtatgcagtgtgctttttcttgccagcttgggccattcttgcttagacagtcagcatttgtctcctcctttaactgagtcatcatcttagtccaactaatgcagtcgatacaatgcgtagatagaagaagccccacgggagccaggatgggactggtcgtgtttgtgcttttctccaagtcagcacccaaaggtcaatgcacagagaccccgggtgggtgagcgctggcttctcaaacggccgaagttgcctcttttaggaatctctttggaattgggagcacgatgactctgagtttgagctattaaagtacttcttacacattg

SEQ ID NO: 295261 - DNA, 1773 bp, Homo sapiens
  misc_feature (1606)..(1606): n is a, c, g, or t
gcggccgcgcgcactcgcacccgctgcccccgaggccctcctgcactctccccggcgccgctctccggccctcgccctgtccgccgccaccgccgccgccgccagagtcgccatgcagatcccgcgcgccgctcttctcccgctgctgctgctgctgctggcggcgcccgcctcggcgcagctgtcccgggccggccgctcggcgcctttggccgccgggtgcccagaccgctgcgagccggcgcgctgcccgccgcagccggagcactgcgagggcggccgggcccgggacgcgtgcggctgctgcgaggtgtgcggcgcgcccgagggcgccgcgtgcggcctgcaggagggcccgtgcggcgaggggctgcagtgcgtggtgcccttcggggtgccagcctcggccacggtgcggcggcgcgcgcaggccggcctctgtgtgtgcgccagcagcgagccggtgtgcggcagcgacgccaacacctacgccaacctgtgccagctgcgcgccgccagccgccgctccgagaggctgcaccggccgccggtcatcgtcctgcagcgcggagcctgcggccaagggcaggaagatcccaacagtttgcgccataaatataactttatcgcggacgtggtggagaagatcgcccctgccgtggttcatatcgaattgtttcgcaagcttccgttttctaaacgagaggtgccggtggctagtgggtctgggtttattgtgtcggaagatggactgatcgtgacaaatgcccacgtggtgaccaacaagcaccgggtcaaagttgagctgaagaacggtgccacttacgaagccaaaatcaaggatgtggatgagaaagcagacatcgcactcatcaaaattgaccaccagggcaagctgcctgtcctgctgcttggccgctcctcagagctgcggccgggagagttcgtggtcgccatcggaagcccgttttcccttcaaaacacagtcaccaccgggatcgtgagcaccacccagcgaggcggcaaagagctggggctccgcaactcagacatggactacatccagaccgacgccatcatcaactatggaaactcgggaggcccgttagtaaacctggacggtgaagtgattggaattaacactttgaaagtgacagctggaatctcctttgcaatcccatctgataagattaaaaagttcctcacggagtcccatgaccgacaggccaaaggaaaagccatcaccaagaagaagtatattggtatccgaatgatgtcactcacgtccaggcaaagccaagagctgaaggacggcaccgggactttccagaagtgacatcagagacggaattatgaagtactccggtacccagaaaaagggggggctcaggaacggggactaacacacaagggcaccggggtcccgcaatgtttgggggcttaagggaagccccaaagtgggccgggtaagaaataatcaggaccccaaaagtacacgggggagggaggtctcccacacgcgaagagaagagggcaaacacaagacgagtggaggaccaccaattgaaggtcgcccctttttgtcacgatatatgtgatgcgtggncagccacgacagacagcgcgacgagaataaacgagtcgatgatagaaacacacaacgccacgacagtatgatagaacgaagatctgatactacaagaaataacgggtagcaactaagatatgcatcgaacaatcaaccagggatactgagcacaatgaggacactcc

SEQ ID NO: 295262 - DNA, 4625 bp, Homo sapiens
acgcgccggcggaggagtggcgcgcggaggagtggcgcgctgagacgccgctcgaagcgccgagtcgcggggcagcagaggcgtaaggagtaggcggggcgagccggctgggctcagggtccaccagctcacccgggtcgaggggcaatctgaggcgactggtgacgcgcttatccacttccctcctcccgcctccccccggggtggcgctcgctggtgacgtagtgagtgtgatggccgccgcgaggccgggaaggtgaagtcaggactggtggagtcaacacagtcaatcaatagccaacctcaacctgagacaggacagaagagaactcagaatctttttgtcttttggacttcagccatgtccatgatgcctaccctgtgaagatctctcaccatccaaaaaacgcaatgtccctgctcttctctcgatgcaactctatcgtcacagtcaagaaaaataagagacacatggctgaggtgaatgcatccccacttaagcactttgtcactgccaagaagaagatcaatggcatttttgagcagctgggggcctacatccaggagagcgccaccttccttgaagacacgtacaggaatgcagaactggaccccgttaccacagaagaacaggttctggacgtcaaaggttacctatccaaagtgagaggcatcagtgaggtgctggctcggaggcacatgaaagtggctttttttggccggacgagcaatgggaagagcaccgtgatcaatgccatgctctgggacaaagttctgccctctgggattggccacaccaccaattgcttcctgcgggtagagggcacagatggccatgaggcctttctccttaccgagggctcagaggaaaagaggagtgccaagactgtgaaccagctggcccatgccctccaccaggacaagcagctccatgccggcagcctagtgagtgtgatgtggcccaactctaagtgcccacttctgaaggatgacctcgttttgatggacagccctggtattgatgtcaccacagagctggacagctggattgacaagttttgtctggatgctgatgtgtttgtgctggtggccaactcagagtccaccctgatgcagacggaaaagcacttcttccacaaggtgagtgagcgtctctcccggccaaacatcttcatcctgaacaaccgctgggatgcatctgcctcagagcccgagtacatggaggaggtgcggcggcagcacatggagcgttgtaccagcttcctggtggatgagctgggcgtggtggatcgatcccaggccggggaccgcatcttctttgtgtctgctaaggaggtgctcaacgccaggattcagaaagcccagggcatgcctgaaggagggggcgctctcgcagaaggctttcaagtgaggatgtttgagtttcagaattttgagaggagatttgaggagtgcatctcccagtctgcagtgaagaccaagtttgagcagcacacggtccgggccaagcagattgcagaggcggttcgactcatcatggactccctgcacatggcggctcgggagcagcaggtttactgcgaggaaatgcgtgaagagcggcaagaccgactgaaatttattgacaaacagctggagctcttggctcaagactataagctgcgaattaagcagattacggaggaagtggagaggcaggtgtcgactgcaatggccgaggagatcaggcgcctctctgtactggtggacgattaccagatggacttccacccttctccagtagtcctcaaggtttataagaatgagctgcaccgccacatagaggaaggactgggtcgaaacatgtctgaccgctgctccacggccatcaccaactccctgcagaccatgcagcaggacatgatagatggcttgaaacccctccttcctgtgtctgtgcggagtcagatagacatgctggtcccacgccagtgcttctccctcaactatgacctaaactgtgacaagctgtgtgctgacttccaggaagacattgagttccatttctctctcggatggaccatgctggtgaataggttcctgggccccaagaacagccgtcgggccttgatgggctacaatgaccaggtccagcgtcccatccctctgacgccagccaaccccagcatgcccccactgccacagggctcgctcacccaggaggagttcatggtttccatggttaccggcctggcctccttgacatccaggacctccatgggcattcttgttgttggaggagtggtgtggaaggcagtgggctggcggctcattgccctctcctttgggctctatggcctcctctacgtctatgagcgtctgacctggaccaccaaggccaaggagagggccttcaagcgccagtttgtggagcatgccagcgagaagctgcagcttgtcatcagctacactggctccaactgcagccaccaagtccagcaggaactgtctgggacctttgctcatctgtgtcagcaagttgacgtcacccgggagaacctggagcaggaaattgccgccatgaacaagaaaattgaggttcttgactcacttcagagcaaagcaaagctgctcaggaataaagccggttggttggacagtgagctcaacatgttcacacaccagtacctgcagcccagcagatagtgggcacctgaggcggagtctgcgtggagaggggcggtgctgccagccctaagtgccgtgtgggctcccccaggggcacgtgtggctcctgccccctggccactgccaagagaatgaagcacccagtctcgtaccattttgagccctccagcactacttattttcccccacctttgcctgctgttgctggaagagctggctcatacccccaaaggacactttcagcgacagctatggacagcatggtaccaaggagttaagttgaggctttttccagctttctctggttcatttgattgcttgataaggcctcaggatctcagcattgcacaatgcctcatggaagcctttgagggtatcacacagacacccccaccttcctccagcctgtgcgcacctgccctccttgcagcccagcacacctgcaggtgtaagggacgattggagtttcttcccagagagtctgtcccagaaggactgtggcttgtgtgtgtccatctcgcctgttggctcagtgcttcatcccatttgcagagcctcagacacgtcttggtggtgaggctcagttacccctgggcttaggctgaggcgggccctgtgctgggggtggtagaaaggatgctgctgaggcagctggaggagtgggagtagctcagaggggagggctgttggatgtatggggagctggcagagcaggtggcagtcactgggacaaggagggacttgcctctcttctcattattgtgtcctttgctttagtgtcagtcctggacttgtgcaggcctgttttgtgtagatctgttttggaagatggcatggtctaggtggttgaaggatgtagtagaaggatggatggtggaaggtggggacgttggtggctggctgaggtgcatgggccccacacaggacagctggagaatgggccgtccacttggcctcgttctgcgaggggctcatgggtctgagagcccccacccactaggcttgattgcatccctgttgtgccctttaagagacatgtttccaccccacccccaaccttgtcccaagtgccctggactaaatttcctgtgccagtgactgcagttggccaagggacaatgtggaaaacccagtgtccatctttccaccctccctgatctccagaaccttcgactgacccccttgtctttatgctgatgttgagttttgggattgttactggttgaagtgggggcagatgcctgtcaccaaggtgttgactgtgtgagaaaagcagtttgggtgacaaatcctgtgtggcacaagttggatcgcttcctagaaataagcaacacctctcccaaaaagcagcccacaaggcaggggcccagcagcccagccatcactcatctttgaggaaatgagttggtagcctctgtgcactgtttggtggccacatcacaggtgatgtcctgttcacatacctgcttgtatttaaagccctcagtctgtcctgttgtgtggggcgaagtgatggactctgccaggtggacatgctgtgggtggatgttcccggcgtgtgccgggcctgaatggacaggggccacttcacagcatgtcagggaaaatcactgtcacacaattccaatggattttgtgctctttttgaaaaaaaaaaattctttagcgtaaacatgaattttttttcaatgtagcccctggggaatgaatgaaattttgagcttcttcaatacgtaaaattaaatttataccactgagggagagaccctttctgaaagaagtatggccaaaagcactttaatgctgctgacattgttgtttttatgttcatttgctggagcgcaagacgtgctgacacagtgagttttctctgatgtatttaaggtgatgtatttgcttgagttactcctgtatcattgctcataatattggaaactaaaataaaacctagttggaaa

SEQ ID NO: 295263 - DNA, 1912 bp, Homo sapiens
acgcgccggcggaggagtggcgcgcggaggagtggcgcgctgagacgccgctcgaagcgccgagtcgcggggcagcagaggcgtaaggagtaggcggggcgagccggctgggctcagggtccaccagctcacccgggtcgaggggcaatctgaggcgactggtgacgcgcttatccacttccctcctcccgcctccccccggggtggcgctcgctggtgacgtagtgagtgtgatggccgccgcgaggccgggaaggtgaagtcaggactggtggagtcaacacagtcaatcaatagccaacctcaacctgagacaggacagaagagaactcagaatctttttgtcttttggacttcagccatgtccatgatgcctaccctgtgaagatctctcaccatccaaaaaacgcaatgtccctgctcttctctcgatgcaactctatcgtcacagtcaagaaaaataagagacacatggctgaggtgaatgcatccccacttaagcactttgtcactgccaagaagaagatcaatggcatttttgagcagctgggggcggggcgctctcgcagaaggctttcaagtgaggatgtttgagtttcagaattttgagaggagatttgaggagtgcatctcccagtctgcagtgaagaccaagtttgagcagcacacggtccgggccaagcagattgcagaggcggttcgactcatcatggactccctgcacatggcggctcgggagcagcaggtttactgcgaggaaatgcgtgaagagcggcaagaccgactgaaatttattgacaaacagctggagctcttggctcaagactataagctgcgaattaagcagattacggaggaagtggagaggcaggtgtcgactgcaatggccgaggagatcaggcgcctctctgtactggtggacgattaccagatggacttccacccttctccagtagtcctcaaggtttataagaatgagctgcaccgccacatagaggaaggactgggtcgaaacatgtctgaccgctgctccacggccatcaccaactccctgcagaccatgcagcaggacatgatagatggcttgaaacccctccttcctgtgtctgtgcggagtcagatagacatgctggtcccacgccagtgcttctccctcaactatgacctaaactgtgacaagctgtgtgctgacttccaggaagacattgagttccatttctctctcggatggaccatgctggtgaataggttcctgggccccaagaacagccgtcgggccttgatgggctacaatgaccaggtccagcgtcccatccctctgacgccagccaaccccagcatgcccccactgccacagggctcgctcacccaggaggagttcatggtttccatggttaccggcctggcctccttgacatccaggacctccatgggcattcttgttgttggaggagtggtgtggaaggcagtgggctggcggctcattgccctctcctttgggctctatggcctcctctacgtctatgagcgtctgacctggaccaccaaggccaaggagagggccttcaagcgccagtttgtggagcatgccagcgagaagctgcagcttgtcatcagctacactggctccaactgcagccaccaagtccagcaggaactgtctgggacctttgctcatctgtgtcagcaagttgacgtcacccgggagaacgggagagaccctttctgaaagaagtatggccaaaagcactttaatgctgctgacattgttgtttttatgttcatttgctggagcgcaagacgtgctgacacagtgagttttctctgatgtatttaaggtgatgtatttgcttgagttactcctgtatcattgctcataatattggaaactaaaataaaacctagttggaaa

SEQ ID NO: 295264 - DNA, 1034 bp, Homo sapiens
acgcgccggcggaggagtggcgcgcggaggagtggcgcgctgagacgccgctcgaagcgccgagtcgcggggcagcagaggcgtaaggagtaggcggggcgagccggctgggctcagggtccaccagctcacccgggtcgaggggcaatctgaggcgactgcgcaatgtccctgctcttctctcgatgcaactctatcgtcacagtcaagaaaaataagagacacatggctgaggtgaatgcatccccacttaagcactttgtcactgccaagaagaagatcaatggcatttttgagcagctgggggcctacatccaggagagcgccaccttccttgaagacacgtacaggaatgcagaactggaccccgttaccacagaagaacaggttctggacgtcaaaggttacctatccaaagtgagaggcatcagtgaggtgctggctcggaggcacatgaaagtggctttttttggccggacgagcaatgggaagagcaccgtgatcaatgccatgctctgggacaaagttctgccctctgggattggccacaccaccaattgcttcctgcgggtagagggcacagatggccatgaggcctttctccttaccgagggctcagaggaaaagaggagtgccaagactgtgaaccagctggcccatgccctccaccaggacaagcagctccatgccggcagcctagtgagtgtgatgtggcccaactctaagtgcccacttctgaaggatgacctcgttttgatggacagccctggtattgatgtcaccacagagctggacagctggattgacaagttttgtctggatgctgatgtgtttgtgctggtggccaactcagagtccaccctgatgcagacggaaaagcacttcttccacaaggtgagtgagcgtctctcccggccaaacatcttcatcctgaacaaccgctgggatgcatctgcctcagagcccgagtacatggaggagggacggggagacatggagggtgaacattctgggataaagggatggggatgtca

SEQ ID NO: 295265 - DNA, 4812 bp, Homo sapiens
tcaagtattccagccctctgtcccacagaatagagaattaagtgagatactttacagtagctgaacacattggctttcagtcagttcttctgttcctcaatagtcagctgttccacagtcctcaagcccagttttgttcctagttttgctctgtcctcttctcccctctctggatgtacctttcccagggctcctgcagggacctccgtggtgcctcaaacccgcacatggcggaatacgtgtgcacagtcaggattggtcccacacctctgcgtttttttccccagggcacttcctcacatgccagcgcaactccccaatacctcaatgagtaagcttccctcagggatgagtttgtttggcttgaaacctgattagacatgttttgtacaccagtgttttttttttttggacaccggatccatctcccttttcggttttctaataagtcaggactggtggagtcaacacagtcaatcaatagccaacctcaacctgagacaggacagaagagaactcagaatctttttgtcttttggacttcagccatgtccatgatgcctaccctgtgaagatctctcaccatccaaaaaacgcaatgtccctgctcttctctcgatgcaactctatcgtcacagtcaagaaaaataagagacacatggctgaggtgaatgcatccccacttaagcactttgtcactgccaagaagaagatcaatggcatttttgagcagctgggggcctacatccaggagagcgccaccttccttgaagacacgtacaggaatgcagaactggaccccgttaccacagaagaacaggttctggacgtcaaaggttacctatccaaagtgagaggcatcagtgaggtgctggctcggaggcacatgaaagtggctttttttggccggacgagcaatgggaagagcaccgtgatcaatgccatgctctgggacaaagttctgccctctgggattggccacaccaccaattgcttcctgcgggtagagggcacagatggccatgaggcctttctccttaccgagggctcagaggaaaagaggagtgccaagactgtgaaccagctggcccatgccctccaccaggacaagcagctccatgccggcagcctagtgagtgtgatgtggcccaactctaagtgcccacttctgaaggatgacctcgttttgatggacagccctggtattgatgtcaccacagagctggacagctggattgacaagttttgtctggatgctgatgtgtttgtgctggtggccaactcagagtccaccctgatgcagacggaaaagcacttcttccacaaggtgagtgagcgtctctcccggccaaacatcttcatcctgaacaaccgctgggatgcatctgcctcagagcccgagtacatggaggaggtgcggcggcagcacatggagcgttgtaccagcttcctggtggatgagctgggcgtggtggatcgatcccaggccggggaccgcatcttctttgtgtctgctaaggaggtgctcaacgccaggattcagaaagcccagggcatgcctgaaggagggggcgctctcgcagaaggctttcaagtgaggatgtttgagtttcagaattttgagaggagatttgaggagtgcatctcccagtctgcagtgaagaccaagtttgagcagcacacggtccgggccaagcagattgcagaggcggttcgactcatcatggactccctgcacatggcggctcgggagcagcaggtttactgcgaggaaatgcgtgaagagcggcaagaccgactgaaatttattgacaaacagctggagctcttggctcaagactataagctgcgaattaagcagattacggaggaagtggagaggcaggtgtcgactgcaatggccgaggagatcaggcgcctctctgtactggtggacgattaccagatggacttccacccttctccagtagtcctcaaggtttataagaatgagctgcaccgccacatagaggaaggactgggtcgaaacatgtctgaccgctgctccacggccatcaccaactccctgcagaccatgcagcaggacatgatagatggcttgaaacccctccttcctgtgtctgtgcggagtcagatagacatgctggtcccacgccagtgcttctccctcaactatgacctaaactgtgacaagctgtgtgctgacttccaggaagacattgagttccatttctctctcggatggaccatgctggtgaataggttcctgggccccaagaacagccgtcgggccttgatgggctacaatgaccaggtccagcgtcccatccctctgacgccagccaaccccagcatgcccccactgccacagggctcgctcacccaggaggagttcatggtttccatggttaccggcctggcctccttgacatccaggacctccatgggcattcttgttgttggaggagtggtgtggaaggcagtgggctggcggctcattgccctctcctttgggctctatggcctcctctacgtctatgagcgtctgacctggaccaccaaggccaaggagagggccttcaagcgccagtttgtggagcatgccagcgagaagctgcagcttgtcatcagctacactggctccaactgcagccaccaagtccagcaggaactgtctgggacctttgctcatctgtgtcagcaagttgacgtcacccgggagaacctggagcaggaaattgccgccatgaacaagaaaattgaggttcttgactcacttcagagcaaagcaaagctgctcaggaataaagccggttggttggacagtgagctcaacatgttcacacaccagtacctgcagcccagcagatagtgggcacctgaggcggagtctgcgtggagaggggcggtgctgccagccctaagtgccgtgtgggctcccccaggggcacgtgtggctcctgccccctggccactgccaagagaatgaagcacccagtctcgtaccattttgagccctccagcactacttattttcccccacctttgcctgctgttgctggaagagctggctcatacccccaaaggacactttcagcgacagctatggacagcatggtaccaaggagttaagttgaggctttttccagctttctctggttcatttgattgcttgataaggcctcaggatctcagcattgcacaatgcctcatggaagcctttgagggtatcacacagacacccccaccttcctccagcctgtgcgcacctgccctccttgcagcccagcacacctgcaggtgtaagggacgattggagtttcttcccagagagtctgtcccagaaggactgtggcttgtgtgtgtccatctcgcctgttggctcagtgcttcatcccatttgcagagcctcagacacgtcttggtggtgaggctcagttacccctgggcttaggctgaggcgggccctgtgctgggggtggtagaaaggatgctgctgaggcagctggaggagtgggagtagctcagaggggagggctgttggatgtatggggagctggcagagcaggtggcagtcactgggacaaggagggacttgcctctcttctcattattgtgtcctttgctttagtgtcagtcctggacttgtgcaggcctgttttgtgtagatctgttttggaagatggcatggtctaggtggttgaaggatgtagtagaaggatggatggtggaaggtggggacgttggtggctggctgaggtgcatgggccccacacaggacagctggagaatgggccgtccacttggcctcgttctgcgaggggctcatgggtctgagagcccccacccactaggcttgattgcatccctgttgtgccctttaagagacatgtttccaccccacccccaaccttgtcccaagtgccctggactaaatttcctgtgccagtgactgcagttggccaagggacaatgtggaaaacccagtgtccatctttccaccctccctgatctccagaaccttcgactgacccccttgtctttatgctgatgttgagttttgggattgttactggttgaagtgggggcagatgcctgtcaccaaggtgttgactgtgtgagaaaagcagtttgggtgacaaatcctgtgtggcacaagttggatcgcttcctagaaataagcaacacctctcccaaaaagcagcccacaaggcaggggcccagcagcccagccatcactcatctttgaggaaatgagttggtagcctctgtgcactgtttggtggccacatcacaggtgatgtcctgttcacatacctgcttgtatttaaagccctcagtctgtcctgttgtgtggggcgaagtgatggactctgccaggtggacatgctgtgggtggatgttcccggcgtgtgccgggcctgaatggacaggggccacttcacagcatgtcagggaaaatcactgtcacacaattccaatggattttgtgctctttttgaaaaaaaaaaattctttagcgtaaacatgaattttttttcaatgtagcccctggggaatgaatgaaattttgagcttcttcaatacgtaaaattaaatttataccactgagggagagaccctttctgaaagaagtatggccaaaagcactttaatgctgctgacattgttgtttttatgttcatttgctggagcgcaagacgtgctgacacagtgagttttctctgatgtatttaaggtgatgtatttgcttgagttactcctgtatcattgctcataatattggaaactaaaataaaacctagttggaaa

SEQ ID NO: 295266 - DNA, 4880 bp, Homo sapiens
tcaagtattccagccctctgtcccacagaatagagaattaagtgagatactttacagtagctgaacacattggctttcagtcagttcttctgttcctcaatagtcagctgttccacagtcctcaagcccagttttgttcctagttttgctctgtcctcttctcccctctctggatgtacctttcccagggctcctgcagggacctccgtggtgcctcaaacccgcacatggcggaatacgtgtgcacagtcaggattggtcccacacctctgcgtttttttccccagggcacttcctcacatgccagcgcaactccccaatacctcaatgagtaagcttccctcagggatgagtttgtttggcttgaaacctgattagacatgttttgtacaccagtgttttttttttttggacaccggatccatctcccttttcggttttctaataagtcaggactggtggagtcaacacagtcaatcaatagccaacctcaacctgagacaggacagaagagaactcagaatctttttgtcttttggacttcagccatgtccatgatgcctaccctgtgaagatctctcaccatccaaaaaattgtgccagcagacgatccgtggatccattttattttccctgctaggagttgctgtacataacactggcgcaatgtccctgctcttctctcgatgcaactctatcgtcacagtcaagaaaaataagagacacatggctgaggtgaatgcatccccacttaagcactttgtcactgccaagaagaagatcaatggcatttttgagcagctgggggcctacatccaggagagcgccaccttccttgaagacacgtacaggaatgcagaactggaccccgttaccacagaagaacaggttctggacgtcaaaggttacctatccaaagtgagaggcatcagtgaggtgctggctcggaggcacatgaaagtggctttttttggccggacgagcaatgggaagagcaccgtgatcaatgccatgctctgggacaaagttctgccctctgggattggccacaccaccaattgcttcctgcgggtagagggcacagatggccatgaggcctttctccttaccgagggctcagaggaaaagaggagtgccaagactgtgaaccagctggcccatgccctccaccaggacaagcagctccatgccggcagcctagtgagtgtgatgtggcccaactctaagtgcccacttctgaaggatgacctcgttttgatggacagccctggtattgatgtcaccacagagctggacagctggattgacaagttttgtctggatgctgatgtgtttgtgctggtggccaactcagagtccaccctgatgcagacggaaaagcacttcttccacaaggtgagtgagcgtctctcccggccaaacatcttcatcctgaacaaccgctgggatgcatctgcctcagagcccgagtacatggaggaggtgcggcggcagcacatggagcgttgtaccagcttcctggtggatgagctgggcgtggtggatcgatcccaggccggggaccgcatcttctttgtgtctgctaaggaggtgctcaacgccaggattcagaaagcccagggcatgcctgaaggagggggcgctctcgcagaaggctttcaagtgaggatgtttgagtttcagaattttgagaggagatttgaggagtgcatctcccagtctgcagtgaagaccaagtttgagcagcacacggtccgggccaagcagattgcagaggcggttcgactcatcatggactccctgcacatggcggctcgggagcagcaggtttactgcgaggaaatgcgtgaagagcggcaagaccgactgaaatttattgacaaacagctggagctcttggctcaagactataagctgcgaattaagcagattacggaggaagtggagaggcaggtgtcgactgcaatggccgaggagatcaggcgcctctctgtactggtggacgattaccagatggacttccacccttctccagtagtcctcaaggtttataagaatgagctgcaccgccacatagaggaaggactgggtcgaaacatgtctgaccgctgctccacggccatcaccaactccctgcagaccatgcagcaggacatgatagatggcttgaaacccctccttcctgtgtctgtgcggagtcagatagacatgctggtcccacgccagtgcttctccctcaactatgacctaaactgtgacaagctgtgtgctgacttccaggaagacattgagttccatttctctctcggatggaccatgctggtgaataggttcctgggccccaagaacagccgtcgggccttgatgggctacaatgaccaggtccagcgtcccatccctctgacgccagccaaccccagcatgcccccactgccacagggctcgctcacccaggaggagttcatggtttccatggttaccggcctggcctccttgacatccaggacctccatgggcattcttgttgttggaggagtggtgtggaaggcagtgggctggcggctcattgccctctcctttgggctctatggcctcctctacgtctatgagcgtctgacctggaccaccaaggccaaggagagggccttcaagcgccagtttgtggagcatgccagcgagaagctgcagcttgtcatcagctacactggctccaactgcagccaccaagtccagcaggaactgtctgggacctttgctcatctgtgtcagcaagttgacgtcacccgggagaacctggagcaggaaattgccgccatgaacaagaaaattgaggttcttgactcacttcagagcaaagcaaagctgctcaggaataaagccggttggttggacagtgagctcaacatgttcacacaccagtacctgcagcccagcagatagtgggcacctgaggcggagtctgcgtggagaggggcggtgctgccagccctaagtgccgtgtgggctcccccaggggcacgtgtggctcctgccccctggccactgccaagagaatgaagcacccagtctcgtaccattttgagccctccagcactacttattttcccccacctttgcctgctgttgctggaagagctggctcatacccccaaaggacactttcagcgacagctatggacagcatggtaccaaggagttaagttgaggctttttccagctttctctggttcatttgattgcttgataaggcctcaggatctcagcattgcacaatgcctcatggaagcctttgagggtatcacacagacacccccaccttcctccagcctgtgcgcacctgccctccttgcagcccagcacacctgcaggtgtaagggacgattggagtttcttcccagagagtctgtcccagaaggactgtggcttgtgtgtgtccatctcgcctgttggctcagtgcttcatcccatttgcagagcctcagacacgtcttggtggtgaggctcagttacccctgggcttaggctgaggcgggccctgtgctgggggtggtagaaaggatgctgctgaggcagctggaggagtgggagtagctcagaggggagggctgttggatgtatggggagctggcagagcaggtggcagtcactgggacaaggagggacttgcctctcttctcattattgtgtcctttgctttagtgtcagtcctggacttgtgcaggcctgttttgtgtagatctgttttggaagatggcatggtctaggtggttgaaggatgtagtagaaggatggatggtggaaggtggggacgttggtggctggctgaggtgcatgggccccacacaggacagctggagaatgggccgtccacttggcctcgttctgcgaggggctcatgggtctgagagcccccacccactaggcttgattgcatccctgttgtgccctttaagagacatgtttccaccccacccccaaccttgtcccaagtgccctggactaaatttcctgtgccagtgactgcagttggccaagggacaatgtggaaaacccagtgtccatctttccaccctccctgatctccagaaccttcgactgacccccttgtctttatgctgatgttgagttttgggattgttactggttgaagtgggggcagatgcctgtcaccaaggtgttgactgtgtgagaaaagcagtttgggtgacaaatcctgtgtggcacaagttggatcgcttcctagaaataagcaacacctctcccaaaaagcagcccacaaggcaggggcccagcagcccagccatcactcatctttgaggaaatgagttggtagcctctgtgcactgtttggtggccacatcacaggtgatgtcctgttcacatacctgcttgtatttaaagccctcagtctgtcctgttgtgtggggcgaagtgatggactctgccaggtggacatgctgtgggtggatgttcccggcgtgtgccgggcctgaatggacaggggccacttcacagcatgtcagggaaaatcactgtcacacaattccaatggattttgtgctctttttgaaaaaaaaaaattctttagcgtaaacatgaattttttttcaatgtagcccctggggaatgaatgaaattttgagcttcttcaatacgtaaaattaaatttataccactgagggagagaccctttctgaaagaagtatggccaaaagcactttaatgctgctgacattgttgtttttatgttcatttgctggagcgcaagacgtgctgacacagtgagttttctctgatgtatttaaggtgatgtatttgcttgagttactcctgtatcattgctcataatattggaaactaaaataaaacctagttggaaa

SEQ ID NO: 295267 - DNA, 4480 bp, Homo sapiens
acgcgccggcggaggagtggcgcgcggaggagtggcgcgctgagacgccgctcgaagcgccgagtcgcggggcagcagaggcgtaaggagtaggcggggcgagccggctgggctcagggtccaccagctcacccgggtcgaggggcaatctgaggcgactggtgacgcgcttatccacttccctcctcccgcctccccccggggtggcgctcgctggtgacgtagtgagtgtgatggccgccgcgaggccgggaaggtgaagcgcaatgtccctgctcttctctcgatgcaactctatcgtcacagtcaagaaaaataagagacacatggctgaggtgaatgcatccccacttaagcactttgtcactgccaagaagaagatcaatggcatttttgagcagctgggggcctacatccaggagagcgccaccttccttgaagacacgtacaggaatgcagaactggaccccgttaccacagaagaacaggttctggacgtcaaaggttacctatccaaagtgagaggcatcagtgaggtgctggctcggaggcacatgaaagtggctttttttggccggacgagcaatgggaagagcaccgtgatcaatgccatgctctgggacaaagttctgccctctgggattggccacaccaccaattgcttcctgcgggtagagggcacagatggccatgaggcctttctccttaccgagggctcagaggaaaagaggagtgccaagactgtgaaccagctggcccatgccctccaccaggacaagcagctccatgccggcagcctagtgagtgtgatgtggcccaactctaagtgcccacttctgaaggatgacctcgttttgatggacagccctggtattgatgtcaccacagagctggacagctggattgacaagttttgtctggatgctgatgtgtttgtgctggtggccaactcagagtccaccctgatgcagacggaaaagcacttcttccacaaggtgagtgagcgtctctcccggccaaacatcttcatcctgaacaaccgctgggatgcatctgcctcagagcccgagtacatggaggaggtgcggcggcagcacatggagcgttgtaccagcttcctggtggatgagctgggcgtggtggatcgatcccaggccggggaccgcatcttctttgtgtctgctaaggaggtgctcaacgccaggattcagaaagcccagggcatgcctgaaggagggggcgctctcgcagaaggctttcaagtgaggatgtttgagtttcagaattttgagaggagatttgaggagtgcatctcccagtctgcagtgaagaccaagtttgagcagcacacggtccgggccaagcagattgcagaggcggttcgactcatcatggactccctgcacatggcggctcgggagcagcaggtttactgcgaggaaatgcgtgaagagcggcaagaccgactgaaatttattgacaaacagctggagctcttggctcaagactataagctgcgaattaagcagattacggaggaagtggagaggcaggtgtcgactgcaatggccgaggagatcaggcgcctctctgtactggtggacgattaccagatggacttccacccttctccagtagtcctcaaggtttataagaatgagctgcaccgccacatagaggaaggactgggtcgaaacatgtctgaccgctgctccacggccatcaccaactccctgcagaccatgcagcaggacatgatagatggcttgaaacccctccttcctgtgtctgtgcggagtcagatagacatgctggtcccacgccagtgcttctccctcaactatgacctaaactgtgacaagctgtgtgctgacttccaggaagacattgagttccatttctctctcggatggaccatgctggtgaataggttcctgggccccaagaacagccgtcgggccttgatgggctacaatgaccaggtccagcgtcccatccctctgacgccagccaaccccagcatgcccccactgccacagggctcgctcacccaggaggagttcatggtttccatggttaccggcctggcctccttgacatccaggacctccatgggcattcttgttgttggaggagtggtgtggaaggcagtgggctggcggctcattgccctctcctttgggctctatggcctcctctacgtctatgagcgtctgacctggaccaccaaggccaaggagagggccttcaagcgccagtttgtggagcatgccagcgagaagctgcagcttgtcatcagctacactggctccaactgcagccaccaagtccagcaggaactgtctgggacctttgctcatctgtgtcagcaagttgacgtcacccgggagaacctggagcaggaaattgccgccatgaacaagaaaattgaggttcttgactcacttcagagcaaagcaaagctgctcaggaataaagccggttggttggacagtgagctcaacatgttcacacaccagtacctgcagcccagcagatagtgggcacctgaggcggagtctgcgtggagaggggcggtgctgccagccctaagtgccgtgtgggctcccccaggggcacgtgtggctcctgccccctggccactgccaagagaatgaagcacccagtctcgtaccattttgagccctccagcactacttattttcccccacctttgcctgctgttgctggaagagctggctcatacccccaaaggacactttcagcgacagctatggacagcatggtaccaaggagttaagttgaggctttttccagctttctctggttcatttgattgcttgataaggcctcaggatctcagcattgcacaatgcctcatggaagcctttgagggtatcacacagacacccccaccttcctccagcctgtgcgcacctgccctccttgcagcccagcacacctgcaggtgtaagggacgattggagtttcttcccagagagtctgtcccagaaggactgtggcttgtgtgtgtccatctcgcctgttggctcagtgcttcatcccatttgcagagcctcagacacgtcttggtggtgaggctcagttacccctgggcttaggctgaggcgggccctgtgctgggggtggtagaaaggatgctgctgaggcagctggaggagtgggagtagctcagaggggagggctgttggatgtatggggagctggcagagcaggtggcagtcactgggacaaggagggacttgcctctcttctcattattgtgtcctttgctttagtgtcagtcctggacttgtgcaggcctgttttgtgtagatctgttttggaagatggcatggtctaggtggttgaaggatgtagtagaaggatggatggtggaaggtggggacgttggtggctggctgaggtgcatgggccccacacaggacagctggagaatgggccgtccacttggcctcgttctgcgaggggctcatgggtctgagagcccccacccactaggcttgattgcatccctgttgtgccctttaagagacatgtttccaccccacccccaaccttgtcccaagtgccctggactaaatttcctgtgccagtgactgcagttggccaagggacaatgtggaaaacccagtgtccatctttccaccctccctgatctccagaaccttcgactgacccccttgtctttatgctgatgttgagttttgggattgttactggttgaagtgggggcagatgcctgtcaccaaggtgttgactgtgtgagaaaagcagtttgggtgacaaatcctgtgtggcacaagttggatcgcttcctagaaataagcaacacctctcccaaaaagcagcccacaaggcaggggcccagcagcccagccatcactcatctttgaggaaatgagttggtagcctctgtgcactgtttggtggccacatcacaggtgatgtcctgttcacatacctgcttgtatttaaagccctcagtctgtcctgttgtgtggggcgaagtgatggactctgccaggtggacatgctgtgggtggatgttcccggcgtgtgccgggcctgaatggacaggggccacttcacagcatgtcagggaaaatcactgtcacacaattccaatggattttgtgctctttttgaaaaaaaaaaattctttagcgtaaacatgaattttttttcaatgtagcccctggggaatgaatgaaattttgagcttcttcaatacgtaaaattaaatttataccactgagggagagaccctttctgaaagaagtatggccaaaagcactttaatgctgctgacattgttgtttttatgttcatttgctggagcgcaagacgtgctgacacagtgagttttctctgatgtatttaaggtgatgtatttgcttgagttactcctgtatcattgctcataatattggaaactaaaataaaacctagttggaaa

SEQ ID NO: 295268 - DNA, 4810 bp, Homo sapiens
acgcgccggcggaggagtggcgcgcggaggagtggcgcgctgagacgccgctcgaagcgccgagtcgcggggcagcagaggcgtaaggagtaggcggggcgagccggctgggctcagggtccaccagctcacccgggtcgaggggcaatctgaggcgactggtgacgcgcttatccacttccctcctcccgcctccccccggggtggcgctcgctggtgacgtagtgagtgtgatggccgccgcgaggccgggaaggtgaagtcaggactggtggagtcaacacagtcaatcaatagccaacctcaacctgagacaggacagaagagaactcagaatctttttgtcttttggacttcagccatgtccatgatgcctaccctgtgaagatctctcaccatccaaaaaacgcaatgtccctgctcttctctcgatgcaactctatcgtcacagtcaagaaaaataagagacacatggctgaggtgaatgcatccccacttaagcactttgtcactgccaagaagaagatcaatggcatttttgagcagctgggggcctacatccaggagagcgccaccttccttgaaggaaactaagacccagaaaggttcttttgcttgaggccacagagctagaaagtggtaagaaccagcttcagaaccaggcagtgttgctcctgagccatcttcttaaccaccacaccgtggggccaccatagaggatctggagctcagcctgtcggctgcagggtgccagaggtggactcgtttaggacacgtacaggaatgcagaactggaccccgttaccacagaagaacaggttctggacgtcaaaggttacctatccaaagtgagaggcatcagtgaggtgctggctcggaggcacatgaaagtggctttttttggccggacgagcaatgggaagagcaccgtgatcaatgccatgctctgggacaaagttctgccctctgggattggccacaccaccaattgcttcctgcgggtagagggcacagatggccatgaggcctttctccttaccgagggctcagaggaaaagaggagtgccaagactgtgaaccagctggcccatgccctccaccaggacaagcagctccatgccggcagcctagtgagtgtgatgtggcccaactctaagtgcccacttctgaaggatgacctcgttttgatggacagccctggtattgatgtcaccacagagctggacagctggattgacaagttttgtctggatgctgatgtgtttgtgctggtggccaactcagagtccaccctgatgcagacggaaaagcacttcttccacaaggtgagtgagcgtctctcccggccaaacatcttcatcctgaacaaccgctgggatgcatctgcctcagagcccgagtacatggaggaggtgcggcggcagcacatggagcgttgtaccagcttcctggtggatgagctgggcgtggtggatcgatcccaggccggggaccgcatcttctttgtgtctgctaaggaggtgctcaacgccaggattcagaaagcccagggcatgcctgaaggagggggcgctctcgcagaaggctttcaagtgaggatgtttgagtttcagaattttgagaggagatttgaggagtgcatctcccagtctgcagtgaagaccaagtttgagcagcacacggtccgggccaagcagattgcagaggcggttcgactcatcatggactccctgcacatggcggctcgggagcagcaggtttactgcgaggaaatgcgtgaagagcggcaagaccgactgaaatttattgacaaacagctggagctcttggctcaagactataagctgcgaattaagcagattacggaggaagtggagaggcaggtgtcgactgcaatggccgaggagatcaggcgcctctctgtactggtggacgattaccagatggacttccacccttctccagtagtcctcaaggtttataagaatgagctgcaccgccacatagaggaaggactgggtcgaaacatgtctgaccgctgctccacggccatcaccaactccctgcagaccatgcagcaggacatgatagatggcttgaaacccctccttcctgtgtctgtgcggagtcagatagacatgctggtcccacgccagtgcttctccctcaactatgacctaaactgtgacaagctgtgtgctgacttccaggaagacattgagttccatttctctctcggatggaccatgctggtgaataggttcctgggccccaagaacagccgtcgggccttgatgggctacaatgaccaggtccagcgtcccatccctctgacgccagccaaccccagcatgcccccactgccacagggctcgctcacccaggaggagttcatggtttccatggttaccggcctggcctccttgacatccaggacctccatgggcattcttgttgttggaggagtggtgtggaaggcagtgggctggcggctcattgccctctcctttgggctctatggcctcctctacgtctatgagcgtctgacctggaccaccaaggccaaggagagggccttcaagcgccagtttgtggagcatgccagcgagaagctgcagcttgtcatcagctacactggctccaactgcagccaccaagtccagcaggaactgtctgggacctttgctcatctgtgtcagcaagttgacgtcacccgggagaacctggagcaggaaattgccgccatgaacaagaaaattgaggttcttgactcacttcagagcaaagcaaagctgctcaggaataaagccggttggttggacagtgagctcaacatgttcacacaccagtacctgcagcccagcagatagtgggcacctgaggcggagtctgcgtggagaggggcggtgctgccagccctaagtgccgtgtgggctcccccaggggcacgtgtggctcctgccccctggccactgccaagagaatgaagcacccagtctcgtaccattttgagccctccagcactacttattttcccccacctttgcctgctgttgctggaagagctggctcatacccccaaaggacactttcagcgacagctatggacagcatggtaccaaggagttaagttgaggctttttccagctttctctggttcatttgattgcttgataaggcctcaggatctcagcattgcacaatgcctcatggaagcctttgagggtatcacacagacacccccaccttcctccagcctgtgcgcacctgccctccttgcagcccagcacacctgcaggtgtaagggacgattggagtttcttcccagagagtctgtcccagaaggactgtggcttgtgtgtgtccatctcgcctgttggctcagtgcttcatcccatttgcagagcctcagacacgtcttggtggtgaggctcagttacccctgggcttaggctgaggcgggccctgtgctgggggtggtagaaaggatgctgctgaggcagctggaggagtgggagtagctcagaggggagggctgttggatgtatggggagctggcagagcaggtggcagtcactgggacaaggagggacttgcctctcttctcattattgtgtcctttgctttagtgtcagtcctggacttgtgcaggcctgttttgtgtagatctgttttggaagatggcatggtctaggtggttgaaggatgtagtagaaggatggatggtggaaggtggggacgttggtggctggctgaggtgcatgggccccacacaggacagctggagaatgggccgtccacttggcctcgttctgcgaggggctcatgggtctgagagcccccacccactaggcttgattgcatccctgttgtgccctttaagagacatgtttccaccccacccccaaccttgtcccaagtgccctggactaaatttcctgtgccagtgactgcagttggccaagggacaatgtggaaaacccagtgtccatctttccaccctccctgatctccagaaccttcgactgacccccttgtctttatgctgatgttgagttttgggattgttactggttgaagtgggggcagatgcctgtcaccaaggtgttgactgtgtgagaaaagcagtttgggtgacaaatcctgtgtggcacaagttggatcgcttcctagaaataagcaacacctctcccaaaaagcagcccacaaggcaggggcccagcagcccagccatcactcatctttgaggaaatgagttggtagcctctgtgcactgtttggtggccacatcacaggtgatgtcctgttcacatacctgcttgtatttaaagccctcagtctgtcctgttgtgtggggcgaagtgatggactctgccaggtggacatgctgtgggtggatgttcccggcgtgtgccgggcctgaatggacaggggccacttcacagcatgtcagggaaaatcactgtcacacaattccaatggattttgtgctctttttgaaaaaaaaaaattctttagcgtaaacatgaattttttttcaatgtagcccctggggaatgaatgaaattttgagcttcttcaatacgtaaaattaaatttataccactgagggagagaccctttctgaaagaagtatggccaaaagcactttaatgctgctgacattgttgtttttatgttcatttgctggagcgcaagacgtgctgacacagtgagttttctctgatgtatttaaggtgatgtatttgcttgagttactcctgtatcattgctcataatattggaaactaaaataaaacctagttggaaa

SEQ ID NO: 295269 - DNA, 3895 bp, Homo sapiens
gtgagccgagatcgtgccattgcactccagcccgggcgacagagcaagactctatatccaaaaacaaaacaaaacaaaacaaaacactcatttccaggcaatctggaaggataggaaatgggaagtaaaatccgttaatgagggccaggcctgatttctctcccgtccctggctttctcctccatgacctgcctgcctcacaagtcccaggtctgttctcagcaggaagaatagggctcctgctctgcctgatgatttggtttacccctgtcacctttagccctggtattgatgtcaccacagagctggacagctggattgacaagttttgtctggatgctgatgtgtttgtgctggtggccaactcagagtccaccctgatgcagacggaaaagcacttcttccacaaggtgagtgagcgtctctcccggccaaacatcttcatcctgaacaaccgctgggatgcatctgcctcagagcccgagtacatggaggaggtgcggcggcagcacatggagcgttgtaccagcttcctggtggatgagctgggcgtggtggatcgatcccaggccggggaccgcatcttctttgtgtctgctaaggaggtgctcaacgccaggattcagaaagcccagggcatgcctgaaggagggggcgctctcgcagaaggctttcaagtgaggatgtttgagtttcagaattttgagaggagatttgaggagtgcatctcccagtctgcagtgaagaccaagtttgagcagcacacggtccgggccaagcagattgcagaggcggttcgactcatcatggactccctgcacatggcggctcgggagcagcaggtttactgcgaggaaatgcgtgaagagcggcaagaccgactgaaatttattgacaaacagctggagctcttggctcaagactataagctgcgaattaagcagattacggaggaagtggagaggcaggtgtcgactgcaatggccgaggagatcaggcgcctctctgtactggtggacgattaccagatggacttccacccttctccagtagtcctcaaggtttataagaatgagctgcaccgccacatagaggaaggactgggtcgaaacatgtctgaccgctgctccacggccatcaccaactccctgcagaccatgcagcaggacatgatagatggcttgaaacccctccttcctgtgtctgtgcggagtcagatagacatgctggtcccacgccagtgcttctccctcaactatgacctaaactgtgacaagctgtgtgctgacttccaggaagacattgagttccatttctctctcggatggaccatgctggtgaataggttcctgggccccaagaacagccgtcgggccttgatgggctacaatgaccaggtccagcgtcccatccctctgacgccagccaaccccagcatgcccccactgccacagggctcgctcacccaggaggagttcatggtttccatggttaccggcctggcctccttgacatccaggacctccatgggcattcttgttgttggaggagtggtgtggaaggcagtgggctggcggctcattgccctctcctttgggctctatggcctcctctacgtctatgagcgtctgacctggaccaccaaggccaaggagagggccttcaagcgccagtttgtggagcatgccagcgagaagctgcagcttgtcatcagctacactggctccaactgcagccaccaagtccagcaggaactgtctgggacctttgctcatctgtgtcagcaagttgacgtcacccgggagaacctggagcaggaaattgccgccatgaacaagaaaattgaggttcttgactcacttcagagcaaagcaaagctgctcaggaataaagccggttggttggacagtgagctcaacatgttcacacaccagtacctgcagcccagcagatagtgggcacctgaggcggagtctgcgtggagaggggcggtgctgccagccctaagtgccgtgtgggctcccccaggggcacgtgtggctcctgccccctggccactgccaagagaatgaagcacccagtctcgtaccattttgagccctccagcactacttattttcccccacctttgcctgctgttgctggaagagctggctcatacccccaaaggacactttcagcgacagctatggacagcatggtaccaaggagttaagttgaggctttttccagctttctctggttcatttgattgcttgataaggcctcaggatctcagcattgcacaatgcctcatggaagcctttgagggtatcacacagacacccccaccttcctccagcctgtgcgcacctgccctccttgcagcccagcacacctgcaggtgtaagggacgattggagtttcttcccagagagtctgtcccagaaggactgtggcttgtgtgtgtccatctcgcctgttggctcagtgcttcatcccatttgcagagcctcagacacgtcttggtggtgaggctcagttacccctgggcttaggctgaggcgggccctgtgctgggggtggtagaaaggatgctgctgaggcagctggaggagtgggagtagctcagaggggagggctgttggatgtatggggagctggcagagcaggtggcagtcactgggacaaggagggacttgcctctcttctcattattgtgtcctttgctttagtgtcagtcctggacttgtgcaggcctgttttgtgtagatctgttttggaagatggcatggtctaggtggttgaaggatgtagtagaaggatggatggtggaaggtggggacgttggtggctggctgaggtgcatgggccccacacaggacagctggagaatgggccgtccacttggcctcgttctgcgaggggctcatgggtctgagagcccccacccactaggcttgattgcatccctgttgtgccctttaagagacatgtttccaccccacccccaaccttgtcccaagtgccctggactaaatttcctgtgccagtgactgcagttggccaagggacaatgtggaaaacccagtgtccatctttccaccctccctgatctccagaaccttcgactgacccccttgtctttatgctgatgttgagttttgggattgttactggttgaagtgggggcagatgcctgtcaccaaggtgttgactgtgtgagaaaagcagtttgggtgacaaatcctgtgtggcacaagttggatcgcttcctagaaataagcaacacctctcccaaaaagcagcccacaaggcaggggcccagcagcccagccatcactcatctttgaggaaatgagttggtagcctctgtgcactgtttggtggccacatcacaggtgatgtcctgttcacatacctgcttgtatttaaagccctcagtctgtcctgttgtgtggggcgaagtgatggactctgccaggtggacatgctgtgggtggatgttcccggcgtgtgccgggcctgaatggacaggggccacttcacagcatgtcagggaaaatcactgtcacacaattccaatggattttgtgctctttttgaaaaaaaaaaattctttagcgtaaacatgaattttttttcaatgtagcccctggggaatgaatgaaattttgagcttcttcaatacgtaaaattaaatttataccactgagggagagaccctttctgaaagaagtatggccaaaagcactttaatgctgctgacattgttgtttttatgttcatttgctggagcgcaagacgtgctgacacagtgagttttctctgatgtatttaaggtgatgtatttgcttgagttactcctgtatcattgctcataatattggaaactaaaataaaacctagttggaaa

SEQ ID NO: 295270 - DNA, 3798 bp, Homo sapiens
acgcgccggcggaggagtggcgcgcggaggagtggcgcgctgagacgccgctcgaagcgccgagtcgcggggcagcagaggcgtaaggagtaggcggggcgagccggctgggctcagggtccaccagctcacccgggtcgaggggcaatctgaggcgactggtgacgcgcttatccacttccctcctcccgcctccccccggggtggcgctcgctggtgacgtagtgagtgtgatggccgccgcgaggccgggaaggtgaagtcaggactggtggagtcaacacagtcaatcaatagccaacctcaacctgagacaggacagaagagaactcagaatctttttgtcttttggacttcagccatgtccatgatgcctaccctgtgaagatctctcaccatccaaaaaacgcaatgtccctgctcttctctcgatgcaactctatcgtcacagtcaagaaaaataagagacacatggctgaggtgaatgcatccccacttaagcactttgtcactgccaagaagaagatcaatggcatttttgagcagctgggggcggggcgctctcgcagaaggctttcaagtgaggatgtttgagtttcagaattttgagaggagatttgaggagtgcatctcccagtctgcagtgaagaccaagtttgagcagcacacggtccgggccaagcagattgcagaggcggttcgactcatcatggactccctgcacatggcggctcgggagcagcaggtttactgcgaggaaatgcgtgaagagcggcaagaccgactgaaatttattgacaaacagctggagctcttggctcaagactataagctgcgaattaagcagattacggaggaagtggagaggcaggtgtcgactgcaatggccgaggagatcaggcgcctctctgtactggtggacgattaccagatggacttccacccttctccagtagtcctcaaggtttataagaatgagctgcaccgccacatagaggaaggactgggtcgaaacatgtctgaccgctgctccacggccatcaccaactccctgcagaccatgcagcaggacatgatagatggcttgaaacccctccttcctgtgtctgtgcggagtcagatagacatgctggtcccacgccagtgcttctccctcaactatgacctaaactgtgacaagctgtgtgctgacttccaggaagacattgagttccatttctctctcggatggaccatgctggtgaataggttcctgggccccaagaacagccgtcgggccttgatgggctacaatgaccaggtccagcgtcccatccctctgacgccagccaaccccagcatgcccccactgccacagggctcgctcacccaggaggagttcatggtttccatggttaccggcctggcctccttgacatccaggacctccatgggcattcttgttgttggaggagtggtgtggaaggcagtgggctggcggctcattgccctctcctttgggctctatggcctcctctacgtctatgagcgtctgacctggaccaccaaggccaaggagagggccttcaagcgccagtttgtggagcatgccagcgagaagctgcagcttgtcatcagctacactggctccaactgcagccaccaagtccagcaggaactgtctgggacctttgctcatctgtgtcagcaagttgacgtcacccgggagaacctggagcaggaaattgccgccatgaacaagaaaattgaggttcttgactcacttcagagcaaagcaaagctgctcaggaataaagccggttggttggacagtgagctcaacatgttcacacaccagtacctgcagcccagcagatagtgggcacctgaggcggagtctgcgtggagaggggcggtgctgccagccctaagtgccgtgtgggctcccccaggggcacgtgtggctcctgccccctggccactgccaagagaatgaagcacccagtctcgtaccattttgagccctccagcactacttattttcccccacctttgcctgctgttgctggaagagctggctcatacccccaaaggacactttcagcgacagctatggacagcatggtaccaaggagttaagttgaggctttttccagctttctctggttcatttgattgcttgataaggcctcaggatctcagcattgcacaatgcctcatggaagcctttgagggtatcacacagacacccccaccttcctccagcctgtgcgcacctgccctccttgcagcccagcacacctgcaggtgtaagggacgattggagtttcttcccagagagtctgtcccagaaggactgtggcttgtgtgtgtccatctcgcctgttggctcagtgcttcatcccatttgcagagcctcagacacgtcttggtggtgaggctcagttacccctgggcttaggctgaggcgggccctgtgctgggggtggtagaaaggatgctgctgaggcagctggaggagtgggagtagctcagaggggagggctgttggatgtatggggagctggcagagcaggtggcagtcactgggacaaggagggacttgcctctcttctcattattgtgtcctttgctttagtgtcagtcctggacttgtgcaggcctgttttgtgtagatctgttttggaagatggcatggtctaggtggttgaaggatgtagtagaaggatggatggtggaaggtggggacgttggtggctggctgaggtgcatgggccccacacaggacagctggagaatgggccgtccacttggcctcgttctgcgaggggctcatgggtctgagagcccccacccactaggcttgattgcatccctgttgtgccctttaagagacatgtttccaccccacccccaaccttgtcccaagtgccctggactaaatttcctgtgccagtgactgcagttggccaagggacaatgtggaaaacccagtgtccatctttccaccctccctgatctccagaaccttcgactgacccccttgtctttatgctgatgttgagttttgggattgttactggttgaagtgggggcagatgcctgtcaccaaggtgttgactgtgtgagaaaagcagtttgggtgacaaatcctgtgtggcacaagttggatcgcttcctagaaataagcaacacctctcccaaaaagcagcccacaaggcaggggcccagcagcccagccatcactcatctttgaggaaatgagttggtagcctctgtgcactgtttggtggccacatcacaggtgatgtcctgttcacatacctgcttgtatttaaagccctcagtctgtcctgttgtgtggggcgaagtgatggactctgccaggtggacatgctgtgggtggatgttcccggcgtgtgccgggcctgaatggacaggggccacttcacagcatgtcagggaaaatcactgtcacacaattccaatggattttgtgctctttttgaaaaaaaaaaattctttagcgtaaacatgaattttttttcaatgtagcccctggggaatgaatgaaattttgagcttcttcaatacgtaaaattaaatttataccactgagggagagaccctttctgaaagaagtatggccaaaagcactttaatgctgctgacattgttgtttttatgttcatttgctggagcgcaagacgtgctgacacagtgagttttctctgatgtatttaaggtgatgtatttgcttgagttactcctgtatcattgctcataatattggaaactaaaataaaacctagttggaaa

SEQ ID NO: 295271 - DNA, 3278 bp, Homo sapiens
ggtgacaagctgtgtgctgacttccaggaagacattgagttccatttctctctcggatggaccatgctggtgaataggttcctgggccccaagaacagccgtcgggccttgatgggctacaatgaccaggtccagcgtcccatccctctgacgccagccaaccccagcatgcccccactgccacagggctcgctcaccctgcacatggcggctcgggagcagcaggtttactgcgaggaaatgcgtgaagagcggcaagaccgactgaaatttattgacaaacagctggagctcttggctcaagactataagctgcgaattaagcagattacggaggaagtggagaggcaggtgtcgactgcaatggccgaggagatcaggcgcctctctgtactggtggacgattaccagatggacttccacccttctccagtagtcctcaaggtttataagaatgagctgcaccgccacatagaggaaggactgggtcgaaacatgtctgaccgctgctccacggccatcaccaactccctgcagaccatgcagcaggacatgatagatggcttgaaacccctccttcctgtgtctgtgcggagtcagatagacatgctggtcccacgccagtgcttctccctcaactatgacctaaactgtgacaagctgtgtgctgacttccaggaagacattgagttccatttctctctcggatggaccatgctggtgaataggttcctgggccccaagaacagccgtcgggccttgatgggctacaatgaccaggtccagcgtcccatccctctgacgccagccaaccccagcatgcccccactgccacagggctcgctcacccaggaggagttcatggtttccatggttaccggcctggcctccttgacatccaggacctccatgggcattcttgttgttggaggagtggtgtggaaggcagtgggctggcggctcattgccctctcctttgggctctatggcctcctctacgtctatgagcgtctgacctggaccaccaaggccaaggagagggccttcaagcgccagtttgtggagcatgccagcgagaagctgcagcttgtcatcagctacactggctccaactgcagccaccaagtccagcaggaactgtctgggacctttgctcatctgtgtcagcaagttgacgtcacccgggagaacctggagcaggaaattgccgccatgaacaagaaaattgaggttcttgactcacttcagagcaaagcaaagctgctcaggaataaagccggttggttggacagtgagctcaacatgttcacacaccagtacctgcagcccagcagatagtgggcacctgaggcggagtctgcgtggagaggggcggtgctgccagccctaagtgccgtgtgggctcccccaggggcacgtgtggctcctgccccctggccactgccaagagaatgaagcacccagtctcgtaccattttgagccctccagcactacttattttcccccacctttgcctgctgttgctggaagagctggctcatacccccaaaggacactttcagcgacagctatggacagcatggtaccaaggagttaagttgaggctttttccagctttctctggttcatttgattgcttgataaggcctcaggatctcagcattgcacaatgcctcatggaagcctttgagggtatcacacagacacccccaccttcctccagcctgtgcgcacctgccctccttgcagcccagcacacctgcaggtgtaagggacgattggagtttcttcccagagagtctgtcccagaaggactgtggcttgtgtgtgtccatctcgcctgttggctcagtgcttcatcccatttgcagagcctcagacacgtcttggtggtgaggctcagttacccctgggcttaggctgaggcgggccctgtgctgggggtggtagaaaggatgctgctgaggcagctggaggagtgggagtagctcagaggggagggctgttggatgtatggggagctggcagagcaggtggcagtcactgggacaaggagggacttgcctctcttctcattattgtgtcctttgctttagtgtcagtcctggacttgtgcaggcctgttttgtgtagatctgttttggaagatggcatggtctaggtggttgaaggatgtagtagaaggatggatggtggaaggtggggacgttggtggctggctgaggtgcatgggccccacacaggacagctggagaatgggccgtccacttggcctcgttctgcgaggggctcatgggtctgagagcccccacccactaggcttgattgcatccctgttgtgccctttaagagacatgtttccaccccacccccaaccttgtcccaagtgccctggactaaatttcctgtgccagtgactgcagttggccaagggacaatgtggaaaacccagtgtccatctttccaccctccctgatctccagaaccttcgactgacccccttgtctttatgctgatgttgagttttgggattgttactggttgaagtgggggcagatgcctgtcaccaaggtgttgactgtgtgagaaaagcagtttgggtgacaaatcctgtgtggcacaagttggatcgcttcctagaaataagcaacacctctcccaaaaagcagcccacaaggcaggggcccagcagcccagccatcactcatctttgaggaaatgagttggtagcctctgtgcactgtttggtggccacatcacaggtgatgtcctgttcacatacctgcttgtatttaaagccctcagtctgtcctgttgtgtggggcgaagtgatggactctgccaggtggacatgctgtgggtggatgttcccggcgtgtgccgggcctgaatggacaggggccacttcacagcatgtcagggaaaatcactgtcacacaattccaatggattttgtgctctttttgaaaaaaaaaaattctttagcgtaaacatgaattttttttcaatgtagcccctggggaatgaatgaaattttgagcttcttcaatacgtaaaattaaatttataccactgagggagagaccctttctgaaagaagtatggccaaaagcactttaatgctgctgacattgttgtttttatgttcatttgctggagcgcaagacgtgctgacacagtgagttttctctgatgtatttaaggtgatgtatttgcttgagttactcctgtatcattgctcataatattggaaactaaaataaaacctagttggaaa

SEQ ID NO: 295272 - DNA, 5015 bp, Homo sapiens
acgcgccggcggaggagtggcgcgcggaggagtggcgcgctgagacgccgctcgaagcgccgagtcgcggggcagcagaggcgtaaggagtaggcggggcgagccggctgggctcagggtccaccagctcacccgggtcgaggggcaatctgaggcgactggtgacgcgcttatccacttccctcctcccgcctccccccggggtggcgctcgctggtgacgtagtgagtgtgatggccgccgcgaggccgggaaggtgaagtcaggactggtggagtcaacacagtcaatcaatagccaacctcaacctgagacaggacagaagagaactcagaatctttttgtcttttggacttcagccatgtccatgatgcctaccctgtgaagatctctcaccatccaaaaaacgcaatgtccctgctcttctctcgatgcaactctatcgtcacagtcaagaaaaataagagacacatggctgaggtgaatgcatccccacttaagcactttgtcactgccaagaagaagatcaatggcatttttgagcagctgggggcctacatccaggagagcgccaccttccttgaagacacgtacaggaatgcagaactggaccccgttaccacagaagaacaggttctggacgtcaaaggttacctatccaaagtgagaggcatcagtgaggtgctggctcggaggcacatgaaagtggctttttttggccggacgagcaatgggaagagcaccgtgatcaatgccatgctctgggacaaagttctgccctctgggattggccacaccaccaattgcttcctgcgggtagagggcacagatggccatgaggcctttctccttaccgagggctcagaggaaaagaggagtgccaagactgtgaaccagctggcccatgccctccaccaggacaagcagctccatgccggcagcctagtgagtgtgatgtggcccaactctaagtgcccacttctgaaggatgacctcgttttgatggacagccctggtattgatgtcaccacagagctggacagctggattgacaagttttgtctggatgctgatgtgtttgtgctggtggccaactcagagtccaccctgatgcagacggaaaagcacttcttccacaaggtgagtgagcgtctctcccggccaaacatcttcatcctgaacaaccgctgggatgcatctgcctcagagcccgagtacatggaggaggtgcggcggcagcacatggagcgttgtaccagcttcctggtggatgagctgggcgtggtggatcgatcccaggccggggaccgcatcttctttgtgtctgctaaggaggtgctcaacgccaggattcagaaagcccagggcatgcctgaaggagggggcgctctcgcagaaggctttcaagtgaggatgtttgagtttcagaattttgagaggagatttgaggagtgcatctcccagtctgcagtgaagaccaagtttgagcagcacacggtccgggccaagcagattgcagaggcggttcgactcatcatggactccctgcacatggcggctcgggagcagcaggtttactgcgaggaaatgcgtgaagagcggcaagaccgactgaaatttattgacaaacagctggagctcttggctcaagactataagctgcgaattaagcagattacggaggaagtggagaggcaggtgagaaatgaggaggaggcattctgggaagatttggactccgagtagagtccagaagaaagcagacctcctcctcttagggacttctcagcctttcagaagaaagttgtggccctgtttcaagaatacagagctgccgtttgggttccattgtcgggttgtgtgatgctgggcatgttccctttcctctggacctccacagatcatgtgggcgtttgatcagccagtttcccagaccctctcacttcagaggctttaattccatagaggagctgaggaggctgctggtttgagaggaaggatgtgccatctgctaggatctctcctggtgctgcaggagtgaactttggtcttccttgatacttaacagtgtgcttccttttgctgtaggtgtcgactgcaatggccgaggagatcaggcgcctctctgtactggtggacgattaccagatggacttccacccttctccagtagtcctcaaggtttataagaatgagctgcaccgccacatagaggaaggactgggtcgaaacatgtctgaccgctgctccacggccatcaccaactccctgcagaccatgcagcaggacatgatagatggcttgaaacccctccttcctgtgtctgtgcggagtcagatagacatgctggtcccacgccagtgcttctccctcaactatgacctaaactgtgacaagctgtgtgctgacttccaggaagacattgagttccatttctctctcggatggaccatgctggtgaataggttcctgggccccaagaacagccgtcgggccttgatgggctacaatgaccaggtccagcgtcccatccctctgacgccagccaaccccagcatgcccccactgccacagggctcgctcacccaggaggagttcatggtttccatggttaccggcctggcctccttgacatccaggacctccatgggcattcttgttgttggaggagtggtgtggaaggcagtgggctggcggctcattgccctctcctttgggctctatggcctcctctacgtctatgagcgtctgacctggaccaccaaggccaaggagagggccttcaagcgccagtttgtggagcatgccagcgagaagctgcagcttgtcatcagctacactggctccaactgcagccaccaagtccagcaggaactgtctgggacctttgctcatctgtgtcagcaagttgacgtcacccgggagaacctggagcaggaaattgccgccatgaacaagaaaattgaggttcttgactcacttcagagcaaagcaaagctgctcaggaataaagccggttggttggacagtgagctcaacatgttcacacaccagtacctgcagcccagcagatagtgggcacctgaggcggagtctgcgtggagaggggcggtgctgccagccctaagtgccgtgtgggctcccccaggggcacgtgtggctcctgccccctggccactgccaagagaatgaagcacccagtctcgtaccattttgagccctccagcactacttattttcccccacctttgcctgctgttgctggaagagctggctcatacccccaaaggacactttcagcgacagctatggacagcatggtaccaaggagttaagttgaggctttttccagctttctctggttcatttgattgcttgataaggcctcaggatctcagcattgcacaatgcctcatggaagcctttgagggtatcacacagacacccccaccttcctccagcctgtgcgcacctgccctccttgcagcccagcacacctgcaggtgtaagggacgattggagtttcttcccagagagtctgtcccagaaggactgtggcttgtgtgtgtccatctcgcctgttggctcagtgcttcatcccatttgcagagcctcagacacgtcttggtggtgaggctcagttacccctgggcttaggctgaggcgggccctgtgctgggggtggtagaaaggatgctgctgaggcagctggaggagtgggagtagctcagaggggagggctgttggatgtatggggagctggcagagcaggtggcagtcactgggacaaggagggacttgcctctcttctcattattgtgtcctttgctttagtgtcagtcctggacttgtgcaggcctgttttgtgtagatctgttttggaagatggcatggtctaggtggttgaaggatgtagtagaaggatggatggtggaaggtggggacgttggtggctggctgaggtgcatgggccccacacaggacagctggagaatgggccgtccacttggcctcgttctgcgaggggctcatgggtctgagagcccccacccactaggcttgattgcatccctgttgtgccctttaagagacatgtttccaccccacccccaaccttgtcccaagtgccctggactaaatttcctgtgccagtgactgcagttggccaagggacaatgtggaaaacccagtgtccatctttccaccctccctgatctccagaaccttcgactgacccccttgtctttatgctgatgttgagttttgggattgttactggttgaagtgggggcagatgcctgtcaccaaggtgttgactgtgtgagaaaagcagtttgggtgacaaatcctgtgtggcacaagttggatcgcttcctagaaataagcaacacctctcccaaaaagcagcccacaaggcaggggcccagcagcccagccatcactcatctttgaggaaatgagttggtagcctctgtgcactgtttggtggccacatcacaggtgatgtcctgttcacatacctgcttgtatttaaagccctcagtctgtcctgttgtgtggggcgaagtgatggactctgccaggtggacatgctgtgggtggatgttcccggcgtgtgccgggcctgaatggacaggggccacttcacagcatgtcagggaaaatcactgtcacacaattccaatggattttgtgctctttttgaaaaaaaaaaattctttagcgtaaacatgaattttttttcaatgtagcccctggggaatgaatgaaattttgagcttcttcaatacgtaaaattaaatttataccactgagggagagaccctttctgaaagaagtatggccaaaagcactttaatgctgctgacattgttgtttttatgttcatttgctggagcgcaagacgtgctgacacagtgagttttctctgatgtatttaaggtgatgtatttgcttgagttactcctgtatcattgctcataatattggaaactaaaataaaacctagttggaaa

SEQ ID NO: 295273 - DNA, 2947 bp, Homo sapiens
acgcgccggcggaggagtggcgcgcggaggagtggcgcgctgagacgccgctcgaagcgccgagtcgcggggcagcagaggcgtaaggagtaggcggggcgagccggctgggctcagggtccaccagctcacccgggtcgaggggcaatctgaggcgactggtgacgcgcttatccacttccctcctcccgcctccccccggggtggcgctcgctggtgacgtagtgagtgtgatggccgccgcgaggccgggaaggtgaagtcaggactggtggagtcaacacagtcaatcaatagccaacctcaactatgacctaaactgtgacaagctgtgtgctgacttccaggaagacattgagttccatttctctctcggatggaccatgctggtgaataggttcctgggccccaagaacagccgtcgggccttgatgggctacaatgaccaggtccagcgtcccatccctctgacgccagccaaccccagcatgcccccactgccacagggctcgctcacccaggaggagttcatggtttccatggttaccggcctggcctccttgacatccaggacctccatgggcattcttgttgttggaggagtggtgtggaaggcagtgggctggcggctcattgccctctcctttgggctctatggcctcctctacgtctatgagcgtctgacctggaccaccaaggccaaggagagggccttcaagcgccagtttgtggagcatgccagcgagaagctgcagcttgtcatcagctacactggctccaactgcagccaccaagtccagcaggaactgtctgggacctttgctcatctgtgtcagcaagttgacgtcacccgggagaacctggagcaggaaattgccgccatgaacaagaaaattgaggttcttgactcacttcagagcaaagcaaagctgctcaggaataaagccggttggttggacagtgagctcaacatgttcacacaccagtacctgcagcccagcagatagtgggcacctgaggcggagtctgcgtggagaggggcggtgctgccagccctaagtgccgtgtgggctcccccaggggcacgtgtggctcctgccccctggccactgccaagagaatgaagcacccagtctcgtaccattttgagccctccagcactacttattttcccccacctttgcctgctgttgctggaagagctggctcatacccccaaaggacactttcagcgacagctatggacagcatggtaccaaggagttaagttgaggctttttccagctttctctggttcatttgattgcttgataaggcctcaggatctcagcattgcacaatgcctcatggaagcctttgagggtatcacacagacacccccaccttcctccagcctgtgcgcacctgccctccttgcagcccagcacacctgcaggtgtaagggacgattggagtttcttcccagagagtctgtcccagaaggactgtggcttgtgtgtgtccatctcgcctgttggctcagtgcttcatcccatttgcagagcctcagacacgtcttggtggtgaggctcagttacccctgggcttaggctgaggcgggccctgtgctgggggtggtagaaaggatgctgctgaggcagctggaggagtgggagtagctcagaggggagggctgttggatgtatggggagctggcagagcaggtggcagtcactgggacaaggagggacttgcctctcttctcattattgtgtcctttgctttagtgtcagtcctggacttgtgcaggcctgttttgtgtagatctgttttggaagatggcatggtctaggtggttgaaggatgtagtagaaggatggatggtggaaggtggggacgttggtggctggctgaggtgcatgggccccacacaggacagctggagaatgggccgtccacttggcctcgttctgcgaggggctcatgggtctgagagcccccacccactaggcttgattgcatccctgttgtgccctttaagagacatgtttccaccccacccccaaccttgtcccaagtgccctggactaaatttcctgtgccagtgactgcagttggccaagggacaatgtggaaaacccagtgtccatctttccaccctccctgatctccagaaccttcgactgacccccttgtctttatgctgatgttgagttttgggattgttactggttgaagtgggggcagatgcctgtcaccaaggtgttgactgtgtgagaaaagcagtttgggtgacaaatcctgtgtggcacaagttggatcgcttcctagaaataagcaacacctctcccaaaaagcagcccacaaggcaggggcccagcagcccagccatcactcatctttgaggaaatgagttggtagcctctgtgcactgtttggtggccacatcacaggtgatgtcctgttcacatacctgcttgtatttaaagccctcagtctgtcctgttgtgtggggcgaagtgatggactctgccaggtggacatgctgtgggtggatgttcccggcgtgtgccgggcctgaatggacaggggccacttcacagcatgtcagggaaaatcactgtcacacaattccaatggattttgtgctctttttgaaaaaaaaaaattctttagcgtaaacatgaattttttttcaatgtagcccctggggaatgaatgaaattttgagcttcttcaatacgtaaaattaaatttataccactgagggagagaccctttctgaaagaagtatggccaaaagcactttaatgctgctgacattgttgtttttatgttcatttgctggagcgcaagacgtgctgacacagtgagttttctctgatgtatttaaggtgatgtatttgcttgagttactcctgtatcattgctcataatattggaaactaaaataaaacctagttggaaa

SEQ ID NO: 295274 - DNA, 2097 bp, Homo sapiens
  misc_feature (7)..(7): n is a, c, g, or t
  misc_feature (11)..(11): n is a, c, g, or t
  misc_feature (18)..(18): n is a, c, g, or t
  misc_feature (69)..(69): n is a, c, g, or t
ctgtccnaccnaccggcnttattcctgagcagctttgctttgctctgaagtgagtcaagaacctcaatnttcttgttcatggcggcaatttcctgctccaggttctcccgggtgactcaacatgttcacacaccagtacctgcagcccagcagatagtgggcacctgaggcggagtctgcgtggagaggggcggtgctgccagccctaagtgccgtgtgggctcccccaggggcacgtgtggctcctgccccctggccactgccaagagaatgaagcacccagtctcgtaccattttgagccctccagcactacttattttcccccacctttgcctgctgttgctggaagagctggctcatacccccaaaggacactttcagcgacagctatggacagcatggtaccaaggagttaagttgaggctttttccagctttctctggttcatttgattgcttgataaggcctcaggatctcagcattgcacaatgcctcatggaagcctttgagggtatcacacagacacccccaccttcctccagcctgtgcgcacctgccctccttgcagcccagcacacctgcaggtgtaagggacgattggagtttcttcccagagagtctgtcccagaaggactgtggcttgtgtgtgtccatctcgcctgttggctcagtgcttcatcccatttgcagagcctcagacacgtcttggtggtgaggctcagttacccctgggcttaggctgaggcgggccctgtgctgggggtggtagaaaggatgctgctgaggcagctggaggagtgggagtagctcagaggggagggctgttggatgtatggggagctggcagagcaggtggcagtcactgggacaaggagggacttgcctctcttctcattattgtgtcctttgctttagtgtcagtcctggacttgtgcaggcctgttttgtgtagatctgttttggaagatggcatggtctaggtggttgaaggatgtagtagaaggatggatggtggaaggtggggacgttggtggctggctgaggtgcatgggccccacacaggacagctggagaatgggccgtccacttggcctcgttctgcgaggggctcatgggtctgagagcccccacccactaggcttgattgcatccctgttgtgccctttaagagacatgtttccaccccacccccaaccttgtcccaagtgccctggactaaatttcctgtgccagtgactgcagttggccaagggacaatgtggaaaacccagtgtccatctttccaccctccctgatctccagaaccttcgactgacccccttgtctttatgctgatgttgagttttgggattgttactggttgaagtgggggcagatgcctgtcaccaaggtgttgactgtgtgagaaaagcagtttgggtgacaaatcctgtgtggcacaagttggatcgcttcctagaaataagcaacacctctcccaaaaagcagcccacaaggcaggggcccagcagcccagccatcactcatctttgaggaaatgagttggtagcctctgtgcactgtttggtggccacatcacaggtgatgtcctgttcacatacctgcttgtatttaaagccctcagtctgtcctgttgtgtggggcgaagtgatggactctgccaggtggacatgctgtgggtggatgttcccggcgtgtgccgggcctgaatggacaggggccacttcacagcatgtcagggaaaatcactgtcacacaattccaatggattttgtgctctttttgaaaaaaaaaaattctttagcgtaaacatgaattttttttcaatgtagcccctggggaatgaatgaaattttgagcttcttcaatacgtaaaattaaatttataccactgagggagagaccctttctgaaagaagtatggccaaaagcactttaatgctgctgacattgttgtttttatgttcatttgctggagcgcaagacgtgctgacacagtgagttttctctgatgtatttaaggtgatgtatttgcttgagttactcctgtatcattgctcataatattggaaactaaaataaaacctagttggaaa

SEQ ID NO: 295275 - DNA, 4959 bp, Homo sapiens
acgcgccggcggaggagtggcgcgcggaggagtggcgcgctgagacgccgctcgaagcgccgagtcgcggggcagcagaggcgtaaggagtaggcggggcgagccggctgggctcagggtccaccagctcacccgggtcgaggggcaatctgaggcgactggtgacgcgcttatccacttccctcctcccgcctccccccggggtggcgctcgctggtgacgtagtgagtgtgatggccgccgcgaggccgggaaggtgaagtcaggactggtggagtcaacacagtcaatcaatagccaacctcaacctgagacaggacagaagagaactcagaatctttttgtcttttggacttcagccatgtccatgatgcctaccctgtgaagatctctcaccatccaaaaaacgcaatgtccctgctcttctctcgatgcaactctatcgtcacagtcaagaaaaataagagacacatggctgaggtgaatgcatccccacttaagcactttgtcactgccaagaagaagatcaatggcatttttgagcagctgggggcctacatccaggagagcgccaccttccttgaagacacgtacaggaatgcagaactggaccccgttaccacagaagaacaggttctggacgtcaaaggttacctatccaaagtgagaggcatcagtgaggtgctggctcggaggcacatgaaagtggctttttttggccggacgagcaatgggaagagcaccgtgatcaatgccatgctctgggacaaagttctgccctctgggattggccacaccaccaattgcttcctgcgggtagagggcacagatggccatgaggcctttctccttaccgagggctcagaggaaaagaggagtgccaagactgtgaaccagctggcccatgccctccaccaggacaagcagctccatgccggcagcctagtgagtgtgatgtggcccaactctaagtgcccacttctgaaggatgacctcgttttgatggacagccctggtattgatgtcaccacagagctggacagctggattgacaagttttgtctggatgctgatgtgtttgtgctggtggccaactcagagtccaccctgatgcagacggaaaagcacttcttccacaaggtgagtgagcgtctctcccggccaaacatcttcatcctgaacaaccgctgggatgcatctgcctcagagcccgagtacatggaggaggtgcggcggcagcacatggagcgttgtaccagcttcctggtggatgagctgggcgtggtggatcgatcccaggccggggaccgcatcttctttgtgtctgctaaggaggtgctcaacgccaggattcagaaagcccagggcatgcctgaaggagggggcgctctcgcagaaggctttcaagtgaggatgtttgagtttcagaattttgagaggagatttgaggagtgcatctcccagtctgcagtgaagaccaagtttgagcagcacacggtccgggccaagcagattgcagaggcggttcgactcatcatggactccctgcacatggcggctcgggagcagcaggtttactgcgaggaaatgcgtgaagagcggcaagaccgactgaaatttattgacaaacagctggagctcttggctcaagactataagctgcgaattaagcagattacggaggaagtggagaggcaggtgtcgactgcaatggccgaggagatcaggcgcctctctgtactggtggacgattaccagatggacttccacccttctccagtagtcctcaaggtttataagaatgagctgcaccgccacatagaggaaggactgggtcgaaacatgtctgaccgctgctccacggccatcaccaactccctgcagaccatgcagcaggacatgatagatggcttgaaacccctccttcctgtgtctgtgcggagtcagatagacatgctggtcccacgccagtgcttctccctcaactatgacctaaactgtgacaagctgtgtgctgacttccaggaagacattgagttccatttctctctcggatggaccatgctggtgaataggttcctgggccccaagaacagccgtcgggccttgatgggctacaatgaccaggtccagcgtcccatccctctgacgccagccaaccccagcatgcccccactgccacagggctcgctcacccaggaggagttcatggtttccatggttaccggcctggcctccttgacatccaggacctccatgggcattcttgttgttggaggagtggtgtggaaggcagtgggctggcggctcattgccctctcctttgggctctatggcctcctctacgtctatgagcgtctgacctggaccaccaaggccaaggagagggccttcaagcgccagtttgtggagcatgccagcgagaagctgcagcttgtcatcagctacactggctccaactgcagccaccaagtccagcaggaactgtctgggacctttgctcatctgtgtcagcaagttgacgtcacccgggagaacctggagcaggaaattgccgccatgaacaagaaaattgaggttcttgactcacttcagagcaaagcaaagctgctcaggaataaagccggttggttggacagtgagctcaacatgttcacacaccagtacctgcagcccagcagatagtgggcacctgaggcggagtctgcgtggagaggggcggtgctgccagccctaagtgccgtgtgggctcccccaggggcacgtgtggctcctgccccctggccactgccaagagaatgaagcacccagtctcgtaccattttgagccctccagcactacttattttcccccacctttgcctgctgttgctggaagagctggctcatacccccaaaggacactttcagcgacagctatggacagcatggtaccaaggagttaagttgaggctttttccagctttctctggttcatttgattgcttgataaggcctcaggatctcagcattgcacaatgcctcatggaagcctttgagggtatcacacagacacccccaccttcctccagcctgtgcgcacctgccctccttgcagcccagcacacctgcaggtgtaagggacgattggagtttcttcccagagagtctgtcccagaaggactgtggcttgtgtgtgtccatctcgcctgttggctcagtgcttcatcccatttgcagagcctcagacacgtcttggtggtgaggctcagttacccctgggcttaggctgaggcgggccctgtgctgggggtggtagaaaggatgctgctgaggcagctggaggagtgggagtagctcagaggggagggctgttggatgtatggggagctggcagagcaggtggcagtcactgggacaaggagggacttgcctctcttctcattattgtgtcctttgctttagtgtcagtcctggacttgtgcaggcctgttttgtgtagatctgttttggaagatggcatggtctaggtggttgaaggatgtagtagaaggatggatggtggaaggtggggacgttggtggctggctgaggtgcatgggccccacacaggacagctggagaatgggccgtccacttggcctcgttctgcgaggggctcatgggtctgagagcccccacccactaggcttgattgcatccctgttgtgccctttaagagacatgtttccaccccacccccaaccttgtcccaagtgccctggactaaatttcctgtgccagtgactgcagttggccaagggacaatgtggaaaacccagtgtccatctttccaccctccctgatctccagaaccttcgactgacccccttgtctttatgctgatgttgagttttgggattgttactggttgaagtgggggcagatgcctgtcaccaaggtgttgactgtgtgagaaaagcagtttgggtgacaaatcctgtgtggcacaagttggatcgcttcctagaaataagcaacacctctcccaaaaagcagcccacaaggcaggggcccagcagcccagccatcactcatctttgaggaaatgagttggtagcctctgtgcactgtttggtggccacatcacaggtgatgtcctgttcacatacctgcttgtatttaaagccctcagtctgtcctgttgtgtggggcgaagtgatggactctgccaggtggacatgctgtgggtggatgttcccggcgtgtgccgggcctgaatggacaggggccacttcacagcatgtcagggaaaatcactgtcacacaattccaatggattttgtgctctttttgaaaaaaaaaaattctttagcgtaaacatgaattttttttcaatgtagcccctggggaatgaatgaaattttgagcttcttcaatacgtaaaattaaatttataccactgagggagagaccctttctgaaagaagtatggccaaaagcactttaatgctgctgacattgttgtttttatgttcatttgctggagcgcaagacgtgctgacacagtgagttttctctgatgtatttaaggtgatgtatttgcttgagttactcctgtatcattgctcataatattggaaactaaaataaaacctagttggaaacaacacaaataaaaaaataaataataaaaaaaaagagaggggcgggccgcgcctccaaagagttttcccccgagggggggcccacagttttggcgcttttaccccggttttttttgtttcacaaagggggccccctatgtgggaggcgcattatttttaagcatctagaggcccatgagcccgcacgtttataacaacaggttgtggaagggtggaacaacgttgctagcctggggaactccttgtggtaagaggaacctttaatactcggggggggggcacccaattgggggccacaaattcaccaacgaaatttttaaaggctctaagagaa

SEQ ID NO: 295276 - DNA, 2234 bp, Homo sapiens
acgcgccggcggaggagtggcgcgcggaggagtggcgcgctgagacgccgctcgaagcgccgagtcgcggggcagcagaggcgtaaggagtaggcggggcgagccggctgggctcagggtccaccagctcacccgggtcgaggggcaatctgaggcgactggtgacgcgcttatccacttccctcctcccgcctccccccggggtggcgctcgctggtgacgtagtgagtgtgatggccgccgcgaggccgggaaggtgaagtcaggactggtggagtcaacacagtcaatcaatagccaacctcaacctgagacaggacagaagagaactcagaatctttttgtcttttggacttcagccatgtccatgatgcctaccctgtgaagatctctcaccatccaaaaaacgcaatgtccctgctcttctctcgatgcaactctatcgtcacagtcaagaaaaataagagacacatggctgaggtgaatgcatccccacttaagcactttgtcactgccaagaagaagatcaatggcatttttgagcagctgggggcctacatccaggagagcgccaccttccttgaagacacgtacaggaatgcagaactggaccccgttaccacagaagaacaggttctggacgtcaaaggttacctatccaaagtgagaggcatcagtgaggtgctggctcggaggcacatgaaagtggctttttttggccggacgagcaatgggaagagcaccgtgatcaatgccatgctctgggacaaagttctgccctctgggattggccacaccaccaattgcttcctgcgggtagagggcacagatggccatgaggcctttctccttaccgagggctcagaggaaaagaggagtgccaagactgtgaaccagctggcccatgccctccaccaggacaagcagctggaggagtgggagtagctcagaggggagggctgttggatgtatggggagctggcagagcaggtggcagtcactgggacaaggagggacttgcctctcttctcattattgtgtcctttgctttagtgtcagtcctggacttgtgcaggcctgttttgtgtagatctgttttggaagatggcatggtctaggtggttgaaggatgtagtagaaggatggatggtggaaggtggggacgttggtggctggctgaggtgcatgggccccacacaggacagctggagaatgggccgtccacttggcctcgttctgcgaggggctcatgggtctgagagcccccacccactaggcttgattgcatccctgttgtgccctttaagagacatgtttccaccccacccccaaccttgtcccaagtgccctggactaaatttcctgtgccagtgactgcagttggccaagggacaatgtggaaaacccagtgtccatctttccaccctccctgatctccagaaccttcgactgacccccttgtctttatgctgatgttgagttttgggattgttactggttgaagtgggggcagatgcctgtcaccaaggtgttgactgtgtgagaaaagcagtttgggtgacaaatcctgtgtggcacaagttggatcgcttcctagaaataagcaacacctctcccaaaaagcagcccacaaggcaggggcccagcagcccagccatcactcatctttgaggaaatgagttggtagcctctgtgcactgtttggtggccacatcacaggtgatgtcctgttcacatacctgcttgtatttaaagccctcagtctgtcctgttgtgtggggcgaagtgatggactctgccaggtggacatgctgtgggtggatgttcccggcgtgtgccgggcctgaatggacaggggccacttcacagcatgtcagggaaaatcactgtcacacaattccaatggattttgtgctctttttgaaaaaaaaaaattctttagcgtaaacatgaattttttttcaatgtagcccctggggaatgaatgaaattttgagcttcttcaatacgtaaaattaaatttataccactgagggagagaccctttctgaaagaagtatggccaaaagcactttaatgctgctgacattgttgtttttatgttcatttgctggagcgcaagacgtgctgacacagtgagttttctctgatgtatttaaggtgatgtatttgcttgagttactcctgtatcattgctcataatattggaaactaaaataaaacctagttggaaa

SEQ ID NO: 295277 - DNA, 2029 bp, Homo sapiens
ggacgcgtgggtcgacccacgcgttcggatggccgccgcgaggccgggaaggtgaagtcaggactggtggagtcaacacagtcaatcaatagccaacctcaacctgagacaggacagaagagaactcagaatctttttgtcttttggacttcagccatgtccatgatgcctaccctgtgaagatctctcaccatccaaaaaacgcaatgtccctgctcttctctcgatgcaactctatcgtcacagtcaagaaaaataagagacacatggctgaggtgaatgcatccccacttaagcactttgtcactgccaagaagaagatcaatggcatttttgagcagctgggggcctacatccaggagagcgccaccttccttgaagacacgtacaggaatgcagaactggaccccgttaccacagaagaacaggttctggacgtcaaaggttacctatccaaagtgagaggcatcagtgaggtgctggctcggaggcacatgaaagtggctttttttggccggacgagcaatgggaagagcaccgtgatcaatgccatgctctgggacaaagttctgccctctgggattggccacaccaccaattgcttcctgcgggtagagggcacagatggccatgaggcctttctccttaccgagggctcagaggaaaagaggagtgccaagactgtgaaccagctggcccatgccctccaccaggacaagcagctggaggagtgggagtagctcagaggggagggctgttggatgtatggggagctggcagagcaggtggcagtcactgggacaaggagggacttgcctctcttctcattattgtgtcctttgctttagtgtcagtcctggacttgtgcaggcctgttttgtgtagatctgttttggaagatggcatggtctaggtggttgaaggatgtagtagaaggatggatggtggaaggtggggacgttggtggctggctgaggtgcatgggccccacacaggacagctggagaatgggccgtccacttggcctcgttctgcgaggggctcatgggtctgagagcccccacccactaggcttgattgcatccctgttgtgccctttaagagacatgtttccaccccacccccaaccttgtcccaagtgccctggactaaatttcctgtgccagtgactgcagttggccaagggacaatgtggaaaacccagtgtccatctttccaccctccctgatctccagaaccttcgactgacccccttgtctttatgctgatgttgagttttgggattgttactggttgaagtgggggcagatgcctgtcaccaaggtgttgactgtgtgagaaaagcagtttgggtgacaaatcctgtgtggcacaagttggatcgcttcctagaaataagcaacacctctcccaaaaagcagcccacaaggcaggggcccagcagcccagccatcactcatctttgaggaaatgagttggtagcctctgtgcactgtttggtggccacatcacaggtgatgtcctgttcacatacctgcttgtatttaaagccctcagtctgtcctgttgtgtggggcgaagtgatggactctgccaggtggacatgctgtgggtggatgttcccggcgtgtgccgggcctgaatggacaggggccacttcacagcatgtcagggaaaatcactgtcacacaattccaatggattttgtgctctttttgaaaaaaaaaaattctttagcgtaaacatgaattttttttcaatgtagcccctggggaatgaatgaaattttgagcttcttcaatacgtaaaattaaatttataccactgagggagagaccctttctgaaagaagtatggccaaaagcactttaatgctgctgacattgttgtttttatgttcatttgctggagcgcaagacgtgctgacacagtgagttttctctgatgtatttaaggtgatgtatttgcttgagttactcctgtatcattgctcataatattggaaactaaaataaaacctagttggaaa

SEQ ID NO: 295278 - DNA, 4415 bp, Homo sapiens
acgcgccggcggaggagtggcgcgcggaggagtggcgcgctgagacgccgctcgaagcgccgagtcgcggggcagcagaggcgtaaggagtaggcggggcgagccggctgggctcagggtccaccagctcacccgggtcgaggggcaatctgaggcgactggtgacgcgcttatccacttccctcctcccgcctccccccggggtggcgctcgctggtgacgtagtgagtgtgatggccgccgcgaggccgggaaggtgaagtcaggactggtggagtcaacacagtcaatcaatagccaacctcaacctgagacaggacagaagagaactcagaatctttttgtcttttggacttcagccatgtccatgatgcctaccctgtgaagatctctcaccatccaaaaaacgcaatgtccctgctcttctctcgatgcaactctatcgtcacagtcaagaaaaataagagacacatggctgaggtgaatgcatccccacttaagcactttgtcactgccaagaagaagatcaatggcatttttgagcagctgggggcctacatccaggagagcgccaccttccttgaagacacgtacaggaatgcagaactggaccccgttaccacagaagaacaggttctggacgtcaaaggttacctatccaaagtgagaggcatcagtgaggtgctggctcggaggcacatgaaagtggctttttttggccggacgagcaatgggaagagcaccgtgatcaatgccatgctctgggacaaagttctgccctctgggattggccacaccaccaattgcttcctgcgggtagagggcacagatggccatgaggcctttctccttaccgagggctcagaggaaaagaggagtgccaagactgtgaaccagctggcccatgccctccaccaggacaagcagctccatgccggcagcctagtgagtgtgatgtggcccaactctaagtgcccacttctgaaggatgacctcgttttgatggacagccctggtattgatgtcaccacagagctggacagctggattgacaagttttgtctggatgctgatgtgtttgtgctggtggccaactcagagtccaccctgatgcagacggaaaagcacttcttccacaaggtgagtgagcgtctctcccggccaaacatcttcatcctgaacaaccgctgggatgcatctgcctcagagcccgagtacatggaggaggtgcggcggcagcacatggagcgttgtaccagcttcctggtggatgagctgggcgtggtggatcgatcccaggccggggaccgcatcttctttgtgtctgctaaggaggtgctcaacgccaggattcagaaagcccagggcatgcctgaaggagggggcgctctcgcagaaggctttcaagtgaggatgtttgagtttcagaattttgagaggagatttgaggagtgcatctcccagtctgcagtgaagaccaagtttgagcagcacacggtccgggccaagcagattgcagaggcggttcgactcatcatggactccctgcacatggcggctcgggagcagcaggtttactgcgaggaaatgcgtgaagagcggcaagaccgactgaaatttattgacaaacagctggagctcttggctcaagactataagctgcgaattaagcagattacggaggaagtggagaggcaggtgtcgactgcaatggccgaggagatcaggcgcctctctgtactggtggacgattaccagatggacttccacccttctccagtagtcctcaaggtttataagaatgagctgcaccgccacatagaggaaggactgggtcgaaacatgtctgaccgctgctccacggccatcaccaactccctgcagaccatgcagcaggacatgatagatggcttgaaacccctccttcctgtgtctgtgcggagtcagatagacatgctggtcccacgccagtgcttctccctcaactatgacctaaactgtgacaagctgtgtgctgacttccaggaagacattgagttccatttctctctcggatggaccatgctggtgaataggttcctgggccccaagaacagccgtcgggccttgatgggctacaatgaccaggtccagcgtcccatccctctgacgccagccaaccccagcatgcccccactgccacagggctcgctcacccaggaggagttcatggtttccatggttaccggcctggcctccttgacatccaggacctccatgggcattcttgttgttggaggagtggtgtggaaggcagtgggctggcggctcattgccctctcctttgggctctatggcctcctctacgtctatgagcgtctgacctggaccaccaaggccaaggagagggccttcaagcgccagtttgtggagcatgccagcgagaagctgcagcttgtcatcagctacactggctccaactgcagccaccaagtccagcaggaactgtctgggacctttgctcatctgtgtcagcaagttgacgtcacccgggagaacctggagcaggaaattgccgccatgaacaagaaaattgaggttcttgactcacttcagagcaaagcaaagctgctcaggaataaagccggttggttggacagtgagctcaacatgttcacacaccagtacctgcagcccagcagatagtgggcacctgaggcggagtctgcgtggagaggggcggtgctgccagccctaagtgccgtgtgggctcccccaggggcacgtgtggctcctgccccctggccactgccaagagaatgaagcacccagtctcgtaccattttgagccctccagcactacttattttcccccacctttgcctgctgttgctggaagagctggctcatacccccaaaggacactttcagcgacagctatggacagcatggtaccaaggagttaagttgaggctttttccagctttctctggttcatttgattgcttgataaggcctcaggatctcagcattgcacaatgcctcatggaagcctttgagggtatcacacagacacccccaccttcctccagcctgtgcgcacctgccctccttgcagcccagcacacctgcaggtgtaagggacgattggagtttcttcccagagagtctgtcccagaaggactgtggcttgtgtgtgtccatctcgcctgttggctcagtgcttcatcccatttgcagagcctcagacacgtcttggtggtgaggctcagttacccctgggcttaggctgaggcgggccctgtgctgggggtggtagaaaggatgctgctgaggcagctggaggagtgggagtagctcagaggggagggctgttggatgtatggggagctggcagagcaggtggcagtcactgggacaaggagggacttgcctctcttctcattattgtgtcctttgctttagtgtcagtcctggacttgtgcaggcctgttttgtgtagatctgttttggaagatggcatggtctaggtggttgaaggatgtagtagaaggatggatggtggaaggtggggacgttggtggctggctgaggtgcatgggccccacacaggacagctggagaatgggccgtccacttggcctcgttctgcgaggggctcatgggtctgagagcccccacccactaggcttgattgcatccctgttgtgccctttaagagacatgtttccaccccacccccaaccttgtcccaagtgccctggactaaatttcctgtgccagtgactgcagttggccaagggacaatgtggaaaacccagtgtccatctttccaccctccctgatctccagaaccttcgactgacccccttgtctttatgctgatgttgagttttgggattgttactggttgaagtgggggcagatgcctgtcaccaaggtgttgactgtgtgagaaaagcagtttgggtgacaaatcctgtgtggcacaagttggatcgcttcctagaaataagcaacacctctcccaaaaagcagcccacaaggcaggggcccagcagcccagccatcactcatctttgaggaaatgagttggtagcctctgtgcactgtttggtggccacatcacaggtgatgtcctgttcacatacctgcttgtatttaaagccctcagtctgtcctgttgtgtggggcgaagtgatggactctgccaggtggacatgctgtgggtggatgggagagaccctttctgaaagaagtatggccaaaagcactttaatgctgctgacattgttgtttttatgttcatttgctggagcgcaagacgtgctgacacagtgagttttctctgatgtatttaaggtgatgtatttgcttgagttactcctgtatcattgctcataatattggaaactaaaataaaacctagttggaaa

SEQ ID NO: 295279 - DNA, 3357 bp, Homo sapiens
acgcgccggcggaggagtggcgcgcggaggagtggcgcgctgagacgccgctcgaagcgccgagtcgcggggcagcagaggcgtaaggagtaggcggggcgagccggctgggctcagggtccaccagctcacccgggtcgaggggcaatctgaggcgactggtgacgcgcttatccacttccctcctcccgcctccccccggggtggcgctcgctggtgacgtagtgagtgtgatggccgccgcgaggccgggaaggtgaagtcaggactggtggagtcaacacagtcaatcaatagccaacctcaacctgagacaggacagaagagaactcagaatctttttgtcttttggacttcagccatgtccatgatgcctaccctgtgaagatctctcaccatccaaaaaacgcaatgtccctgctcttctctcgatgcaactctatcgtcacagtcaagaaaaataagagacacatggctgaggtgaatgcatccccacttaagcactttgtcactgccaagaagaagatcaatggcatttttgagcagctgggggcctacatccaggagagcgccaccttccttgaagacacgtacaggaatgcagaactggaccccgttaccacagaagaacaggttctggacgtcaaaggttacctatccaaagtgagaggcatcagtgaggtgctggctcggaggcacatgaaagtggctttttttggccggacgagcaatgggaagagcaccgtgatcaatgccatgctctgggacaaagttctgccctctgggattggccacaccaccaattgcttcctgcgggtagagggcacagatggccatgaggcctttctccttaccgagggctcagaggaaaagaggagtgccaagactgtgaaccagctggcccatgccctccaccaggacaagcagctccatgccggcagcctagtgagtgtgatgtggcccaactctaagtgcccacttctgaaggatgacctcgttttgatggacagccctggtattgatgtcaccacagagctggacagctggattgacaagttttgtctggatgctgatgtgtttgtgctggtggccaactcagagtccaccctgatgcagacggaaaagcacttcttccacaaggtgagtgagcgtctctcccggccaaacatcttcatcctgaacaaccgctgggatgcatctgcctcagagcccgagtacatggaggaggtgcggcggcagcacatggagcgttgtaccagcttcctggtggatgagctgggcgtggtggatcgatcccaggccggggaccgcatcttctttgtgtctgctaaggaggtgctcaacgccaggattcagaaagcccagggcatgcctgaaggagggggcgctctcgcagaaggctttcaagtgaggatgtttgagtttcagaattttgagaggagatttgaggagtgcatctcccagtctgcagtgaagaccaagtttgagcagcacacggtccgggccaagcagattgcagaggcggttcgactcatcatggactccctgcacatggcggctcgggagcagcaggtttactgcgaggaaatgcgtgaagagcggcaagaccgactgaaatttattgacaaacagctggagctcttggctcaagactataagctgcgaattaagcagattacggaggaagtggagaggcaggtgtcgactgcaatggccgaggagatcaggcgcctctctgtactggtggacgattaccagatggacttccacccttctccagtagtcctcaaggtttataagaatgagctgcaccgccacatagaggaaggactgggtcgaaacatgtctgaccgctgctccacggccatcaccaactccctgcagaccatgcagcaggacatgatagatggcttgaaacccctccttcctgtgtctgtgcggagtcagatagacatgctggtcccacgccagtgcttctccctcaactatgacctaaactgtgacaagctgtgtgctgacttccaggaagacattgagttccatttctctctcggatggaccatgctggtgaataggttcctgggccccaagaacagccgtcgggccttgatgggctacaatgaccaggtccagcgtcccatccctctgacgccagccaaccccagcatgcccccactgccacagggctcgctcacccaggaggagttcatggtttccatggttaccggcctggcctccttgacatccaggacctccatgggcattcttgttgttggaggagtggtgtggaaggcagtgggctggcggctcattgccctctcctttgggctctatggcctcctctacgtctatgagcgtctgacctggaccaccaaggccaaggagagggccttcaagcgccagtttgtggagcatgccagcgagaagctgcagcttgtcatcagctacactggctccaactgcagccaccaagtccagcaggaactgtctgggacctttgctcatctgtgtcagcaagttgacgtcacccgggagaacctggagcaggaaattgccgccatgaacaagaaaattgaggttcttgactcacttcagagcaaagcaaagctgctcaggaataaagccggttggttggacagtgagctcaacatgttcacacaccagtacctgcagcccagcagatagtgggcacctgaggcggagtctgcgtggagaggggcggtgctgccagccctaagtgccgtgtgggctcccccagcaggggcccagcagcccagccatcactcatctttgaggaaatgagttggtagcctctgtgcactgtttggtggccacatcacaggtgatgtcctgttcacatacctgcttgtatttaaagccctcagtctgtcctgttgtgtggggcgaagtgatggactctgccaggtggacatgctgtgggtggatgttcccggcgtgtgccgggcctgaatggacaggggccacttcacagcatgtcagggaaaatcactgtcacacaattccaatggattttgtgctctttttgaaaaaaaaaaattctttagcgtaaacatgaattttttttcaatgtagcccctggggaatgaatgaaattttgagcttcttcaatacgtaaaattaaatttataccactgagggagagaccctttctgaaagaagtatggccaaaagcactttaatgctgctgacattgttgtttttatgttcatttgctggagcgcaagacgtgctgacacagtgagttttctctgatgtatttaaggtgatgtatttgcttgagttactcctgtatcattgctcataatattggaaactaaaataaaacctagttggaaa

SEQ ID NO: 295280 - DNA, 984 bp, Homo sapiens
aatgtcggtatgtctaatgtcggtgtgtctaatgtcggtatgtctaatgtcggtgtgtctcatgtttccaccccacccccaaccttgtcccaagtgccctggactaaatttcctgtgccagtgactgcagttggccaagggacaatgtggaaaacccagtgtccatctttccaccctccctgatctccagaaccttcgactgacccccttgtctttatgctgatgttgagttttgggattgttactggttgaagtgggggcagatgcctgtcaccaaggtgttgactgtgtgagaaaagcagtttgggtgacaaatcctgtgtggcacaagttggatcgcttcctagaaataagcaacacctctcccaaaaagcagcccacaaggcaggggcccagcagcccagccatcactcatctttgaggaaatgagttggtagcctctgtgcactgtttggtggccacatcacaggtgatgtcctgttcacatacctgcttgtatttaaagccctcagtctgtcctgttgtgtggggcgaagtgatggactctgccaggtggacatgctgtgggtggatgttcccggcgtgtgccgggcctgaatggacaggggccacttcacagcatgtcagggaaaatcactgtcacacaattccaatggattttgtgctctttttgaaaaaaaaaaattctttagcgtaaacatgaattttttttcaatgtagcccctggggaatgaatgaaattttgagcttcttcaatacgtaaaattaaatttataccactgagggagagaccctttctgaaagaagtatggccaaaagcactttaatgctgctgacattgttgtttttatgttcatttgctggagcgcaagacgtgctgacacagtgagttttctctgatgtatttaaggtgatgtatttgcttgagttactcctgtatcattgctcataatattggaaactaaaataaaacctagttggaaa

SEQ ID NO: 295281 - DNA, 1679 bp, Homo sapiens
tcaagtattccagccctctgtcccacagaatagagaattaagtgagatactttacagtagctgaacacattggctttcagtcagttcttctgttcctcaatagtcagctgttccacagtcctcaagcccagttttgttcctagttttgctctgtcctcttctcccctctctggatgtacctttcccagggctcctgcagggacctccgtggtgcctcaaacccgcacatggcggaatacgtgtgcacagtcaggattggtcccacacctctgcgtttttttccccagggcacttcctcacatgccagcgcaactccccaatacctcaatgagtaagcttccctcagggatgagtttgtttggcttgaaacctgattagacatgttttgtacaccagtgttttttttttttggacaccggatccatctcccttttcggttttctaataagtcaggactggtggagtcaacacagtcaatcaatagccaacctcaacctgagacaggacagaagagaactcagaatctttttgtcttttggacttcagccatgtccatgatgcctaccctgtgaagatctctcaccatccaaaaaacgcaatgtccctgctcttctctcgatgcaactctatcgtcacagtcaagaaaaataagagacacatggctgaggtgaatgcatccccacttaagcactttgtcactgccaagaagaagatcaatggcatttttgagcagctgggggcctacatccaggagagcgccaccttccttgaagacacgtacaggaatgcagaactggactaaatttcctgtgccagtgactgcagttggccaagggacaatgtggaaaacccagtgtccatctttccaccctccctgatctccagaaccttcgactgacccccttgtctttatgctgatgttgagttttgggattgttactggttgaagtgggggcagatgcctgtcaccaaggtgttgactgtgtgagaaaagcagtttgggtgacaaatcctgtgtggcacaagttggatcgcttcctagaaataagcaacacctctcccaaaaagcagcccacaaggcaggggcccagcagcccagccatcactcatctttgaggaaatgagttggtagcctctgtgcactgtttggtggccacatcacaggtgatgtcctgttcacatacctgcttgtatttaaagccctcagtctgtcctgttgtgtggggcgaagtgatggactctgccaggtggacatgctgtgggtggatgttcccggcgtgtgccgggcctgaatggacaggggccacttcacagcatgtcagggaaaatcactgtcacacaattccaatggattttgtgctctttttgaaaaaaaaaaattctttagcgtaaacatgaattttttttcaatgtagcccctggggaatgaatgaaattttgagcttcttcaatacgtaaaattaaatttataccactgagggagagaccctttctgaaagaagtatggccaaaagcactttaatgctgctgacattgttgtttttatgttcatttgctggagcgcaagacgtgctgacacagtgagttttctctgatgtatttaaggtgatgtatttgcttgagttactcctgtatcattgctcataatattggaaactaaaataaaacctagttggaaa

SEQ ID NO: 295282 - DNA, 2551 bp, Homo sapiens
acgcgccggcggaggagtggcgcgcggaggagtggcgcgctgagacgccgctcgaagcgccgagtcgcggggcagcagaggcgtaaggagtaggcggggcgagccggctgggctcagggtccaccagctcacccgggtcgaggggcaatctgaggcgactggtgacgcgcttatccacttccctcctcccgcctccccccggggtggcgctcgctggtgacgtagtgagtgtgatggccgccgcgaggccgggaaggtgaagtcaggactggtggagtcaacacagtcaatcaatagccaacctcaacctgagacaggacagaagagaactcagaatctttttgtcttttggacttcagccatgtccatgatgcctaccctgtgaagatctctcaccatccaaaaaacgcaatgtccctgctcttctctcgatgcaactctatcgtcacagtcaagaaaaataagagacacatggctgaggtgaatgcatccccacttaagcactttgtcactgccaagaagaagatcaatggcatttttgagcagctgggggcctacatccaggagagcgccaccttccttgaagacacgtacaggaatgcagaactggaccccgttaccacagaagaacaggttctggacgtcaaaggttacctatccaaagtgagaggcatcagtgaggtgctggctcggaggcacatgaaagtggctttttttggccggacgagcaatgggaagagcaccgtgatcaatgccatgctctgggacaaagttctgccctctgggattggccacaccaccaattgcttcctgcgggtagagggcacagatggccatgaggcctttctccttaccgagggctcagaggaaaagaggagtgccaagactgtgaaccagctggcccatgccctccaccaggacaagcagctccatgccggcagcctagtgagtgtgatgtggcccaactctaagtgcccacttctgaaggatgacctcgttttgatggacagccctggtattgatgtcaccacagagctggacagctggattgacaagttttgtctggatgctgatgtgtttgtgctggtggccaactcagagtccaccctgatgcagacggaaaagcacttcttccacaaggtgagtgagcgtctctcccggccaaacatcttcatcctgaacaaccgctgggatgcatctgcctcagagcccgagtacatggaggaggtgcggcggcagcacatggagcgttgtaccagcttcctggtggatgagctgggcgtggtggatcgatcccaggccggggaccgcatcttctttgtgtctgctaaggaggtgctcaacgccaggattcagaaagcccagggcatgcctgaaggagggggcgctctcgcagaaggctttcaagtgaggatgtttgagtttcagaattttgagaggagatttgaggagtgcatctcccagtctgcagtgaagaccaagtttgagcagcacacggtccgggccaagcagattgcagaggcggttcgactcatcatggactccctgcacatggcggctcgggagcagcaggtttactgcgaggaaatgcgtgaagagcggcaagaccgactgaaatttattgacaaacagctggagctcttggctcaagactataagctgcgaattaagcagattacggaggaagtggagaggcaggtgtcgactgcaatggccgaggagatcaggcgcctctctgtactggtggacgattaccagatggacttccacccttctccagtagtcctcaaggtttataagaatgagctgcaccgccacatagaggaaggactgggtcgaaacatgtctgaccgctgctccacggccatcaccaactccctgcagaccatgcagcaggacatgatagatggcttgaaacccctccttcctgtgtctgtgcggagtcagatagacatgctggtcccacgccagtgcttctccctcaactatgacctaaactgtgacaagctgtgcactgtttggtggccacatcacaggtgatgtcctgttcacatacctgcttgtatttaaagccctcagtctgtcctgttgtgtggggcgaagtgatggactctgccaggtggacatgctgtgggtggatgttcccggcgtgtgccgggcctgaatggacaggggccacttcacagcatgtcagggaaaatcactgtcacacaattccaatggattttgtgctctttttgaaaaaaaaaaattctttagcgtaaacatgaattttttttcaatgtagcccctggggaatgaatgaaattttgagcttcttcaatacgtaaaattaaatttataccactgagggagagaccctttctgaaagaagtatggccaaaagcactttaatgctgctgacattgttgtttttatgttcatttgctggagcgcaagacgtgctgacacagtgagttttctctgatgtatttaaggtgatgtatttgcttgagttactcctgtatcattgctcataatattggaaactaaaataaaacctagttggaaa

SEQ ID NO: 295283 - DNA, 3787 bp, Homo sapiens
  misc_feature (3608)..(3609): n is a, c, g, or t
  misc_feature (3611)..(3611): n is a, c, g, or t
  misc_feature (3616)..(3616): n is a, c, g, or t
  misc_feature (3651)..(3651): n is a, c, g, or t
  misc_feature (3684)..(3684): n is a, c, g, or t
  misc_feature (3686)..(3686): n is a, c, g, or t
  misc_feature (3746)..(3746): n is a, c, g, or t
acgcgccggcggaggagtggcgcgcggaggagtggcgcgctgagacgccgctcgaagcgccgagtcgcggggcagcagaggcgtaaggagtaggcggggcgagccggctgggctcagggtccaccagctcacccgggtcgaggggcaatctgaggcgactggtgacgcgcttatccacttccctcctcccgcctccccccggggtggcgctcgctggtgacgtagtgagtgtgatggccgccgcgaggccgggaaggtgaagtcaggactggtggagtcaacacagtcaatcaatagccaacctcaacctgagacaggacagaagagaactcagaatctttttgtcttttggacttcagccatgtccatgatgcctaccctgtgaagatctctcaccatccaaaaaacgcaatgtccctgctcttctctcgatgcaactctatcgtcacagtcaagaaaaataagagacacatggctgaggtgaatgcatccccacttaagcactttgtcactgccaagaagaagatcaatggcatttttgagcagctgggggcctacatccaggagagcgccaccttccttgaagacacgtacaggaatgcagaactggaccccgttaccacagaagaacaggttctggacgtcaaaggttacctatccaaagtgagaggcatcagtgaggtgctggctcggaggcacatgaaagtggctttttttggccggacgagcaatgggaagagcaccgtgatcaatgccatgctctgggacaaagttctgccctctgggattggccacaccaccaattgcttcctgcgggtagagggcacagatggccatgaggcctttctccttaccgagggctcagaggaaaagaggagtgccaagactgtgaaccagctggcccatgccctccaccaggacaagcagctccatgccggcagcctagtgagtgtgatgtggcccaactctaagtgcccacttctgaaggatgacctcgttttgatggacagccctggtattgatgtcaccacagagctggacagctggattgacaagttttgtctggatgctgatgtgtttgtgctggtggccaactcagagtccaccctgatgcagacggaaaagcacttcttccacaaggtgagtgagcgtctctcccggccaaacatcttcatcctgaacaaccgctgggatgcatctgcctcagagcccgagtacatggaggaggtgcggcggcagcacatggagcgttgtaccagcttcctggtggatgagctgggcgtggtggatcgatcccaggccggggaccgcatcttctttgtgtctgctaaggaggtgctcaacgccaggattcagaaagcccagggcatgcctgaaggagggggcgctctcgcagaaggctttcaagtgaggatgtttgagtttcagaattttgagaggagatttgaggagtgcatctcccagtctgcagtgaagaccaagtttgagcagcacacggtccgggccaagcagattgcagaggcggttcgactcatcatggactccctgcacatggcggctcgggagcagcaggtttactgcgaggaaatgcgtgaagagcggcaagaccgactgaaatttattgacaaacagctggagctcttggctcaagactataagctgcgaattaagcagattacggaggaagtggagaggcaggtgtcgactgcaatggccgaggagatcaggcgcctctctgtactggtggacgattaccagatggacttccacccttctccagtagtcctcaaggtttataagaatgagctgcaccgccacatagaggaaggactgggtcgaaacatgtctgaccgctgctccacggccatcaccaactccctgcagaccatgcagcaggacatgatagatggcttgaaacccctccttcctgtgtctgtgcggagtcagatagacatgctggtcccacgccagtgcttctccctcaactatgacctaaactgtgacaagctgtgtgctgacttccaggaagacattgagttccatttctctctcggatggaccatgctggtgaataggttcctgggccccaagaacagccgtcgggccttgatgggctacaatgaccaggtccagcgtcccatccctctgacgccagccaaccccagcatgcccccactgccacagggctcgctcacccaggaggagttcatggtttccatggttaccggcctggcctccttgacatccaggacctccatgggcattcttgttgttggaggagtggtgtggaaggcagtgggctggcggctcattgccctctcctttgggctctatggcctcctctacgtctatgagcgtctgacctggaccaccaaggccaaggagagggccttcaagcgccagtttgtggagcatgccagcgagaagctgcagcttgtcatcagctacactggctccaactgcagccaccaagtccagcaggaactgtctgggacctttgctcatctgtgtcagcaagttgacgtcacccgggagaacctggagcaggaaattgccgccatgaacaagaaaattgaggttcttgactcacttcagagcaaagcaaagctgctcaggaataaagccggttggttggacagtgagctcaacatgttcacacaccagtacctgcagcccagcagatagtgggcacctgaggcggagtctgcgtggagaggggcggtgctgccagccctaagtgccgtgtgggctcccccaggggcacgtgtggctcctgccccctggccactgccaagagaatgaagcacccagtctcgtaccattttgagccctccagcactacttattttcccccacctttgcctgctgttgctggaagagctggctcatacccccaaaggacactttcagcgacagctatggacagcatggtaccaaggagttaagttgaggctttttccagctttctctggttcatttgattgcttgataaggcctcaggatctcagcattgcacaatgcctcatggaagcctttgagggtatcacacagacacccccaccttcctccagcctgtgcgcacctgccctccttgcagcccagcacacctgcaggtgtaagggacgattggagtttcttcccagagagtctgtcccagaaggactgtggcttgtgtgtgtccatctcgcctgttggctcagtgcttcatcccatttgcagagcctcagacacgtcttggtggtgaggctcagttacccctgggcttaggctgaggcgggccctgtgctgggggtggtagaaaggatgctgctgaggcagctggaggagtgggagtagctcagaggggagggctgttggatgtatggggagctggcagagcaggtggcagtcactgggacaaggagggacttgcctctcttctcattattgtgtcctttgctttagtgtcagtcctggacttgtgcaggcctgttttgtgtagatctgttttggaagatggcatggtctaggtggttgaaggatgtagtagaaggatggatggtggaaggtggggacgttggtggctggctgaggtgcatgggccccacacaggacagctggagcctaanncnagggntaactgagcctcaccaccaagacgtgtctaaggcnctgcaaatgggatgaagcactgagccaacaggngngatggacacacacaagccacagtccttcttcccagagagtctgtcccagaaggactgttngcttgtgtcggaattcgccgatactaacgggctccagagtc

SEQ ID NO: 295284 - DNA, 409 bp, Homo sapiens
cctctctctctctctctctctctctctctctctctctctctctctctctccgggaaaatcactgtcacacaattccaatggattttgtgctctttttgaaaaaaaaaaattctttagcgtaaacatgaattttttttcaatgtagcccctggggaatgaatgaaattttgagcttcttcaatacgtaaaattaaatttataccactgagggagagaccctttctgaaagaagtatggccaaaagcactttaatgctgctgacattgttgtttttatgttcatttgctggagcgcaagacgtgctgacacagtgagttttctctgatgtatttaaggtgatgtatttgcttgagttactcctgtatcattgctcataatattggaaactaaaataaaacctagttggaaa

SEQ ID NO: 295285 - DNA, 1280 bp, Homo sapiens
acgcgccggcggaggagtggcgcgcggaggagtggcgcgctgagacgccgctcgaagcgccgagtcgcggggcagcagaggcgtaaggagtaggcggggcgagccggctgggctcagggtccaccagctcacccgggtcgaggggcaatctgaggcgactggtgacgcgcttatccacttccctcctcccgcctccccccggggtggcgctcgctggtgacgtagtgagtgtgatggccgccgcgaggccgggaaggtgaagtcaggactggtggagtcaacacagtcaatcaatagccaacctcaacctgagacaggacagaagagaactcagaatctttttgtcttttggacttcagccatgtccatgatgcctaccctgtgaagatctctcaccatccaaaaaacgcaatgtccctgctcttctctcgatgcaactctatcgtcacagtcaagaaaaataagagacacatggctgaggtgaatgcatccccacttaagcactttgtcactgccaagaagaagatcaatggcatttttgagcagctgggggcctacatccaggagagcgccaccttccttgaagacacgtacaggaatgcagaactggaccccgttaccacagaagaacaggttctggacgtcaaaggttacctatccaaagtgagaggcatcagtgaggtgctggctcggaggcacatgaaagtggctttttttggccggacgagcaatgggaagagcaccgtgatcaatgccatgctctgggacaaagttctgccctctgggattggccacaccaccaattgcttcctgcgggtagagggcacagatggccatgaggcctttctccttaccgagggctcagaggaaaagaggagtgccaagactgtgaaccagctggcccatgccctccaccaggacaagcagctccatgccggcagcctagtgagtgtgatgtggcccaactctaagtgcccacttctgaaggatgacctcgttttgatggacagccctggtattgatgtcaccacagagctggacagctggattgacaagttttgtctggatgctgatgtgtttgtgctggtggccaactcagagtccaccctgatgcagacggaaaagcacttcttccacaaggtgagtgagcgtctctcccggccaaacatcttcatcctgaacaaccgctgggatgcatctgcctcagagcccgagtacatggaggagggacggggagacatggagggtgaacattctgggataaagggatggggatgtca

SEQ ID NO: 295286 - DNA, 3079 bp, Homo sapiens
acgcgccggcggaggagtggcgcgcggaggagtggcgcgctgagacgccgctcgaagcgccgagtcgcggggcagcagaggcgtaaggagtaggcggggcgagccggctgggctcagggtccaccagctcacccgggtcgaggggcaatctgaggcgactggtgacgcgcttatccacttccctcctcccgcctccccccggggtggcgctcgctggtgacgtagtgagtgtgatggccgccgcgaggccgggaaggtgaagtcaggactggtggagtcaacacagtcaatcaatagccaacctcaacctgagacaggacagaagagaactcagaatctttttgtcttttggacttcagccatgtccatgatgcctaccctgtgaagatctctcaccatccaaaaaacgcaatgtccctgctcttctctcgatgcaactctatcgtcacagtcaagaaaaataagagacacatggctgaggtgaatgcatccccacttaagcactttgtcactgccaagaagaagatcaatggcatttttgagcagctgggggcctacatccaggagagcgccaccttccttgaagacacgtacaggaatgcagaactggaccccgttaccacagaagaacaggttctggacgtcaaaggttacctatccaaagtgagaggcatcagtgaggtgctggctcggaggcacatgaaagtggctttttttggccggacgagcaatgggaagagcaccgtgatcaatgccatgctctgggacaaagttctgccctctgggattggccacaccaccaattgcttcctgcgggtagagggcacagatggccatgaggcctttctccttaccgagggctcagaggaaaagaggagtgccaagactgtgaaccagctggcccatgccctccaccaggacaagcagctccatgccggcagcctagtgagtgtgatgtggcccaactctaagtgcccacttctgaaggatgacctcgttttgatggacagccctggtattgatgtcaccacagagctggacagctggattgacaagttttgtctggatgctgatgtgtttgtgctggtggccaactcagagtccaccctgatgcagacggaaaagcacttcttccacaaggtgagtgagcgtctctcccggccaaacatcttcatcctgaacaaccgctgggatgcatctgcctcagagcccgagtacatggaggaggtgcggcggcagcacatggagcgttgtaccagcttcctggtggatgagctgggcgtggtggatcgatcccaggccggggaccgcatcttctttgtgtctgctaaggaggtgctcaacgccaggattcagaaagcccagggcatgcctgaaggagggggcgctctcgcagaaggctttcaagtgaggatgtttgagtttcagaattttgagaggagatttgaggagtgcatctcccagtctgcagtgaagaccaagtttgagcagcacacggtccgggccaagcagattgcagaggcggttcgactcatcatggactccctgcacatggcggctcgggagcagcaggtttactgcgaggaaatgcgtgaagagcggcaagaccgactgaaatttattgacaaacagctggagctcttggctcaagactataagctgcgaattaagcagattacggaggaagtggagaggcaggtgtcgactgcaatggccgaggagatcaggcgcctctctgtactggtggacgattaccagatggacttccacccttctccagtagtcctcaaggtttataagaatgagctgcaccgccacatagaggaaggactgggtcgaaacatgtctgaccgctgctccacggccatcaccaactccctgcagaccatgcagcaggacatgatagatggcttgaaacccctccttcctgtgtctgtgcggagtcagatagacatgctggtcccacgccagtgcttctccctcaactatgacctaaactgtgacaagctgtgtgctgacttccaggaagacattgagttccatttctctctcggatggaccatgctggtgaataggttcctgggccccaagaacagccgtcgggccttgatgggctacaatgaccaggtccagcgtcccatccctctgacgccagccaaccccagcatgcccccactgccacagggctcgctcacccaggaggagttcatggtttccatggttaccggcctggcctccttgacatccaggacctccatgggcattcttgttgttggaggagtggtgtggaaggcagtgggctggcggctcattgccctctcctttgggctctatggcctcctctacgtctatgagcgtctgacctggaccaccaaggccaaggagagggccttcaagcgccagtttgtggagcatgccagcgagaagctgcagcttgtcatcagctacactggctccaactgcagccaccaagtccagcacaggggcccagcagcccagccatcactcatctttgaggaaatgagttggtagcctctgtgcactgtttggtggccacatcacaggtgatgtcctgttcacatacctgcttgtatttaaagccctcagtctgtcctgttgtgtggggcgaagtgatggactctgccaggtggacatgctgtgggtggatgttcccggcgtgtgccgggcctgaatggacaggggccacttcacagcatgtcagggaaaatcactgtcacacaattccaatggattttgtgctctttttgaaaaaaaaaaattctttagcgtaaacatgaattttttttcaatgtagcccctggggaatgaatgaaattttgagcttcttcaatacgtaaaattaaatttataccactgagggagagaccctttctgaaagaagtatggccaaaagcactttaatgctgctgacattgttgtttttatgttcatttgctggagcgcaagacgtgctgacacagtgagttttctctgatgtatttaaggtgatgtatttgcttgagttactcctgtatcattgctcataatattggaaactaaaataaaacctagttggaaa

SEQ ID NO: 295287 - DNA, 2739 bp, Homo sapiens
acgcgccggcggaggagtggcgcgcggaggagtggcgcgctgagacgccgctcgaagcgccgagtcgcggggcagcagaggcgtaaggagtaggcggggcgagccggctgggctcagggtccaccagctcacccgggtcgaggggcaatctgaggcgactggtgacgcgcttatccacttccctcctcccgcctccccccggggtggcgctcgctggtgacgtagtgagtgtgatggccgccgcgaggccgggaaggtgaagtcaggactggtggagtcaacacagtcaatcaatagccaacctcaacctgagacaggacagaagagaactcagaatctttttgtcttttggacttcagccatgtccatgatgcctaccctgtgaagatctctcaccatccaaaaaacgcaatgtccctgctcttctctcgatgcaactctatcgtcacagtcaagaaaaataagagacacatggctgaggtgaatgcatccccacttaagcactttgtcactgccaagaagaagatcaatggcatttttgagcagctgggggcctacatccaggagagcgccaccttccttgaagacacgtacaggaatgcagaactggaccccgttaccacagaagaacaggttctggacgtcaaaggttacctatccaaagtgagaggcatcagtgaggtgctggctcggaggcacatgaaagtggctttttttggccggacgagcaatgggaagagcaccgtgatcaatgccatgctctgggacaaagttctgccctctgggattggccacaccaccaattgcttcctgcgggtagagggcacagatggccatgaggcctttctccttaccgagggctcagaggaaaagaggagtgccaagactgtgaaccagctggcccatgccctccaccaggacaagcagctccatgccggcagcctagtgagtgtgatgtggcccaactctaagtgcccacttctgaaggatgacctcgttttgatggacagccctggtattgatgtcaccacagagctggacagctggattgacaagttttgtctggatgctgatgtgtttgtgctggtggccaactcagagtccaccctgatgcagacggaaaagcacttcttccacaaggtgagtgagcgtctctcccggccaaacatcttcatcctgaacaaccgctgggatgcatctgcctcagagcccgagtacatggaggaggtgcggcggcagcacatggagcgttgtaccagcttcctggtggatgagctgggcgtggtggatcgatcccaggccggggaccgcatcttctttgtgtctgctaaggaggtgctcaacgccaggattcagaaagcccagggcatgcctgaaggagggggcgctctcgcagaaggctttcaagtgaggatgtttgagtttcagaattttgagaggagatttgaggagtgcatctcccagtctgcagtgaagaccaagtttgagcagcacacggtccgggccaagcagattgcagaggcggttcgactcatcatggactccctgcacatggcggctcgggagcagcaggtttactgcgaggaaatgcgtgaagagcggcaagaccgactgaaatttattgacaaacagctggagctcttggctcaagactataagctgcgaattaagcagattacggaggaagtggagaggcaggtgtcgactgcaatggccgaggagatcaggcgcctctctgtactggtggacgattaccagatggacttccacccttctccagtagtcctcaaggtttataagaatgagctgcaccgccacatagaggaaggactgggtcgaaacatgtctgaccgctgctccacggccatcaccaactccctgcagaccatgcagcaggacatgatagatggcttgaaacccctccttcctgtgtctgtgcggagtcagatagacatgctggtcccacgccagtgcttctccctcaactatgacctaaactgtgacaagctgtgtgctgacttccaggaagacattgagttccatttctctctcggatggaccatgctggtgaataggttcctgggccccaagaacagccgtcgggccttgatgggctacaatgaccaggtccagcgtcccatccctctgacgccagccaaccccagcatgcccccactgccacagggctcgctcacccaggaggagttcatggtttccatggttaccggcctggcctccttgacatccaggacctccatgggcattcttgttgttggaggagtggtgtggaaggcagtgggctggcggctcattgccctctcctttgggctctatggcctcctctacgtctatgagcgtctgacctggaccaccaaggccaaggagagggccttcaagcgccagtttgtggagcatgccagcgagaagctgcagcttgtcatcagctacactggctccaactgcagccaccaagtccagcaggaactgtctgggacctttgctcatctgtgtcagcaagttgacgtcacccgggagaacgggagagaccctttctgaaagaagtatggccaaaagcactttaatgctgctgacattgttgtttttatgttcatttgctggagcgcaagacgtgctgacacagtgagttttctctgatgtatttaaggtgatgtatttgcttgagttactcctgtatcattgctcataatattggaaactaaaataaaacctagttggaaa

SEQ ID NO: 295288 - DNA, 1365 bp, Homo sapiens
acgcgccggcggaggagtggcgcgcggaggagtggcgcgctgagacgccgctcgaagcgccgagtcgcggggcagcagaggcgtaaggagtaggcggggcgagccggctgggctcagggtccaccagctcacccgggtcgaggggcaatctgaggcgactggtgacgcgcttatccacttccctcctcccgcctccccccggggtggcgctcgctggtgacgtagtgagtgtgatggccgccgcgaggccgggaaggtgaagtcaggactggtggagtcaacacagtcaatcaatagccaacctcaacctgagacaggacagaagagaactcagaatctttttgtcttttggacttcagccatgtccatgatgcctaccctgtgaagatctctcaccatccaaaaaacgcaatgtccctgctcttctctcgatgcaactctatcgtcacagtcaagaaaaataagagacacatggctgaggtgaatgcatccccacttaagcactttgtcactgccaagaagaagatcaatggcatttttgagcagctgggggcctacatccaggagagcgccaccttccttgaagacacgtacaggaatgcagaactggaccccgttaccacagaagaacaggttctggacgtcaaaggttacctatccaaagtgagaggcatcagtgaggtgctggctcggaggcacatgaaagtggctttttttggccggacgagcaatgggaagagcaccgtgatcaatgccatgctctgggacaaagttctgccctctgggattggccacaccaccaattgcttcctgcgggtagagggcacagatggccatgaggcctttctccttaccgagggctcagaggaaaagaggagtgccaagactgtgaaccagctggcccatgccctccaccaggacaagcagctccatgccggcagcctagtgagtgtgatgtggcccaactctaagtgcccacttctgaaggatgacctcgttttgatggacaggtaagagggaggtgccctcctaggaggtccaaactggaaggcaccaggtttccatttctggataatctaggccagggtccctgggccccatccttgctctgcttaagtattactacctttcagatgggctcaaccaaatcctctggcctcttggctttcctctggagtctggttactatacctatttatcagtaccctgcagatgtcccagggatggtctgtaaaagataggagggatgctcaaaagttggtgggggaggttctcaatctcagcccagtgccagcatgtgtactgggggtggggagttgtggcggagtcagaggtgtattttatttcccttgaagaaacactttg

SEQ ID NO: 295289 - DNA, 815 bp, Homo sapiens
aggtccccttccacactgttgaagctttgttcttttgctctttgcactaaatcttgctactgctcactctttgggtccacactgcttttatgagctgtaacactcaccgtgaaggtctgcagcttcactcctgaagccagcaagaccacgaacccaccaggaggaatgaacaactccagacgcaccaccctaagagctgtaacactcaccgcgaaggtctgcagcttcactcctgagccagcgagaccatgaacccaccaaaaggaagaaactctgaacacatcttgacatcagaaggaagaaacaaactccagacacgccacctttaagaactgtaataacactcaccgcgagggtctgcggctttgttcttgaagtcagtgagaccaagaacccacaattctggactcaataactttattcataattaccaaaaatgagaaaaaaacaagatgtacttcaataggaccgcggcggctaggtcacctcctccggacgccgacacgcgctgccctggcaaccgtcaccagggaaacaagcgacgtcacttgcgcgttttcaacgctactctacgggggccgagggggcgccaagagttctgaaagtgacagaggcgctgatggcgcgctgggctggatccaagcgagcacgatctcgagtgcgctggagattttaaatcttctggagtatatttttaaaaaagttttgtggaccaaacgttctgcacagagatgcccattccgctctcctgttggggagttaaaaagcgaacgatctcaccatgaaatttaaagtagccattcagatatatttga

SEQ ID NO: 295290 - DNA, 788 bp, Homo sapiens
agcgtgtgggcagcgcgtgtcggcgtccggaggaggtgacctagccgccgcggtcctagaagggagaagtggagagagaccgctggcaggatggcagcagatgaaagctcacagaacactttgcggctccagttcaaggcaatgcaggagatgcagcacaaacggttacagaagcagatggagaaaaagagggaaaaagaactgagcctcaaaagcagagctgacgaccaagaggagcccttggaggtttcagatggcctcagccttctccacgcaggggagccaaactcgaaaaatagctttgagaagagggtgcttgaagatgagattgaacaccttcgaaatgagctcagggaaacggtggacgagaacgggcgattgtataagctgctgaaggaaagggactttgaaatcaaacacctcaaaaagaaaatagaagaggacagatttgccttcacagggacagccggtgtagccggagacgtggtcgccaccaaaattgtggagctatcaaaaaagaaccggctgttgatggcagaatcagagggtgcaaaaaccagggtgaagcagctgaccaatcgcatccaggagctggagcgggaagtgaggggccttggtcattctccctctggaggggactcctagcatgggcaagagggaacctccctagcttctccatatgtagccgggagagctgaagttggaaggttaagaggctttctcaagtcacgcagtatatggtggtgctgcattttaaatccaattctgttgccctccaacaggcttct

SEQ ID NO: 295291 - DNA, 774 bp, Homo sapiens
agcgtgtgggcagcgcgtgtcggcgtccggaggaggtgacctagccgccgcggtcctagaagggagaagtggagagagaccgctggcaggatggcagcagatgaaagctcacagaacactttgcggctccagttcaaggcaatgcaggagatgcagcacaaacggttacagaagcagatggagaaaaagagggaaaaagaactgagcctcaaaagcagagctgacgaccaagaggagcccttggaggtttcagatggcctcagccttctccacgcaggggagccaaactcgaaaaatagctttgagaagagggtgcttgaagatgagattgaacaccttcgaaatgagctcagggaaacggtggacgagaacgggcgattgtataagctgctgaaggaaagggactttgaaatcaaacacctcaaaaagaaaatagaagaggacagatttgccttcacagggacagccggtgtagccggagacgtggtcgccaccaaaattgtggagctatcaaaaaagaaccggctgttgatggcagaatcagagggtgcaaaaaccagggtgaagcagctgaccaatcgcatccaggagctggagcgggaactgcagacagccctgaccaggctgtcagccaagggggccaccgacgcaggagccaagccaccgagggcccagatgggagacagagcattgctggagaccccagaggtgaaggccctgcaggacaggctggtggccaccaacttgaagatgagtgacctccgaaaccagatc

SEQ ID NO: 295292 - DNA, 3883 bp, Homo sapiens
caagactggaagcagagagagagagcaagagtgagagagagcgagcgagcgtagtcaggagatggtgttgtattccaggagaaaaacgtttcttcatttcaactcaaacttgctgctaaagcgcctaaatctgaaaaggaaatggacccagaatatgaagagaaaatgaaagccgaccgagcaaagagatttgaatttttactgaagcagacagaactttttgcacatttcattcagccttcagcacagaaatctccaacatctccactgaacatgaaattgggacgtccccgaataaagaaagatgaaaagcagagcttaatttctgctggagactaccgccataggcgcacagagcaagaagaagatgaagagctactgtctgagagtcggaaaacatctaatgtgtgtattagatttgaggtgtcaccttcatatgtgaaaggggggccactgagagattatcagattcgaggactgaattggttgatctctttatatgaaaatggagtcaatggcattttggctgatgaaatgggccttgggaaaactttacaaacaattgctttgcttggttacctgaaacactaccgaaatattcctggacctcacatggttttagttccaaagtctactttacacaactggatgaatgaatttaaacgatgggtcccatctctccgtgtcatttgttttgtcggagacaaggatgccagagctgcttttattcgtgatgaaatgatgccaggagagtgggatgtttgcgttacttcttatgagatggtaattaaagaaaaatctgtattcaaaaagtttcactggcgatacctggtcattgatgaagctcacagaataaagaatgaaaaatctaagctttcagagattgttcgtgagttcaagtcgactaaccgcttgctcctaactggaacacctttgcagaataacctgcatgaactgtgggccttactcaactttttattgcctgatgtctttaattctgcagatgactttgattcttggtttgacactaaaaattgtcttggtgatcaaaaactcgtggaaagacttcatgcagttttaaaaccatttttgttacgccgtataaaaactgatgtagagaagagtctgccacctaaaaaggaaataaagatttacttggggctgagtaagatgcaacgagaatggtatacaaaaatcctgatgaaagatattgatgttttaaactcttctggcaagatggacaagatgcgactcttaaacattctgatgcagcttcgaaagtgttgtaatcatccatatctgtttgatggtgctgaacctggtccaccttataccactgatgagcatattgtcagcaacagtggtaaaatggtagttctggataaactattggccaaactcaaagaacagggttcaagggttctcattttcagccagatgactcgcttgctggatattttggaagattattgcatgtggcgtggttatgagtattgtcgactggatggacaaaccccgcatgaagaaagagaggataaattcctagaagtggaatttctgggtcaaagggaagcaatagaggcttttaatgctcctaatagtagcaaattcatctttatgctaagtaccagggctggaggtctcggaattaacctggcaagtgctgatgtggttatactatatgattcagactggaacccacaggttgatctacaagctatggatcgagcacatcgtattggtcagaagaaaccagtacgtgtattccgtctcatcactgacaacactgttgaagagaggattgtagaaagagctgagataaaactgagactcgattcaattgttatacaacaaggaagactcattgaccaacagtctaacaagctggcaaaagaggaaatgttacaaatgatacggcatggagccacccatgtttttgcttctaaagagagtgagttgacagatgaagacattacaactattctggaaagaggggaaaagaagactgcagagatgaatgaacgcctgcaaaaaatgggagagtcttctctaagaaattttagaatggacattgaacaaagtttatacaaatttgagggagaagattatagagaaaaacagaagcttggcatggtggaatggattgaacctcctaaacgagaacgcaaagcaaactacgcagtggatgcctactttagagaggctttgcgtgtcagcgagccaaagattccaaaggctccacggcctccaaaacagccaaatgttcaggattttcaatttttcccaccacgcttatttgagctcctggaaaaggaaattctttattatcggaagacaataggctataaggttccaaggaatcctgatatcccaaatccagctctggctcaaagagaagagcaaaaaaagattgatggagctgaacctcttacaccagaagagactgaagaaaaggaaaaacttctcacacaaggtttcacaaactggactaaacgagattttaaccagtttattaaagctaatgagaaatatggaagagatgacattgataacatagctcgagaggtagagggcaaatcccctgaggaggtcatggagtattcagctgtattttgggaacgttgcaatgaattacaggacattgagaaaattatggctcaaattgaacgtggagaagcaagaattcaacgaaggatcagtatcaagaaagccctggatgccaaaattgcaagatacaaggctccatttcatcagttgcgcattcagtatggaaccagcaaaggaaagaactatactgaggaagaagatagattcttgatttgtatgttacacaaaatgggctttgatagagaaaatgtatatgaagaattaagacagtgtgtacgaaatgctccccagtttagatttgactggtttatcaagtctaggactgccatggaattccagagacgctgtaacactctgatttcattgattgagaaagaaaatatggaaattgaggaaagagagagagcagaaaagaagaaacgggcaactaaaactccaatggtaaaattttcagcattttcctaacttttagatttaacattgttgggccatttaaaatgtgcatattggagcagaacattaaatctgtttccattttagtcacagaaaagaaaagcagagtcagctactgagagctctggaaagaaggatgtcaagaaggtgaaatcctaaagcctagaaataaagttttaaatgggaaactgctattttcttgttcccatcttcaaatgctaattgccagttccagtgtattcatggtactctaagaaaaatctctttggttttgatttcttgcatattttatatattttacaatgctttctacctgaaatgtgtagctttatattttatggcattctagtatttttgtgtactgtattttgtgcatttcatgtcttcatcaaaatcctctcagtccttgttcttttgaagcttgtgctgaggttttagcttttctatgttttatatgccgctgctttgaaagagaacctagattctatagttgtattattgttgtttcatactttaaatttatatggctgtggaaaaacgaattaaaatgttttgaggagaaagactttttcacttctttgttgctttcttttctattgagtctgggcttgtttgtgttactgcatactgtgattagcataataattgtttctttgaggtcatctaaatatttttttcctaaaggaataaagggtgaggaaagaaaaatattaaaaaagctaatatttgatactgtgcttgctgtcagtatgcattacatttaaattattctctattcaagtgggaaaatataataaagaaatgtctataagaaaaaaaaaaa

SEQ ID NO: 295293 - DNA, 4399 bp, Homo sapiens
aaaattcactatgatcaagtgggattcatcctaggaatgtaagactggttccacatatgcaaattaataagcattatagatcacattagcagaaccaagaacaaagaccatatgatcttttcaatagacattgaaaaagtgtttgataaaattcaatattcctttattttaaaaaccctcaaaaactcagtatacatggagtataataataataaaggccataaatttacagcaaacttcatactgaatggagaaaaattgaaagcctttcccctaaaatctggaaaaaaccaagaatgctcactttcaccatttttatgcaacataccctgctccatctagctctttccagtgcagccactgccgccgcccaggagccctcgtcccctgccttgtccccctactcgttcccgctcccacggcatggagcaggacactgccgcagtggcagccaccgtggcagccgcggatgcgaccgccactatcgtggtcatagaggacgagcagcccgggccgtccacctctcaggaggagggagcggccgccgcggccaccgaagccaccgcggccacggagaagggcgagaagaagaaggagaaaaacgtttcttcatttcaactcaaacttgctgctaaagcgcctaaatctgaaaaggaaatggacccagaatatgaagagaaaatgaaagccgaccgagcaaagagatttgaatttttactgaagcagacagaactttttgcacatttcattcagccttcagcacagaaatctccaacatctccactgaacatgaaattgggacgtccccgaataaagaaagatgaaaagcagagcttaatttctgctggagactaccgccataggcgcacagagcaagaagaagatgaagagctactgtctgagagtcggaaaacatctaatgtgtgtattagatttgaggtgtcaccttcatatgtgaaaggggggccactgagagattatcagattcgaggactgaattggttgatctctttatatgaaaatggagtcaatggcattttggctgatgaaatgggccttgggaaaactttacaaacaattgctttgcttggttacctgaaacactaccgaaatattcctggacctcacatggttttagttccaaagtctactttacacaactggatgaatgaatttaaacgatgggtcccatctctccgtgtcatttgttttgtcggagacaaggatgccagagctgcttttattcgtgatgaaatgatgccaggagagtgggatgtttgcgttacttcttatgagatggtaattaaagaaaaatctgtattcaaaaagtttcactggcgatacctggtcattgatgaagctcacagaataaagaatgaaaaatctaagctttcagagattgttcgtgagttcaagtcgactaaccgcttgctcctaactggaacacctttgcagaataacctgcatgaactgtgggccttactcaactttttattgcctgatgtctttaattctgcagatgactttgattcttggtttgacactaaaaattgtcttggtgatcaaaaactcgtggaaagacttcatgcagttttaaaaccatttttgttacgccgtataaaaactgatgtagagaagagtctgccacctaaaaaggaaataaagatttacttggggctgagtaagatgcaacgagaatggtatacaaaaatcctgatgaaagatattgatgttttaaactcttctggcaagatggacaagatgcgactcttaaacattctgatgcagcttcgaaagtgttgtaatcatccatatctgtttgatggtgctgaacctggtccaccttataccactgatgagcatattgtcagcaacagtggtaaaatggtagttctggataaactattggccaaactcaaagaacagggttcaagggttctcattttcagccagatgactcgcttgctggatattttggaagattattgcatgtggcgtggttatgagtattgtcgactggatggacaaaccccgcatgaagaaagagaggataaattcctagaagtggaatttctgggtcaaagggaagcaatagaggcttttaatgctcctaatagtagcaaattcatctttatgctaagtaccagggctggaggtctcggaattaacctggcaagtgctgatgtggttatactatatgattcagactggaacccacaggttgatctacaagctatggatcgagcacatcgtattggtcagaagaaaccagtacgtgtattccgtctcatcactgacaacactgttgaagagaggattgtagaaagagctgagataaaactgagactcgattcaattgttatacaacaaggaagactcattgaccaacagtctaacaagctggcaaaagaggaaatgttacaaatgatacggcatggagccacccatgtttttgcttctaaagagagtgagttgacagatgaagacattacaactattctggaaagaggggaaaagaagactgcagagatgaatgaacgcctgcaaaaaatgggagagtcttctctaagaaattttagaatggacattgaacaaagtttatacaaatttgagggagaagattatagagaaaaacagaagcttggcatggtggaatggattgaacctcctaaacgagaacgcaaagcaaactacgcagtggatgcctactttagagaggctttgcgtgtcagcgagccaaagattccaaaggctccacggcctccaaaacagccaaatgttcaggattttcaatttttcccaccacgcttatttgagctcctggaaaaggaaattctttattatcggaagacaataggctataaggttccaaggaatcctgatatcccaaatccagctctggctcaaagagaagagcaaaaaaagattgatggagctgaacctcttacaccagaagagactgaagaaaaggaaaaacttctcacacaaggtttcacaaactggactaaacgagattttaaccagtttattaaagctaatgagaaatatggaagagatgacattgataacatagctcgagaggtagagggcaaatcccctgaggaggtcatggagtattcagctgtattttgggaacgttgcaatgaattacaggacattgagaaaattatggctcaaattgaacgtggagaagcaagaattcaacgaaggatcagtatcaagaaagccctggatgccaaaattgcaagatacaaggctccatttcatcagttgcgcattcagtatggaaccagcaaaggaaagaactatactgaggaagaagatagattcttgatttgtatgttacacaaaatgggctttgatagagaaaatgtatatgaagaattaagacagtgtgtacgaaatgctccccagtttagatttgactggtttatcaagtctaggactgccatggaattccagagacgctgtaacactctgatttcattgattgagaaagaaaatatggaaattgaggaaagagagagagcagaaaagaagaaacgggcaactaaaactccaatggtaaaattttcagcattttcctaacttttagatttaacattgttgggccatttaaaatgtgcatattggagcagaacattaaatctgtttccattttagtcacagaaaagaaaagcagagtcagctactgagagctctggaaagaaggatgtcaagaaggtgaaatcctaaagcctagaaataaagttttaaatgggaaactgctattttcttgttcccatcttcaaatgctaattgccagttccagtgtattcatggtactctaagaaaaatctctttggttttgatttcttgcatattttatatattttacaatgctttctacctgaaatgtgtagctttatattttatggcattctagtatttttgtgtactgtattttgtgcatttcatgtcttcatcaaaatcctctcagtccttgttcttttgaagcttgtgctgaggttttagcttttctatgttttatatgccgctgctttgaaagagaacctagattctatagttgtattattgttgtttcatactttaaatttatatggctgtggaaaaacgaattaaaatgttttgaggagaaagactttttcacttctttgttgctttcttttctattgagtctgggcttgtttgtgttactgcatactgtgattagcataataattgtttctttgaggtcatctaaatatttttttcctaaaggaataaagggtgaggaaagaaaaatattaaaaaagctaatatttgatactgtgcttgctgtcagtatgcattacatttaaattattctctattcaagtgggaaaatataataaagaaatgtctataagaaaaaaaaaaa

SEQ ID NO: 295294 - DNA, 4368 bp, Homo sapiens
aaaattcactatgatcaagtgggattcatcctaggaatgtaagactggttccacatatgcaaattaataagcattatagatcacattagcagaaccaagaacaaagaccatatgatcttttcaatagacattgaaaaagtgtttgataaaattcaatattcctttattttaaaaaccctcaaaaactcagtatacatggagtataataataataaaggccataaatttacagcaaacttcatactgaatggagaaaaattgaaagcctttcccctaaaatctggaaaaaaccaagaatgctcactttcaccatttttatgcaacataccctgctccatctagctctttccagtgcagccactgccgccgcccaggagccctcgtcccctgccttgtccccctactcgttcccgctcccacggcatggagcaggacactgccgcagtggcagccaccgtggcagccgcggatgcgaccgccactatcgtggtcatagaggacgagcagcccgggccgtccacctctcaggaggagggagcggccgccgcggccaccgaagccaccgcggccacggagaagggcgagaagaagaaggagaaaaacgtttcttcatttcaactcaaacttgctgctaaagcgcctaaatctgaaaaggaaatggacccagaatatgaagagaaaatgaaagccgaccgagcaaagagatttgaatttttactgaagcagacagaactttttgcacatttcattcagccttcagcacagaaatctccaacatctccactgaacatgaaattgggacgtccccgaataaagaaagatgaaaagcagagcttaatttctgctggagactaccgccataggcgcacagagcaagaagaagatgaagagctactgtctgagagtcggaaaacatctaatgtgtgtattagatttgaggtgtcaccttcatatgtgaaaggggggccactgagagattatcagattcgaggactgaattggttgatctctttatatgaaaatggagtcaatggcattttggctgatgaaatgggccttgggaaaactttacaaacaattgctttgcttggttacctgaaacactaccgaaatattcctggacctcacatggttttagttccaaagtctactttacacaactggatgaatgaatttaaacgatgggtcccatctctccgtgtcatttgttttgtcggagacaaggatgccagagctgcttttattcgtgatgaaatgatgccaggagagtgggatgtttgcgttacttcttatgagatggtaattaaagaaaaatctgtattcaaaaagtttcactggcgatacctggtcattgatgaagctcacagaataaagaatgaaaaatctaagctttcagagattgttcgtgagttcaagtcgactaaccgcttgctcctaactggaacacctttgcagaataacctgcatgaactgtgggccttactcaactttttattgcctgatgtctttaattctgcagatgactttgattcttggtttgacactaaaaattgtcttggtgatcaaaaactcgtggaaagacttcatgcagttttaaaaccatttttgttacgccgtataaaaactgatgtagagaagagtctgccacctaaaaaggaaataaagatttacttggggctgagtaagatgcaacgagaatggtatacaaaaatcctgatgaaagatattgatgttttaaactcttctggcaagatggacaagatgcgactcttaaacattctgatgcagcttcgaaagtgttgtaatcatccatatctgtttgatggtgctgaacctggtccaccttataccactgatgagcatattgtcagcaacagtggtaaaatggtagttctggataaactattggccaaactcaaagaacagggttcaagggttctcattttcagccagatgactcgcttgctggatattttggaagattattgcatgtggcgtggttatgagtattgtcgactggatggacaaaccccgcatgaagaaagagaggataaattcctagaagtggaatttctgggtcaaagggaagcaatagaggcttttaatgctcctaatagtagcaaattcatctttatgctaagtaccagggctggaggtctcggaattaacctggcaagtgctgatgtggttatactatatgattcagactggaacccacaggttgatctacaagctatggatcgagcacatcgtattggtcagaagaaaccagtacgtgtattccgtctcatcactgacaacactgttgaagagaggattgtagaaagagctgagataaaactgagactcgattcaattgttatacaacaaggaagactcattgaccaacagtctaacaagctggcaaaagaggaaatgttacaaatgatacggcatggagccacccatgtttttgcttctaaagagagtgagttgacagatgaagacattacaactattctggaaagaggggaaaagaagactgcagagatgaatgaacgcctgcaaaaaatgggagagtcttctctaagaaattttagaatggacattgaacaaagtttatacaaatttgagggagaagattatagagaaaaacagaagcttggcatggtggaatggattgaacctcctaaacgagaacgcaaagcaaactacgcagtggatgcctactttagagaggctttgcgtgtcagcgagccaaagattccaaaggctccacggcctccaaaacagccaaatgttcaggattttcaatttttcccaccacgcttatttgagctcctggaaaaggaaattctttattatcggaagacaataggctataaggttccaaggaatcctgatatcccaaatccagctctggctcaaagagaagagcaaaaaaagattgatggagctgaacctcttacaccagaagagactgaagaaaaggaaaaacttctcacacaaggtttcacaaactggactaaacgagattttaaccagtttattaaagctaatgagaaatatggaagagatgacattgataacatagctcgagaggtagagggcaaatcccctgaggaggtcatggagtattcagctgtattttgggaacgttgcaatgaattacaggacattgagaaaattatggctcaaattgaacgtggagaagcaagaattcaacgaaggatcagtatcaagaaagccctggatgccaaaattgcaagatacaaggctccatttcatcagttgcgcattcagtatggaaccagcaaaggaaagaactatactgaggaagaagatagattcttgatttgtatgttacacaaaatgggctttgatagagaaaatgtatatgaagaattaagacagtgtgtacgaaatgctccccagtttagatttgactggtttatcaagtctaggactgccatggaattccagagacgctgtaacactctgatttcattgattgagaaagaaaatatggaaattgaggaaagagagagagcagaaaagaagaaacgggcaactaaaactccaatgatttaacattgttgggccatttaaaatgtgcatattggagcagaacattaaatctgtttccattttagtcacagaaaagaaaagcagagtcagctactgagagctctggaaagaaggatgtcaagaaggtgaaatcctaaagcctagaaataaagttttaaatgggaaactgctattttcttgttcccatcttcaaatgctaattgccagttccagtgtattcatggtactctaagaaaaatctctttggttttgatttcttgcatattttatatattttacaatgctttctacctgaaatgtgtagctttatattttatggcattctagtatttttgtgtactgtattttgtgcatttcatgtcttcatcaaaatcctctcagtccttgttcttttgaagcttgtgctgaggttttagcttttctatgttttatatgccgctgctttgaaagagaacctagattctatagttgtattattgttgtttcatactttaaatttatatggctgtggaaaaacgaattaaaatgttttgaggagaaagactttttcacttctttgttgctttcttttctattgagtctgggcttgtttgtgttactgcatactgtgattagcataataattgtttctttgaggtcatctaaatatttttttcctaaaggaataaagggtgaggaaagaaaaatattaaaaaagctaatatttgatactgtgcttgctgtcagtatgcattacatttaaattattctctattcaagtgggaaaatataataaagaaatgtctataagaaaaaaaaaaa

SEQ ID NO: 295295 - DNA, 4061 bp, Homo sapiens
ttaaagaagggggggcctgagcgaaggggttggaagcggagtgattccccacccctgctccatctagctctttccagtgcagccactgccgccgcccaggagccctcgtcccctgccttgtccccctactcgttcccgctcccacggcatggagcaggacactgccgcagtggcagccaccgtggcagccgcggatgcgaccgccactatcgtggtcatagaggacgagcagcccgggccgtccacctctcaggaggagaaaaacgtttcttcatttcaactcaaacttgctgctaaagcgcctaaatctgaaaaggaaatggacccagaatatgaagagaaaatgaaagccgaccgagcaaagagatttgaatttttactgaagcagacagaactttttgcacatttcattcagccttcagcacagaaatctccaacatctccactgaacatgaaattgggacgtccccgaataaagaaagatgaaaagcagagcttaatttctgctggagactaccgccataggcgcacagagcaagaagaagatgaagagctactgtctgagagtcggaaaacatctaatgtgtgtattagatttgaggtgtcaccttcatatgtgaaaggggggccactgagagattatcagattcgaggactgaattggttgatctctttatatgaaaatggagtcaatggcattttggctgatgaaatgggccttgggaaaactttacaaacaattgctttgcttggttacctgaaacactaccgaaatattcctggacctcacatggttttagttccaaagtctactttacacaactggatgaatgaatttaaacgatgggtcccatctctccgtgtcatttgttttgtcggagacaaggatgccagagctgcttttattcgtgatgaaatgatgccaggagagtgggatgtttgcgttacttcttatgagatggtaattaaagaaaaatctgtattcaaaaagtttcactggcgatacctggtcattgatgaagctcacagaataaagaatgaaaaatctaagctttcagagattgttcgtgagttcaagtcgactaaccgcttgctcctaactggaacacctttgcagaataacctgcatgaactgtgggccttactcaactttttattgcctgatgtctttaattctgcagatgactttgattcttggtttgacactaaaaattgtcttggtgatcaaaaactcgtggaaagacttcatgcagttttaaaaccatttttgttacgccgtataaaaactgatgtagagaagagtctgccacctaaaaaggaaataaagatttacttggggctgagtaagatgcaacgagaatggtatacaaaaatcctgatgaaagatattgatgttttaaactcttctggcaagatggacaagatgcgactcttaaacattctgatgcagcttcgaaagtgttgtaatcatccatatctgtttgatggtgctgaacctggtccaccttataccactgatgagcatattgtcagcaacagtggtaaaatggtagttctggataaactattggccaaactcaaagaacagggttcaagggttctcattttcagccagatgactcgcttgctggatattttggaagattattgcatgtggcgtggttatgagtattgtcgactggatggacaaaccccgcatgaagaaagagaggataaattcctagaagtggaatttctgggtcaaagggaagcaatagaggcttttaatgctcctaatagtagcaaattcatctttatgctaagtaccagggctggaggtctcggaattaacctggcaagtgctgatgtggttatactatatgattcagactggaacccacaggttgatctacaagctatggatcgagcacatcgtattggtcagaagaaaccagtacgtgtattccgtctcatcactgacaacactgttgaagagaggattgtagaaagagctgagataaaactgagactcgattcaattgttatacaacaaggaagactcattgaccaacagtctaacaagctggcaaaagaggaaatgttacaaatgatacggcatggagccacccatgtttttgcttctaaagagagtgagttgacagatgaagacattacaactattctggaaagaggggaaaagaagactgcagagatgaatgaacgcctgcaaaaaatgggagagtcttctctaagaaattttagaatggacattgaacaaagtttatacaaatttgagggagaagattatagagaaaaacagaagcttggcatggtggaatggattgaacctcctaaacgagaacgcaaagcaaactacgcagtggatgcctactttagagaggctttgcgtgtcagcgagccaaagattccaaaggctccacggcctccaaaacagccaaatgttcaggattttcaatttttcccaccacgcttatttgagctcctggaaaaggaaattctttattatcggaagacaataggctataaggttccaaggaatcctgatatcccaaatccagctctggctcaaagagaagagcaaaaaaagattgatggagctgaacctcttacaccagaagagactgaagaaaaggaaaaacttctcacacaaggtttcacaaactggactaaacgagattttaaccagtttattaaagctaatgagaaatatggaagagatgacattgataacatagctcgagaggtagagggcaaatcccctgaggaggtcatggagtattcagctgtattttgggaacgttgcaatgaattacaggacattgagaaaattatggctcaaattgaacgtggagaagcaagaattcaacgaaggatcagtatcaagaaagccctggatgccaaaattgcaagatacaaggctccatttcatcagttgcgcattcagtatggaaccagcaaaggaaagaactatactgaggaagaagatagattcttgatttgtatgttacacaaaatgggctttgatagagaaaatgtatatgaagaattaagacagtgtgtacgaaatgctccccagtttagatttgactggtttatcaagtctaggactgccatggaattccagagacgctgtaacactctgatttcattgattgagaaagaaaatatggaaattgaggaaagagagagagcagaaaagaagaaacgggcaactaaaactccaatggtaaaattttcagcattttcctaacttttagatttaacattgttgggccatttaaaatgtgcatattggagcagaacattaaatctgtttccattttagtcacagaaaagaaaagcagagtcagctactgagagctctggaaagaaggatgtcaagaaggtgaaatcctaaagcctagaaataaagttttaaatgggaaactgctattttcttgttcccatcttcaaatgctaattgccagttccagtgtattcatggtactctaagaaaaatctctttggttttgatttcttgcatattttatatattttacaatgctttctacctgaaatgtgtagctttatattttatggcattctagtatttttgtgtactgtattttgtgcatttcatgtcttcatcaaaatcctctcagtccttgttcttttgaagcttgtgctgaggttttagcttttctatgttttatatgccgctgctttgaaagagaacctagattctatagttgtattattgttgtttcatactttaaatttatatggctgtggaaaaacgaattaaaatgttttgaggagaaagactttttcacttctttgttgctttcttttctattgagtctgggcttgtttgtgttactgcatactgtgattagcataataattgtttctttgaggtcatctaaatatttttttcctaaaggaataaagggtgaggaaagaaaaatattaaaaaagctaatatttgatactgtgcttgctgtcagtatgcattacatttaaattattctctattcaagtgggaaaatataataaagaaatgtctataagaaaaaaaaaaa

SEQ ID NO: 295296 - DNA, 4300 bp, Homo sapiens
aaaattcactatgatcaagtgggattcatcctaggaatgtaagactggttccacatatgcaaattaataagcattatagatcacattagcagaaccaagaacaaagaccatatgatcttttcaatagacattgaaaaagtgtttgataaaattcaatattcctttattttaaaaaccctcaaaaactcagtatacatggagtataataataataaaggccataaatttacagcaaacttcatactgaatggagaaaaattgaaagcctttcccctaaaatctggaaaaaaccaagaatgctcactttcaccatttttatgcaacataccctgctccatctagctctttccagtgcagccactgccgccgcccaggagccctcgtcccctgccttgtccccctactcgttcccgctcccacggcatggagcaggacactgccgcagtggcagccaccgtggcagccgcggatgcgaccgccactatcgtggtcatagaggacgagcagcccgggccgtccacctctcaggaggagggagcggccgccgcggccaccgaagccaccgcggccacggagaagggcgagaagaagaaggagaaaaacgtttcttcatttcaactcaaacttgctgctaaagcgcctaaatctgaaaaggaaatggacccagaatatgaagagaaaatgaaagccgaccgagcaaagagatttgaatttttactgaagcagacagaactttttgcacatttcattcagccttcagcacagaaatctccaacatctccactgaacatgaaattgggacgtccccgaataaagaaagatgaaaagcagagcttaatttctgctggagactaccgccataggcgcacagagcaagaagaagatgaagagctactgtctgagagtcggaaaacatctaatgtgtgtattagatttgaggtgtcaccttcatatgtgaaaggggggccactgagagattatcagattcgaggactgaattggttgatctctttatatgaaaatggagtcaatggcattttggctgatgaaatgggccttgggaaaactttacaaacaattgctttgcttggttacctgaaacactaccgaaatattcctggacctcacatggttttagttccaaagtctactttacacaactggatgaatgaatttaaacgatgggtcccatctctccgtgtcatttgttttgtcggagacaaggatgccagagctgcttttattcgtgatgaaatgatgccaggagagtgggatgtttgcgttacttcttatgagatggtaattaaagaaaaatctgtattcaaaaagtttcactggcgatacctggtcattgatgaagctcacagaataaagaatgaaaaatctaagctttcagagattgttcgtgagttcaagtcgactaaccgcttgctcctaactggaacacctttgcagaataacctgcatgaactgtgggccttactcaactttttattgcctgatgtctttaattctgcagatgactttgattcttggtttgacactaaaaattgtcttggtgatcaaaaactcgtggaaagacttcatgcagttttaaaaccatttttgttacgccgtataaaaactgatgtagagaagagtctgccacctaaaaaggaaataaagatttacttggggctgagtaagatgcaacgagaatggtatacaaaaatcctgatgaaagatattgatgttttaaactcttctggcaagatggacaagatgcgactcttaaacattctgatgcagcttcgaaagtgttgtaatcatccatatctgtttgatggtgctgaacctggtccaccttataccactgatgagcatattgtcagcaacagtggtaaaatggtagttctggataaactattggccaaactcaaagaacagggttcaagggttctcattttcagccagatgactcgcttgctggatattttggaagattattgcatgtggcgtggttatgagtattgtcgactggatggacaaaccccgcatgaagaaagagaggataaattcctagaagtggaatttctgggtcaaagggaagcaatagaggcttttaatgctcctaatagtagcaaattcatctttatgctaagtaccagggctggaggtctcggaattaacctggcaagtgctgatgtggttatactatatgattcagactggaacccacaggttgatctacaagctatggatcgagcacatcgtattggtcagaagaaaccagtacgtgtattccgtctcatcactgacaacactgttgaagagaggattgtagaaagagctgagataaaactgagactcgattcaattgttatacaacaaggaagactcattgaccaacagtctaacaagctggcaaaagaggaaatgttacaaatgatacggcatggagccacccatgtttttgcttctaaagagagtgagttgacagatgaagacattacaactattctggaaagaggggaaaagaagactgcagagatgaatgaacgcctgcaaaaaatgggagagtcttctctaagaaattttagaatggacattgaacaaagtttatacaaatttgagggagaagattatagagaaaaacagaagcttggcatggtggaatggattgaacctcctaaacgagaacgcaaagcaaactacgcagtggatgcctactttagagaggctttgcgtgtcagcgagccaaagattccaaaggctccacggcctccaaaacagccaaatgttcaggattttcaatttttcccaccacgcttatttgagctcctggaaaaggaaattctttattatcggaagacaataggctataaggttccaaggaatcctgatatcccaaatccagctctggctcaaagagaagagcaaaaaaagattgatggagctgaacctcttacaccagaagagactgaagaaaaggaaaaacttctcacacaaggtttcacaaactggactaaacgagattttaaccagtttattaaagctaatgagaaatatggaagagatgacattgataacatagctcgagaggtagagggcaaatcccctgaggaggtcatggagtattcagctgtattttgggaacgttgcaatgaattacaggacattgagaaaattatggctcaaattgaacgtggagaagcaagaattcaacgaaggatcagtatcaagaaagccctggatgccaaaattgcaagatacaaggctccatttcatcagttgcgcattcagtatggaaccagcaaaggaaagaactatactgaggaagaagatagattcttgatttgtatgttacacaaaatgggctttgatagagaaaatgtatatgaagaattaagacagtgtgtacgaaatgctccccagtttagatttgactggtttatcaagtctaggactgccatggaattccagagacgctgtaacactctgatttcattgattgagaaagaaaatatggaaattgaggaaagagagagagcagaaaagaagaaacgggcaactaaaactccaatgtcacagaaaagaaaagcagagtcagctactgagagctctggaaagaaggatgtcaagaaggtgaaatcctaaagcctagaaataaagttttaaatgggaaactgctattttcttgttcccatcttcaaatgctaattgccagttccagtgtattcatggtactctaagaaaaatctctttggttttgatttcttgcatattttatatattttacaatgctttctacctgaaatgtgtagctttatattttatggcattctagtatttttgtgtactgtattttgtgcatttcatgtcttcatcaaaatcctctcagtccttgttcttttgaagcttgtgctgaggttttagcttttctatgttttatatgccgctgctttgaaagagaacctagattctatagttgtattattgttgtttcatactttaaatttatatggctgtggaaaaacgaattaaaatgttttgaggagaaagactttttcacttctttgttgctttcttttctattgagtctgggcttgtttgtgttactgcatactgtgattagcataataattgtttctttgaggtcatctaaatatttttttcctaaaggaataaagggtgaggaaagaaaaatattaaaaaagctaatatttgatactgtgcttgctgtcagtatgcattacatttaaattattctctattcaagtgggaaaatataataaagaaatgtctataagaaaaaaaaaaa

SEQ ID NO: 295297 - DNA, 4088 bp, Homo sapiens
ttaaagaagggggggcctgagcgaaggggttggaagcggagtgattccccacccctgctccatctagctctttccagtgcagccactgccgccgcccaggagccctcgtcccctgccttgtccccctactcgttcccgctcccacggcatggagcaggacactgccgcagtggcagccaccgtggcagccgcggatgcgaccgccactatcgtggtcatagaggacgagcagcccgggccgtccacctctcaggaggagggagcggccgccgcggccaccgaagccaccgcggccacggagaagggcgagaagaagaaggagaaaaacgtttcttcatttcaactcaaacttgctgctaaagcgcctaaatctgaaaaggaaatggacccagaatatgaagagaaaatgaaagccgaccgagcaaagagatttgaatttttactgaagcagacagaactttttgcacatttcattcagccttcagcacagaaatctccaacatctccactgaacatgaaattgggacgtccccgaataaagaaagatgaaaagcagagcttaatttctgctggagactaccgccataggcgcacagagcaagaagaagatgaagagctactgtctgagagtcggaaaacatctaatgtgtgtattagatttgaggtgtcaccttcatatgtgaaaggggggccactgagagattatcagattcgaggactgaattggttgatctctttatatgaaaatggagtcaatggcattttggctgatgaaatgggccttgggaaaactttacaaacaattgctttgcttggttacctgaaacactaccgaaatattcctggacctcacatggttttagttccaaagtctactttacacaactggatgaatgaatttaaacgatgggtcccatctctccgtgtcatttgttttgtcggagacaaggatgccagagctgcttttattcgtgatgaaatgatgccaggagagtgggatgtttgcgttacttcttatgagatggtaattaaagaaaaatctgtattcaaaaagtttcactggcgatacctggtcattgatgaagctcacagaataaagaatgaaaaatctaagctttcagagattgttcgtgagttcaagtcgactaaccgcttgctcctaactggaacacctttgcagaataacctgcatgaactgtgggccttactcaactttttattgcctgatgtctttaattctgcagatgactttgattcttggtttgacactaaaaattgtcttggtgatcaaaaactcgtggaaagacttcatgcagttttaaaaccatttttgttacgccgtataaaaactgatgtagagaagagtctgccacctaaaaaggaaataaagatttacttggggctgagtaagatgcaacgagaatggtatacaaaaatcctgatgaaagatattgatgttttaaactcttctggcaagatggacaagatgcgactcttaaacattctgatgcagcttcgaaagtgttgtaatcatccatatctgtttgatggtgctgaacctggtccaccttataccactgatgagcatattgtcagcaacagtggtaaaatggtagttctggataaactattggccaaactcaaagaacagggttcaagggttctcattttcagccagatgactcgcttgctggatattttggaagattattgcatgtggcgtggttatgagtattgtcgactggatggacaaaccccgcatgaagaaagagaggaagcaatagaggcttttaatgctcctaatagtagcaaattcatctttatgctaagtaccagggctggaggtctcggaattaacctggcaagtgctgatgtggttatactatatgattcagactggaacccacaggttgatctacaagctatggatcgagcacatcgtattggtcagaagaaaccagtacgtgtattccgtctcatcactgacaacactgttgaagagaggattgtagaaagagctgagataaaactgagactcgattcaattgttatacaacaaggaagactcattgaccaacagtctaacaagctggcaaaagaggaaatgttacaaatgatacggcatggagccacccatgtttttgcttctaaagagagtgagttgacagatgaagacattacaactattctggaaagaggggaaaagaagactgcagagatgaatgaacgcctgcaaaaaatgggagagtcttctctaagaaattttagaatggacattgaacaaagtttatacaaatttgagggagaagattatagagaaaaacagaagcttggcatggtggaatggattgaacctcctaaacgagaacgcaaagcaaactacgcagtggatgcctactttagagaggctttgcgtgtcagcgagccaaagattccaaaggctccacggcctccaaaacagccaaatgttcaggattttcaatttttcccaccacgcttatttgagctcctggaaaaggaaattctttattatcggaagacaataggctataaggttccaaggaatcctgatatcccaaatccagctctggctcaaagagaagagcaaaaaaagattgatggagctgaacctcttacaccagaagagactgaagaaaaggaaaaacttctcacacaaggtttcacaaactggactaaacgagattttaaccagtttattaaagctaatgagaaatatggaagagatgacattgataacatagctcgagaggtagagggcaaatcccctgaggaggtcatggagtattcagctgtattttgggaacgttgcaatgaattacaggacattgagaaaattatggctcaaattgaacgtggagaagcaagaattcaacgaaggatcagtatcaagaaagccctggatgccaaaattgcaagatacaaggctccatttcatcagttgcgcattcagtatggaaccagcaaaggaaagaactatactgaggaagaagatagattcttgatttgtatgttacacaaaatgggctttgatagagaaaatgtatatgaagaattaagacagtgtgtacgaaatgctccccagtttagatttgactggtttatcaagtctaggactgccatggaattccagagacgctgtaacactctgatttcattgattgagaaagaaaatatggaaattgaggaaagagagagagcagaaaagaagaaacgggcaactaaaactccaatggtaaaattttcagcattttcctaacttttagatttaacattgttgggccatttaaaatgtgcatattggagcagaacattaaatctgtttccattttagtcacagaaaagaaaagcagagtcagctactgagagctctggaaagaaggatgtcaagaaggtgaaatcctaaagcctagaaataaagttttaaatgggaaactgctattttcttgttcccatcttcaaatgctaattgccagttccagtgtattcatggtactctaagaaaaatctctttggttttgatttcttgcatattttatatattttacaatgctttctacctgaaatgtgtagctttatattttatggcattctagtatttttgtgtactgtattttgtgcatttcatgtcttcatcaaaatcctctcagtccttgttcttttgaagcttgtgctgaggttttagcttttctatgttttatatgccgctgctttgaaagagaacctagattctatagttgtattattgttgtttcatactttaaatttatatggctgtggaaaaacgaattaaaatgttttgaggagaaagactttttcacttctttgttgctttcttttctattgagtctgggcttgtttgtgttactgcatactgtgattagcataataattgtttctttgaggtcatctaaatatttttttcctaaaggaataaagggtgaggaaagaaaaatattaaaaaagctaatatttgatactgtgcttgctgtcagtatgcattacatttaaattattctctattcaagtgggaaaatataataaagaaatgtctataagaaaaaaaaaaa

SEQ ID NO: 295298 - DNA, 4137 bp, Homo sapiens
aaaattcactatgatcaagtgggattcatcctaggaatgtaagactggttccacatatgcaaattaataagcattatagatcacattagcagaaccaagaacaaagaccatatgatcttttcaatagacattgaaaaagtgtttgataaaattcaatattcctttattttaaaaaccctcaaaaactcagtatacatggagtataataataataaaggccataaatttacagcaaacttcatactgaatggagaaaaattgaaagcctttcccctaaaatctggaaaaaaccaagaatgctcactttcaccatttttatgcaacataccctgctccatctagctctttccagtgcagccactgccgccgcccaggagccctcgtcccctgccttgtccccctactcgttcccgctcccacggcatggagcaggacactgccgcagtggcagccaccgtggcagccgcggatgcgaccgccactatcgtggtcatagaggacgagcagcccgggccgtccacctctcaggaggagggagcggccgccgcggccaccgaagccaccgcggccacggagaagggcgagaagaagaaggagaaaaacgtttcttcatttcaactcaaacttgctgctaaagcgcctaaatctgaaaaggaaatggacccagaatatgaagagaaaatgaaagccgaccgagcaaagagatttgaatttttactgaagcagacagaactttttgcacatttcattcagccttcagcacagaaatctccaacatctccactgaacatgaaattgggacgtccccgaataaagaaagatgaaaagcagagcttaatttctgctggagactaccgccataggcgcacagagcaagaagaagatgaagagctactgtctgagagtcggaaaacatctaatgtgtgtattagatttgaggtgtcaccttcatatgtgaaaggggggccactgagagattatcagattcgaggactgaattggttgatctctttatatgaaaatggagtcaatggcattttggctgatgaaatgggccttgggaaaactttacaaacaattgctttgcttggttacctgaaacactaccgaaatattcctggacctcacatggttttagttccaaagtctactttacacaactggatgaatgaatttaaacgatgggtcccatctctccgtgtcatttgttttgtcggagacaaggatgccagagctgcttttattcgtgatgaaatgatgccaggagagtgggatgtttgcgttacttcttatgagatggtaattaaagaaaaatctgtattcaaaaagtttcactggcgatacctggtcattgatgaagctcacagaataaagaatgaaaaatctaagctttcagagattgttcgtgagttcaagtcgactaaccgcttgctcctaactggaacacctttgcagaataacctgcatgaactgtgggccttactcaactttttattgcctgatgtctttaattctgcagatgactttgattcttggtttgacactaaaaattgtcttggtgatcaaaaactcgtggaaagacttcatgcagttttaaaaccatttttgttacgccgtataaaaactgatgtagagaagagtctgccacctaaaaaggaaataaagatttacttggggctgagtaagatgcaacgagaatggtatacaaaaatcctgatgaaagatattgatgttttaaactcttctggcaagatggacaagatgcgactcttaaacattctgatgcagcttcgaaagtgttgtaatcatccatatctgtttgatggtgctgaacctggtccaccttataccactgatgagcatattgtcagcaacagtggtaaaatggtagttctggataaactattggccaaactcaaagaacagggttcaagggttctcattttcagccagatgactcgcttgctggatattttggaagattattgcatgtggcgtggttatgagtattgtcgactggatggacaaaccccgcatgaagaaagagaggataaattcctagaagtggaatttctgggtcaaagggaagcaatagaggcttttaatgctcctaatagtagcaaattcatctttatgctaagtaccagggctggaggtctcggaattaacctggcaagtgctgatgtggttatactatatgattcagactggaacccacaggttgatctacaagctatggatcgagcacatcgtattggtcagaagaaaccagtacgtgtattccgtctcatcactgacaacactgttgaagagaggattgtagaaagagctgagataaaactgagactcgattcaattgttatacaacaaggaagactcattgaccaacagtctaacaagctggcaaaagaggaaatgttacaaatgatacggcatggagccacccatgtttttgcttctaaagagagtgagttgacagatgaagacattacaactattctggaaagaggggaaaagaagactgcagagatgaatgaacgcctgcaaaaaatgggagagtcttctctaagaaattttagaatggacattgaacaaagtttatacaaatttgagggagaagattatagagaaaaacagaagcttggcatggtggaatggattgaacctcctaaacgagaacgcaaagcaaactacgcagtggatgcctactttagagaggctttgcgtgtcagcgagccaaagattccaaaggctccacggcctccaaaacagccaaatgttcaggattttcaatttttcccaccacgcttatttgagctcctggaaaaggaaattctttattatcggaagacaataggctataaggttccaaggaatcctgatatcccaaatccagctctggctcaaagagaagagcaaaaaaagattgatggagctgaacctcttacaccagaagagactgaagaaaaggaaaaacttctcacacaaggtttcacaaactggactaaacgagattttaaccagtttattaaagctaatgagaaatatggaagagatgacattgataacatagctcgagaggtagagggcaaatcccctgaggaggtcatggagtattcagctgtattttgggaacgttgcaatgaattacaggacattgagaaaattatggctcaaattgaacgtggagaagcaagaattcaacgaaggatcagtatcaagaaagccctggatgccaaaattgcaagatacaaggctccatttcatcagttgcgcattcagtatggaaccagcaaaggaaagaactatactgaggaagaagatagattcttgatttgtatgttacacaaaatgggctttgatagagaaaatgtatatgaagaattaagacagtgtgtacgaaatgctccccagtttagatttgactggtttatcaagtctaggactgccatggaattccagagacgctgtaacactctgatttcattgattgagaaagaaaatatggaaattgaggaaagagagagagcagaaaagaagaaacgggcaactaaaactccaatggtaaaattttcagcattttcctaacttttagatttaacattgttgggccatttaaaatgtgcatattggagcagaacattaaatctgtttccattttagtcacagaaaagaaaagcagagtcagctactgagagctctggaaagaaggatgtcaagaaggtgaaatcctaaagcctagaaataaagttttaaatgggaaactgctattttcttgttcccatcttcaaatgctaattgccagttccagtgtattcatggtactctaagaaaaatctctttggttttgatttcttgcatattttatatattttacaatgctttctacctgaaatgtgtagctttatattttatggcattctagtatttttgtgtactgtattttgtgcatttcatgtcttcatcaaaatcctctcagtccttgttcttttgaagcttgtgctgaggttttagcttttctatgttttatatgccgctgctttgaaagagaacctagattctatagttgtattattgttgtttcatactttaaatttatatggctgtggaaaaacgaattaaaatgttttgaggaga

SEQ ID NO: 295299 - DNA, 3908 bp, Homo sapiens
ttaaagaagggggggcctgagcgaaggggttggaagcggagtgattccccacccctgctccatctagctctttccagtgcagccactgccgccgcccaggagccctcgtcccctgccttgtccccctactcgttcccgctcccacggcatggagcaggacactgccgcagtggcagccaccgtggcagccgcggatgcgaccgccactatcgtggtcatagaggacgagcagcccgggccgtccacctctcaggaggagggagcggccgccgcggccaccgaagccaccgcggccacggagaagggcgagaagaagaaggagaaaaacgtttcttcatttcaactcaaacttgctgctaaagcgcctaaatctgaaaaggaaatggacccagaatatgaagagaaaatgaaagccgaccgagcaaagagatttgaatttttactgaagcagacagaactttttgcacatttcattcagccttcagcacagaaatctccaacatctccactgaacatgaaattgggacgtccccgaataaagaaagatgaaaagcagagcttaatttctgctggagactaccgccataggcgcacagagcaagaagaagatgaagagctactgtctgagagtcggaaaacatctaatgtgtgtattagatttgaggtgtcaccttcatatgtgaaaggggggccactgagagattatcagattcgaggactgaattggttgatctctttatatgaaaatggagtcaatggcattttggctgatgaaatggctgcttttattcgtgatgaaatgatgccaggagagtgggatgtttgcgttacttcttatgagatggtaattaaagaaaaatctgtattcaaaaagtttcactggcgatacctggtcattgatgaagctcacagaataaagaatgaaaaatctaagctttcagagattgttcgtgagttcaagtcgactaaccgcttgctcctaactggaacacctttgcagaataacctgcatgaactgtgggccttactcaactttttattgcctgatgtctttaattctgcagatgactttgattcttggtttgacactaaaaattgtcttggtgatcaaaaactcgtggaaagacttcatgcagttttaaaaccatttttgttacgccgtataaaaactgatgtagagaagagtctgccacctaaaaaggaaataaagatttacttggggctgagtaagatgcaacgagaatggtatacaaaaatcctgatgaaagatattgatgttttaaactcttctggcaagatggacaagatgcgactcttaaacattctgatgcagcttcgaaagtgttgtaatcatccatatctgtttgatggtgctgaacctggtccaccttataccactgatgagcatattgtcagcaacagtggtaaaatggtagttctggataaactattggccaaactcaaagaacagggttcaagggttctcattttcagccagatgactcgcttgctggatattttggaagattattgcatgtggcgtggttatgagtattgtcgactggatggacaaaccccgcatgaagaaagagaggaagcaatagaggcttttaatgctcctaatagtagcaaattcatctttatgctaagtaccagggctggaggtctcggaattaacctggcaagtgctgatgtggttatactatatgattcagactggaacccacaggttgatctacaagctatggatcgagcacatcgtattggtcagaagaaaccagtacgtgtattccgtctcatcactgacaacactgttgaagagaggattgtagaaagagctgagataaaactgagactcgattcaattgttatacaacaaggaagactcattgaccaacagtctaacaagctggcaaaagaggaaatgttacaaatgatacggcatggagccacccatgtttttgcttctaaagagagtgagttgacagatgaagacattacaactattctggaaagaggggaaaagaagactgcagagatgaatgaacgcctgcaaaaaatgggagagtcttctctaagaaattttagaatggacattgaacaaagtttatacaaatttgagggagaagattatagagaaaaacagaagcttggcatggtggaatggattgaacctcctaaacgagaacgcaaagcaaactacgcagtggatgcctactttagagaggctttgcgtgtcagcgagccaaagattccaaaggctccacggcctccaaaacagccaaatgttcaggattttcaatttttcccaccacgcttatttgagctcctggaaaaggaaattctttattatcggaagacaataggctataaggttccaaggaatcctgatatcccaaatccagctctggctcaaagagaagagcaaaaaaagattgatggagctgaacctcttacaccagaagagactgaagaaaaggaaaaacttctcacacaaggtttcacaaactggactaaacgagattttaaccagtttattaaagctaatgagaaatatggaagagatgacattgataacatagctcgagaggtagagggcaaatcccctgaggaggtcatggagtattcagctgtattttgggaacgttgcaatgaattacaggacattgagaaaattatggctcaaattgaacgtggagaagcaagaattcaacgaaggatcagtatcaagaaagccctggatgccaaaattgcaagatacaaggctccatttcatcagttgcgcattcagtatggaaccagcaaaggaaagaactatactgaggaagaagatagattcttgatttgtatgttacacaaaatgggctttgatagagaaaatgtatatgaagaattaagacagtgtgtacgaaatgctccccagtttagatttgactggtttatcaagtctaggactgccatggaattccagagacgctgtaacactctgatttcattgattgagaaagaaaatatggaaattgaggaaagagagagagcagaaaagaagaaacgggcaactaaaactccaatggtaaaattttcagcattttcctaacttttagatttaacattgttgggccatttaaaatgtgcatattggagcagaacattaaatctgtttccattttagtcacagaaaagaaaagcagagtcagctactgagagctctggaaagaaggatgtcaagaaggtgaaatcctaaagcctagaaataaagttttaaatgggaaactgctattttcttgttcccatcttcaaatgctaattgccagttccagtgtattcatggtactctaagaaaaatctctttggttttgatttcttgcatattttatatattttacaatgctttctacctgaaatgtgtagctttatattttatggcattctagtatttttgtgtactgtattttgtgcatttcatgtcttcatcaaaatcctctcagtccttgttcttttgaagcttgtgctgaggttttagcttttctatgttttatatgccgctgctttgaaagagaacctagattctatagttgtattattgttgtttcatactttaaatttatatggctgtggaaaaacgaattaaaatgttttgaggagaaagactttttcacttctttgttgctttcttttctattgagtctgggcttgtttgtgttactgcatactgtgattagcataataattgtttctttgaggtcatctaaatatttttttcctaaaggaataaagggtgaggaaagaaaaatattaaaaaagctaatatttgatactgtgcttgctgtcagtatgcattacatttaaattattctctattcaagtgggaaaatataataaagaaatgtctataagaaaaaaaaaaa

SEQ ID NO: 295300 - DNA, 4064 bp, Homo sapiens
aaaattcactatgatcaagtgggattcatcctaggaatgtaagactggttccacatatgcaaattaataagcattatagatcacattagcagaaccaagaacaaagaccatatgatcttttcaatagacattgaaaaagtgtttgataaaattcaatattcctttattttaaaaaccctcaaaaactcagtatacatggagtataataataataaaggccataaatttacagcaaacttcatactgaatggagaaaaattgaaagcctttcccctaaaatctggaaaaaaccaagaatgctcactttcaccatttttatgcaacataccctgctccatctagctctttccagtgcagccactgccgccgcccaggagccctcgtcccctgccttgtccccctactcgttcccgctcccacggcatggagcaggacactgccgcagtggcagccaccgtggcagccgcggatgcgaccgccactatcgtggtcatagaggacgagcagcccgggccgtccacctctcaggaggagggagcggccgccgcggccaccgaagccaccgcggccacggagaagggcgagaagaagaaggagaaaaacgtttcttcatttcaactcaaacttgctgctaaagcgcctaaatctgaaaaggaaatggacccagaatatgaagagaaaatgaaagccgaccgagcaaagagatttgaatttttactgaagcagacagaactttttgcacatttcattcagccttcagcacagaaatctccaacatctccactgaacatgaaattgggacgtccccgaataaagaaagatgaaaagcagagcttaatttctgctggagactaccgccataggcgcacagagcaagaagaagatgaagagctactgtctgagagtcggaaaacatctaatgtgtgtattagatttgaggtgtcaccttcatatgtgaaaggggggccactgagagattatcagattcgaggactgaattggttgatctctttatatgaaaatggagtcaatggcattttggctgatgaaatgggccttgggaaaactttacaaacaattgctttgcttggttacctgaaacactaccgaaatattcctggacctcacatggttttagttccaaagtctactttacacaactggatgaatgaatttaaacgatgggtcccatctctccgtgtcatttgttttgtcggagacaaggatgccagagctgcttttattcgtgatgaaatgatgccaggagagtgggatgtttgcgttacttcttatgagatggtaattaaagaaaaatctgtattcaaaaagtttcactggcgatacctggtcattgatgaagctcacagaataaagaatgaaaaatctaagctttcagagattgttcgtgagttcaagtcgactaaccgcttgctcctaactggaacacctttgcagaataacctgcatgaactgtgggccttactcaactttttattgcctgatgtctttaattctgcagatgactttgattcttggtttgacactaaaaattgtcttggtgatcaaaaactcgtggaaagacttcatgcagttttaaaaccatttttgttacgccgtataaaaactgatgtagagaagagtctgccacctaaaaaggaaataaagatttacttggggctgagtaagatgcaacgagaatggtatacaaaaatcctgatgaaagatattgatgttttaaactcttctggcaagatggacaagatgcgactcttaaacattctgatgcagcttcgaaagtgttgtaatcatccatatctgtttgatggtgctgaacctggtccaccttataccactgatgagcatattgtcagcaacagtggtaaaatggtagttctggataaactattggccaaactcaaagaacagggttcaagggttctcattttcagccagatgactcgcttgctggatattttggaagattattgcatgtggcgtggttatgagtattgtcgactggatggacaaaccccgcatgaagaaagagaggataaattcctagaagtggaatttctgggtcaaagggaagcaatagaggcttttaatgctcctaatagtagcaaattcatctttatgctaagtaccagggctggaggtctcggaattaacctggcaagtgctgatgtggttatactatatgattcagactggaacccacaggttgatctacaagctatggatcgagcacatcgtattggtcagaagaaaccagtacgtgtattccgtctcatcactgacaacactgttgaagagaggattgtagaaagagctgagataaaactgagactcgattcaattgttatacaacaaggaagactcattgaccaacagtctaacaagctggcaaaagaggaaatgttacaaatgatacggcatggagccacccatgtttttgcttctaaagagagtgagttgacagatgaagacattacaactattctggaaagaggggaaaagaagactgcagagatgaatgaacgcctgcaaaaaatgggagagtcttctctaagaaattttagaatggacattgaacaaagtttatacaaatttgagggagaagattatagagaaaaacagaagcttggcatggtggaatggattgaacctcctaaacgagaacgcaaagcaaactacgcagtggatgcctactttagagaggctttgcgtgtcagcgagccaaagattccaaaggctccacggcctccaaaacagccaaatgttcaggattttcaatttttcccaccacgcttatttgagctcctggaaaaggaaattctttattatcggaagacaataggctataaggttccaaggaatcctgatatcccaaatccagctctggctcaaagagaagagcaaaaaaagattgatggagctgaacctcttacaccagaagagactgaagaaaaggaaaaacttctcacacaaggtttcacaaactggactaaacgagattttaaccagtttattaaagctaatgagaaatatggaagagatgacattgataacatagctcgagaggtagagggcaaatcccctgaggaggtcatggagtattcagctgtattttgggaacgttgcaatgaattacaggacattgagaaaattatggctcaaattgaacgtggagaagcaagaattcaacgaaggatcagtatcaagaaagccctggatgccaaaattgcaagatacaaggctccatttcatcagttgcgcattcagtatggaaccagcaaaggaaagaactatactgaggaagaagatagattcttgatttgtatgttacacaaaatgggctttgatagagaaaatgtatatgaagaattaagacagtgtgtacgaaatgctccccagtttagatttgactggtttatcaagtctaggactgccatggaattccagagacgctgtaacactctgatttcattgattgagaaagaaaatatggaaattgaggaaagagagagagcagaaaagaagaaacgggcaactaaaactccaatgggaggatgtggagcaagatgcaatagaaagttccactgatcatcttcccacagggacaccaatttaacaactatctacacacaaaaagcgactttgtaagaaccaaaaatgaggtgaacactcatagtacctggtttttacttcatattgcttcatattgctgaaagaggaactgaagaggtagaaaaaaaacagccttgaattgccaacgccacccctcccacatccctctggctgtgatagtgtgttgcagagtgtttctgtgctctggaaagagggagagccagcagttgtgaggtatggaactcagtgttgcccttgctgtaccagaaagcaaaactggaccaaataccactgacacctgcccacagaggatgcattaaaccagccctagccagaggagaatcactgattccagcagttggaaattgagttcttgcaagcattgctaccatgggttaaagtgctctggagccccaaataaacttgaaaggcagtct

SEQ ID NO: 295301 - DNA, 1488 bp, Homo sapiens
taggagttctgatttgatcaagtaagttttctgatgtttgtggaattatgagtacaaatgggaactctgagcagacaacaaagctttgcttggtaataagtgaactgttgaattgataggataacttgattttaatccagtcaggttgctttgtacagctgtaatttaaaatattctttaatagatcgtattatttgagtgtggttaagtaaactgccatatttcatcgaatctaagatgccttccattgtaagacacagcattattttatgtaccactgagggaaaatgctgccaggtgtaatttgtcatcagttgtaagttgcatcctgatttcagagatgctaaaatgtgaaagaaatgtgtatcatagaagatatgaaatatggtatgttaaaacctatcataagttttttaaaaaatatatactcataaacaaaattttgcccagaaaacattaagtagttctttaagataagagtacatttataataccatgtgtaagtagatacttgatgactatttttgatgggtattttatgtcttttcataaaaagaaacatctttgaaggttattttacattgggttatatagtttgttgggctatatagaacattaactgtgaatataacatttaagtgaatattcatgttaaaatttttttttaatgcatttacatcctagatttaacattgttgggccatttaaaatgtgcatattggagcagaacattaaatctgtttccattttagtcacagaaaagaaaagcagagtcagctactgagagctctggaaagaaggatgtcaagaaggtgaaatcctaaagcctagaaataaagttttaaatgggaaactgctattttcttgttcccatcttcaaatgctaattgccagttccagtgtattcatggtactctaagaaaaatctctttggttttgatttcttgcatattttatatattttacaatgctttctacctgaaatgtgtagctttatattttatggcattctagtatttttgtgtactgtattttgtgcatttcatgtcttcatcaaaatcctctcagtccttgttcttttgaagcttgtgctgaggttttagcttttctatgttttatatgccgctgctttgaaagagaacctagattctatagttgtattattgttgtttcatactttaaatttatatggctgtggaaaaacgaattaaaatgttttgaggagaaagactttttcacttctttgttgctttcttttctattgagtctgggcttgtttgtgttactgcatactgtgattagcataataattgtttctttgaggtcatctaaatatttttttcctaaaggaataaagggtgaggaaagaaaaatattaaaaaagctaatatttgatactgtgcttgctgtcagtatgcattacatttaaattattctctattcaagtgggaaaatataataaagaaatgtctataagaaaaaaaaaaa

SEQ ID NO: 295302 - DNA, 691 bp, Homo sapiens
ttaaagaagggggggcctgagcgaaggggttggaagcggagtgattccccacccctgctccatctagctctttccagtgcagccactgccgccgcccaggagccctcgtcccctgccttgtccccctactcgttcccgctcccacggcatggagcaggacactgccgcagtggcagccaccgtggcagccgcggatgcgaccgccactatcgtggtcatagaggacgagcagcccgggccgtccacctctcaggaggagggagcggccgccgcggccaccgaagccaccgcggccacggagaagggcgagaagaagaaggagaaaaacgtttcttcatttcaactcaaacttgctgctaaagcgcctaaatctgaaaaggaaatggacccagaatatgaagagaaaatgaaagccgaccgagcaaagagatttgaatttttactgaagcaatcctcctgagtgatcccatttcttaatcagtgtagccccaagaaggctggggctatttaccagggtagaaaaaggagcttacctcccacctttggtcctaagtccctgccccctccccttcacaccataactaggtaacagtttgataactagggaagaaagcagaacagttaagcagccgccacatcgccgctggctgggggcctcactccaggaaggggctggactggctgtcctttc

SEQ ID NO: 295303 - DNA, 597 bp, Homo sapiens
catgtgtagagttgtgtaacctccaccaccataagactccattgtgctatctctttacagtcacacctaccctctctcctctccctagctcccggcaaccattgatctgttctctctttctataattttgtcatttaaggatgttatataaatggaataatatggtatgtaacctttcgaaattagctttttttttttacttagcataattcccttgaggttcattcagattgttaactgtattaatagttctttcctttttattgctgagtaatattatatgatatggatgtatcatggtttgtttaaccagtcatccataaatgacatttacccccactcctaattctggtggaatctattaataccctgtgtgaatattgtcctgaaaaatagcagttttggaaattctataccacagaaatcatacagttaaatagttgtcagcgttttaaagataatgattgggttgcagaaattaaaaatctttattacttcatttaggaattccagagacgctgtaacactctgatttcattgattgagaaagaaaatatggaaattgaggaaagagagagagcagaaaagaagaaacgg

SEQ ID NO: 295304 - DNA, 365 bp, Homo sapiens
caggtgctttgccctttgtcctggaagtttcccattaatggtacaatataatatttgcagatttctttgttcccagtggtctttagatattctcaatattcatcatgctcttttccaaagtgtcagatctagagaaaaataactaattttatttttagaattttatagcatatgatggctctaaattttatccagaatatccaatatcttacattagaactctttctactaggatcgagcacatcgtattggtcagaagaaaccagtacgtgtattccgtctcatcactgacaacactgttgaagagaggattgtagaaagagctgagataaaactgagactcgattcaattgttatacaacaag

SEQ ID NO: 295305 - DNA, 3088 bp, Homo sapiens
  misc_feature (6)..(6): n is a, c, g, or t
cccacnctccccgctgctcgcgggagccagagggccctgcggtcctcggtggtcttgccagcccctcgtcatcccagggccctccgcgcctgtgaggactccctcaggtcggccacgggacctgacgcaacaggatggacgagtcccctgagcctctgcagcagggcagagggccggtgccggtccgacggcagcgcccagcaccccggggtctgcgtgagatgctgaaggccaggctgtggtgcagctgctcgtgcagtgtgctgtgcgtccgggcgctggtgcaggacctgctccccgccacgcgctggctgcgtcagtaccgcccgcgggagtacctggcaggcgacgtcatgtctgggctggtcatcggcatcatcctggtgccgcaggccatcgcctactcattgctggccgggctgcagcccatctacagcctctatacgtccttcttcgccaacctcatctacttcctcatgggcacctcacggcatgtctccgtgggcatcttcagcctgctttgcctcatggtggggcaggtggtggaccgggagctccagctggccggctttgacccctcccaggacggcctgcagcccggagccaacagcagcaccctcaacggctcggctgccatgctggactgcgggcgtgactgctacgccatccgtgtcgccaccgccctcacgctgatgaccgggctttaccaggtcctcatgggcgtcctccggctgggcttcgtgtccgcctacctctcacagccactgctcgatggctttgccatgggggcctccgtgaccatcctgacctcgcagctcaaacacctgctgggcgtgcggatcccgcggcaccaggggcccggcatggtggtcctcacatggctgagcctgctgcgcggcgccgggcaggccaacgtgtgcgacgtggtcaccagcacggtgtgcctggcggtgctgctagccgcgaaggagctctcagaccgctaccgacaccgcctgagggtgccgctgcccacggagctgctggtcatcgtggtggccacactcgtgtcgcacttcgggcagctccacaagcgctttggctcgagcgtggctggcgacatccccacgggtttcatgccccctcaggtcccagagcccaggctgatgcagcgtgtggctttggatgccgtggccctggccctcgtggctgccgccttctccatctcgctggcggagatgttcgcccgcagtcacggctactctgtgcgtgccaaccaggagctgctggctgtgggctgctgcaacgtgctacccgccttcctccactgcttcgccaccagcgccgccctggccaagagcctggtgaagacagccactggctgccggacacagctgtccagcgtggtcagcgccaccgtggtgctgctggtgctgctggcgctggcaccgctgttccacgacctacagcgaagcgtgctggcctgcgtcatcgtggtcagcctgcggggggccctgcgcaaggtgtggggcttcccgcggctgtggcggatgagcccggctgacgcgctggtctgggcaggcaccgcggccacctgtatgctggtcagcacagaggccgggctgctggctggcgtcatcctctcgctgctcagcctggccggccgcacccaacgcccacgcaccgccctgctggcccgcatcggggacacggccttctacgaggatgccacagagttcgagggcctcgtccctgagcccggcgtgcgggtgttccgctttggggggccgctgtactatgccaacaaggacttcttcctgcagtcactctacagcctcacggggctggacgcagggtgcatggctgccaggaggaaggaggggggctcagagacgggggtcggtgagggaggccctgcccagggcgaggacctgggcccggttagcaccagggctgcgctggtgcccgcagcggccggcttccacacagtggtcatcgactgcgccccgctgctgttcctagacgcagccggtgtgagcacgctgcaggacctgcgccgagactacggggccctgggcatcagcctgctgctagcctgctgcagcccgcctgtgagagacattctgagcagaggaggcttcctcggggagggccccggggacacggctgaggaggagcagctgttcctcagtgtgcacgatgccgtgcagacagcacgagcccgccacagggagctggaggccaccgatgcccatctgtagcagggccaggcctgcccagcagcctctgctccctcctggggacccacagcagacgtctgcaagccactgctgagacccttcccagggaggagccacccaagagctgcactcttgtgccacagctgccctggggaaaccggggaaccccaactgggaaaggaggccctctgatcacacgcaggacccaaacactcagaaatcaagaacctctgcctccgagacaggctggcccacagtgctggctgggccccaatgcaccgtccctcagctcaggagggatgggcctgacctgacgctcagggttgacatcttatttgaacaagggtcccccgccatcatgcagcctccaaggtgccaagaggactccctatgcccaggcctgcccggtgcccaccctgctggtaggagccagcggctctggccaagtgcacgagggtctctgtgtttccagaaggccccacacacccaagtgcccctcacacctcgtgcctccccctcacagggtggccacctgcaccagcgtcagggcccagggtgctgtgaccgatgagacctcagctcagccctcaggtgcagtggccctacccagcctggccagcagacacacacagggatgctcacgggtgcaccaggagccaggtgcggcgcagccaaccctgagcctgcagggagacctgcaggaagcccaccgtgccccatgcaggggctccctccagcacacagccctcaccccagcacagccagcaaggacacgctctccccaacagggtgcttcggcgggaggtgggggaacaaggggtcttccgagcagcccccagccctcccctcccatctgtgcctctgtaagg

SEQ ID NO: 295306 - DNA, 2290 bp, Homo sapiens
  misc_feature (6)..(6): n is a, c, g, or t
  misc_feature (2061)..(2061): n is a, c, g, or t
cccacnctccccgctgctcgcgggagccagagggccctgcggtcctcggtggtcttgccagcccctcgtcatcccagggccctccgcgcctgtgaggactccctcaggtcggccacgggacctgacgcaacaggatggacgagtcccctgagcctctgcagcagggcagagggccggtgccggtccgacggcagcgcccagcaccccggggtctgcgtgagatgctgaaggccaggctgtggtgcagctgctcgtgcagtgtgctgtgcgtccgggcgctggtgcaggacctgctccccgccacgcgctggctgcgtcagtaccgcccgcgggagtacctggcaggcgacgtcatgtctgggctggtcatcggcatcatcctggtgccgcaggccatcgcctactcattgctggccgggctgcagcccatctacagcctctatacgtccttcttcgccaacctcatctacttcctcatgggcacctcacggcatgtctccgtgggcatcttcagcctgctttgcctcatggtggggcaggtggtggaccgggagctccagctggccggctttgacccctcccaggacggcctgcagcccggagccaacagcagcaccctcaacggctcggctgccatgctggactgcgggcgtgactgctacgccatccgtgtcgccaccgccctcacgctgatgaccgggctttaccaggtcctcatgggcgtcctccggctgggcttcgtgtccgcctacctctcacagccactgctcgatggctttgccatgggggcctccgtgaccatcctgacctcgcagctcaaacacctgctgggcgtgcggatcccgcggcaccaggggcccggcatggtggtcctcacatggctgagcctgctgcgcggcgccgggcaggccaacgtgtgcgacgtggtcaccagcacggtgtgcctggcggtgctgctagccgcgaaggagctctcagaccgctaccgacaccgcctgagggtgccgctgcccacggagctgctggtcatcgtggtggccacactcgtgtcgcacttcgggcagctccacaagcgctttggctcgagcgtggctggcgacatccccacgggtttcatgccccctcaggtcccagagcccaggctgatgcagcgtgtggctttggatgccgtggccctggccctcgtggctgccgccttctccatctcgctggcggagatgttcgcccgcagtcacggctactctgtgcgtgccaaccaggagctgctggctgtgggctgctgcaacgtgctacccgccttcctccactgcttcgccaccagcgccgccctggccaagagcctggtgaagacagccactggctgccggacacagctgtccagcgtggtcagcgccaccgtggtgctgctggtgctgctggcgctggcaccgctgttccacgacctacagcgaagcgtgctggcctgcgtcatcgtggtcagcctgcggggggccctgcgcaaggtgtggggcttcccgcggctgtggcggatgagcccggctgacgcgctggtctgggcaggcaccgcggccacctgtatgctggtcagcacagaggccgggctgctggctggcgtcatcctctcgctgctcagcctggccggccgcacccaacgcccacgcaccgccctgctggcccgcatcggggacacggccttctacgaggatgccacagagttcgagggcctcgtccctgagcccggcgtgcgggtgttccgctttggggggccgctgtactatgccaacaaggacttcttcctgcagtcaaaaaaaaaaaaaaaaaaaaaaaaaaaaaaaaaaaaaaaaaaaaaaggggggggccccaaaaaaaaaacccccgggggggcccacatattagcgcgactcacacccggattttttgtgaaaaaaggggggccccctaaaaggaagggcgcgatatataaacacaataggacagagggcgcacgaggttaaaaaaacggtgtgttgaaacggtgaaaacactcgaaagcgggaaaaccttatggaaaagagaagaacncccttactactgcgggggaggggggcgacaaacaacatgggtgggcacaacaactatccccagacaggagaaatataaagaccgcccagagggggaaacaatcgtaaacacttgaaaacgggggataaaaaggtggtgtcacaaacgagggcggatatatatacgcggccgggtgtaaaaaaaaattggcacacgaggagatataaattgaaaagatttttaagcaggc

SEQ ID NO: 295307 - DNA, 1387 bp, Homo sapiens
  misc_feature (6)..(6): n is a, c, g, or t
cccacnctccccgctgctcgcgggagccagagggccctgcggtcctcggtggtcttgccagcccctcgtcatcccagggccctccgcgcctgtgaggactccctcaggtcggccacgggacctgacgcaacaggatggacgagtcccctgagcctctgcagcagggcagagggccggtgccggtccgacggcagcgcccagcaccccggggtctgcgtgagatgctgaaggccaggctgtggtgcagctgctcgtgcagtgtgctgtgcgtccgggcgctggtgcaggacctgctccccgccacgcgctggctgcgtcagtaccgcccgcgggagtacctggcaggcgacgtcatgtctgggctggtcatcggcatcatcctggtgccgcaggccatcgcctactcattgctggccgggctgcagcccatctacagcctctatacgtccttcttcgccaacctcatctacttcctcatgggcacctcacggcatgtctccgtgggcatcttcagcctgctttgcctcatggtggggcaggtggtggaccgggagctccagctggccggctttgacccctcccaggacggcctgcagcccggagccaacagcagcaccctcaacggctcggctgccatgctggactgcgggcgtgactgctacgccatccgtgtcgccaccgccctcacgctgatgaccgggctttaccagacgtcctggggtagaaacagcttccagcaacacccatggcaattaacacagaggagtgactcgcaggaacttctggaagaggaggaaagatcttgctgatttaacaggaaatgccgacatcaacgacatcgagaatgcgggaccctcacaccagcctcacgagaagccggtggatacagcttattccagagggaggcttggatcagcacctggggaaaaaaggcagcccctcaacctggccagcctgcagaggagagaagcctgagcaagcgtcctccaaatttcacaacaggctttaccatgtggatgatgtaaccagtcatcagtacatttctgtaaagcaaagcacacttttaaaaaccagccatgctagtgggcctgaggattacctttcgtcttcctctttcctctgtggaagatgatattgcaaaattgtaaaaagagacaataaaaaagtggatgaaagggtatcctagcaagctgttatgaataaaaaatctcggtattttctggattttgtgctgcttgtgctattagtcaagttttaaaacatgcttaatttattatttcttcttgcatctaattttattttattctttttatttatttatttatttttgagacagagtctcgcactgtcctccaggctggagtgcagtggcacgatcttggctcac

SEQ ID NO: 295308 - DNA, 909 bp, Homo sapiens
  misc_feature (6)..(6): n is a, c, g, or t
cccacnctccccgctgctcgcgggagccagagggccctgcggtcctcggtggtcttgccagcccctcgtcatcccagggccctccgcgcctgtgaggactccctcaggtcggccacgggacctgacgcaacaggatggacgagtcccctgagcctctgcagcagggcagagggccggtgccggtccgacggcagcgcccagcaccccggggtctgcgtgagatgctgaaggccaggctgtggtgcagctgctcgtgcagtgtgctgtgcgtccgggcgctggtgcaggacctgctccccgccacgcgctggctgcgtcagtaccgcccgcgggagtacctggcaggcgacgtcatgtctgggctggtcatcggcatcatcctggtgccgcaggccatcgcctactcattgctggccgggctgcagcccatctacagcctctatacgtccttcttcgccaacctcatctacttcctcatgggcacctcacggcatgtctccgtgggcatcttcagcctgctttgcctcatggtggggcaggtggtggaccgggagctccagctggccggctttgacccctcccaggacggcctgcagcccggagccaacagcagcaccctcaacggctcggctgccatgctggactgcgggcgtgactgctacgccatccgtgtcgccaccgccctcacgctgatgaccgggctttaccaggccttctgtcctaggtggagtgggggatggcctccccacccccgaaggtctcctgccttggcctgtccaccttggcccccgttggctccacatctgcatggggggcagtgggcaccatgtgtaggaagcagcaggaaggggttgccttctgataccagaggtcttaattctgaaataaaacgggctgctgcacgtgaca

SEQ ID NO: 295309 - DNA, 2017 bp, Homo sapiens
  misc_feature (1933)..(1933): n is a, c, g, or t
  misc_feature (1981)..(1981): n is a, c, g, or t
  misc_feature (1991)..(1991): n is a, c, g, or t
  misc_feature (1993)..(1993): n is a, c, g, or t
  misc_feature (1995)..(1995): n is a, c, g, or t
  misc_feature (1997)..(1997): n is a, c, g, or t
cccggaggaggcggagaggttccgccccccggatctccggcttccggcaactgggctggaccgaaaccggcgcggagcaactgaggcccgagccttctcgggacccgggggacgcctaaccccgcgagatgaggaaactgaggccgcgaggagcgcgcacacagcagagaagcagcagaatcgggaatcaaacccagctctgtctgaccccagagcctgtgcctttaaccactggctaggctgaactgcctttgttcttcactgtccccatcacctctttcaaacctcagcctctccttcctcatcgttacatctctaggctgcacctgctctctaaacattcacacaaaccctgcaaattttcttcctcataattgggagaagactcactggccgaatggcagcagtagatgacttgcaatttgaagaatttggcaatgcagccacttctctgacagcaaacccagatgccaccacagtaaacattgaggatcctggtgaaaccccaaaacatcagccaggatccccaagaggctcaggaagagaagaagatgatgagttactgggaaatgatgactctgacaaaactgagttacttgctggacagaagaaaagctcccccttctggacatttgaatactaccaaacattctttgatgtggacacctaccaggtctttgacagaattaaaggatctcttttgccaatacccgggaaaaactttgtgaggttatatatccgcagcaatccagatctctatggccccttttggatatgtgccacgttggtctttgccatagcaattagtgggaatctttccaacttcttgatccatctgggagagaagacgtaccattatgtgcccgaattccgaaaagtgtccatagcagctaccatcatctatgcctatgcctggctggttcctcttgcactctggggtttcctcatgtggagaaacagcaaagttatgaacatcgtctcctattcatttctggagattgtgtgtgtctatggatattccctcttcatttatatccccaccgcaatactgtggattatcccccagaaagctgttcgttggattctagtcatgattgccctgggcatctcaggatctctcttggcaatgacattttggccagctgttcgtgaggataaccgacgcgttgcattggccacaattgtgacaattgtgttgctccatatgctgctttctgtgggctgcttggcatacttttttgatgcaccagagatggaccatctcccaacaactacagctactccaaaccaaacagttgctgcagccaagtccagctaatgaggaaagactcacttgagataccctctccttgctgaagtttttcttgacttctccagttctcttttgttttttggagcatggttctttgggaagtggcatccactgcaggaaagcagaatgagcagagccagcagaactgatggagtggcacaaattcccagtgtctggatggtgccacactggcgcctaatcacccgtttaacaagcagaaattaaatgttgctcagcacatgtgtctttcagctcttccttttcacccatggatgatcattgcgagcatgcgctgattggactgaaatgccggggaataggttaggcatgctcagtgccgtccctttgccaccacagtcaaatgacatgcttcactgtggtaccttaatacctgaaatagaaccatggaaaattctgatgtcctctctctgaattatgtacagactacctgggggatcctcttctctccaaatgttagccatcctgaagtagccgaacagtagaaactttggtggggattaaccgggagcttgaaaatttgtctttggtaacctgatactggacagctgaactgaatggtgcaaaataaatacctcacatgaaaaaaaaaaaatggcctcnttggccctagcggggagctctgcggccttccctttagggaggttaatnaagatcctcncnantnaccccctcgcccccggcatg

SEQ ID NO: 295310 - DNA, 1913 bp, Homo sapiens
cccggaggaggcggagaggttccgccccccggatctccggcttccggcaactgggctggaccgaaaccggcgcggagcaactgaggcccgagccttctcgggacccgggggacgcctaaccccgcgagatgaggaaactgaggccgcgaggagcgcgcacacagcagagaagcagcagaatcgggaatcaaacccagctctgtctgaccccagagcctgtgcctttaaccactggctaggctgaactgcctttgttcttcactgtccccatcacctctttcaaacctcagcctctccttcctcatcgttacatctctaggctgcacctgctctctaaacattcacacaaaccctgcaaattttcttcctcataattgggagaagactcactggccgaatggcagcagtagatgacttgcaatttgaagaatttggcaatgcagccacttctctgacagcaaacccagatgccaccacagtaaacattgaggatcctggtgaaaccccaaaacatcagccaggatccccaagaggctcaggaagagaagaagatgatgagttactgggaaatgatgactctgacaaaactgagttacttgctggacagaagaaaagctcccccttctggacatttgaatactaccaaacattctttgatgtggacacctaccaggtctttgacagaattaaaggatctcttttgccaatacccgggaaaaactttgtgaggttatatatccgcagcaatccagatctctatggccccttttggatatgtgccacgttggtctttgccatagcaattagtgggaatctttccaacttcttgatccatctgggagagaagacgtaccattatgtgcccgaattccgaaaagtgtccatagcagctaccatcatctatgcctatgcctggctggttcctcttgcactctggggtttcctcatgtggagaaacagcaaagttatgaacatcgtctcctattcatttctggagattgtgtgtgtctatggatattccctcttcatttatatccccaccgcaatactgtggattatcccccagaaagctgttcgttggattctagtcatgattgccctgggcatctcaggatctctcttggcaatgacattttggccagctgttcgtgaggataaccgacgcgttgcattggccacaattgtgacaattgtgttgctccatatgctgctttctgtgggctgcttggcatacttttttgatgcaccagagatggaccatctcccaacaactacagctactccaaaccaaacagttgctgcagccaagtccagctaatgaggaaagactcacttgagataccctctccttgctgaagtttttcttgacttctccagttctcttttgttttttggagcatggttctttgggaagtggcatccactgcaggaaagcagaatgagcagagccagcagaactgatggagtggcacaaattcccagtgtctggatggtgccacactggcgcctaatcacccgtttaacaagcagaaattaaatgttgctcagcacatgtgtctttcagctcttccttttcacccatggatgatcattgcgagcatgcgctgattggactgaaatgccggggaataggttaggcatgctcagtgccgtccctttgccaccacagtcaaatgacatgcttcactgtggtaccttaatacctgaaatagaaccatggaaaattctgatgtcctctctctgaattatgtacagactacctgggggatcctcttctctccaaatgttagccatcctgaagtagccgaacagtagaaactttggtggggattaaccgggagcttgaaaatttgtctttggtaacctgatactggacagctgaactgaatggtgcaaaataaatacctcacatg

SEQ ID NO: 295311 - DNA, 1797 bp, Homo sapiens
  misc_feature (1713)..(1713): n is a, c, g, or t
  misc_feature (1761)..(1761): n is a, c, g, or t
  misc_feature (1771)..(1771): n is a, c, g, or t
  misc_feature (1773)..(1773): n is a, c, g, or t
  misc_feature (1775)..(1775): n is a, c, g, or t
  misc_feature (1777)..(1777): n is a, c, g, or t
cccggaggaggcggagaggttccgccccccggatctccggcttccggcaactgggctggaccgaaaccggcgcggagcaactgaggcccgagccttctcgggacccgggggacgcctaaccccgcgagaaccctgcaaattttcttcctcataattgggagaagactcactggccgaatggcagcagtagatgacttgcaatttgaagaatttggcaatgcagccacttctctgacagcaaacccagatgccaccacagtaaacattgaggatcctggtgaaaccccaaaacatcagccaggatccccaagaggctcaggaagagaagaagatgatgagttactgggaaatgatgactctgacaaaactgagttacttgctggacagaagaaaagctcccccttctggacatttgaatactaccaaacattctttgatgtggacacctaccaggtctttgacagaattaaaggatctcttttgccaatacccgggaaaaactttgtgaggttatatatccgcagcaatccagatctctatggccccttttggatatgtgccacgttggtctttgccatagcaattagtgggaatctttccaacttcttgatccatctgggagagaagacgtaccattatgtgcccgaattccgaaaagtgtccatagcagctaccatcatctatgcctatgcctggctggttcctcttgcactctggggtttcctcatgtggagaaacagcaaagttatgaacatcgtctcctattcatttctggagattgtgtgtgtctatggatattccctcttcatttatatccccaccgcaatactgtggattatcccccagaaagctgttcgttggattctagtcatgattgccctgggcatctcaggatctctcttggcaatgacattttggccagctgttcgtgaggataaccgacgcgttgcattggccacaattgtgacaattgtgttgctccatatgctgctttctgtgggctgcttggcatacttttttgatgcaccagagatggaccatctcccaacaactacagctactccaaaccaaacagttgctgcagccaagtccagctaatgaggaaagactcacttgagataccctctccttgctgaagtttttcttgacttctccagttctcttttgttttttggagcatggttctttgggaagtggcatccactgcaggaaagcagaatgagcagagccagcagaactgatggagtggcacaaattcccagtgtctggatggtgccacactggcgcctaatcacccgtttaacaagcagaaattaaatgttgctcagcacatgtgtctttcagctcttccttttcacccatggatgatcattgcgagcatgcgctgattggactgaaatgccggggaataggttaggcatgctcagtgccgtccctttgccaccacagtcaaatgacatgcttcactgtggtaccttaatacctgaaatagaaccatggaaaattctgatgtcctctctctgaattatgtacagactacctgggggatcctcttctctccaaatgttagccatcctgaagtagccgaacagtagaaactttggtggggattaaccgggagcttgaaaatttgtctttggtaacctgatactggacagctgaactgaatggtgcaaaataaatacctcacatgaaaaaaaaaaaatggcctcnttggccctagcggggagctctgcggccttccctttagggaggttaatnaagatcctcncnantnaccccctcgcccccggcatg

SEQ ID NO: 295312 - DNA, 1862 bp, Homo sapiens
cccggaggaggcggagaggttccgccccccggatctccggcttccggcaactgggctggaccgaaaccggcgcggagcaactgaggcccgagccttctcgggacccgggggacgcctaaccccgcgagatgaggaaactgaggccgcgaggagcgcgcacacagcagagaagcagcagaatcgggaatcaaacccagctctgtctgaccccagagcctgtgcctttaaccactggctaggctgaactgcctttgttcttcactgtccccatcacctctttcaaacctcagcctctccttcctcatcgttacatctctaggctgcacctgctctctaaacattcacacaaaccctgcaaattttcttcctcataattgggagaagactcactggccgaatggcagcagtagatgacttgcaatttgaagaatttggcaatgcagccacttctctgacagcaaacccagatgccaccacagtaaacattgaggatcctggtgaaaccccaaaacatcagccaggatccccaagaggctcaggaagagaagaagatgatgagttactgggaaatgatgactctgacaaaactgagttacttgctggacagaagaaaagctcccccttctggacatttgaatactaccaaacattctttgatgtggacacctaccaggtctttgacagaattaaaggatctcttttgccaatacccgggaaaaactttgtgaggttatatatccgcagcaatccagatctctatggccccttttggatatgtgccacgttggtctttgccatagcaattagtgggaatctttccaacttcttgatccatctgggagagaagacgtaccattatgtgcccgaattccgaaaagtgtccatagcagctaccatcatctatgcctatgcctggctggttcctcttgcactctggggtttcctcatgtggagaaacagcaaagttatgaacatcgtctcctattcatttctggagattgtgtgtgtctatggatattccctcttcatttatatccccaccgcaatactgtggattatcccccagaaagctgttcgttggattctagtcatgattgccctgggcatctcaggatctctcttggcaatgacattttggccagctgttcgtgaggataaccgacgcgttgcattggccacaattgtgacaattgtgttgctccatatgctgctttctgtgggctgcttggcatacttttttgatgcaccagagatggaccatctcccaacaactacagctactccaaaccaaacagttgctgcagccaagtccagctaatgaggaaattctcttttgttttttggagcatggttctttgggaagtggcatccactgcaggaaagcagaatgagcagagccagcagaactgatggagtggcacaaattcccagtgtctggatggtgccacactggcgcctaatcacccgtttaacaagcagaaattaaatgttgctcagcacatgtgtctttcagctcttccttttcacccatggatgatcattgcgagcatgcgctgattggactgaaatgccggggaataggttaggcatgctcagtgccgtccctttgccaccacagtcaaatgacatgcttcactgtggtaccttaatacctgaaatagaaccatggaaaattctgatgtcctctctctgaattatgtacagactacctgggggatcctcttctctccaaatgttagccatcctgaagtagccgaacagtagaaactttggtggggattaaccgggagcttgaaaatttgtctttggtaacctgatactggacagctgaactgaatggtgcaaaataaatacctcacatg

SEQ ID NO: 295313 - DNA, 1966 bp, Homo sapiens
  misc_feature (1882)..(1882): n is a, c, g, or t
  misc_feature (1930)..(1930): n is a, c, g, or t
  misc_feature (1940)..(1940): n is a, c, g, or t
  misc_feature (1942)..(1942): n is a, c, g, or t
  misc_feature (1944)..(1944): n is a, c, g, or t
  misc_feature (1946)..(1946): n is a, c, g, or t
cccggaggaggcggagaggttccgccccccggatctccggcttccggcaactgggctggaccgaaaccggcgcggagcaactgaggcccgagccttctcgggacccgggggacgcctaaccccgcgagatgaggaaactgaggccgcgaggagcgcgcacacagcagagaagcagcagaatcgggaatcaaacccagctctgtctgaccccagagcctgtgcctttaaccactggctaggctgaactgcctttgttcttcactgtccccatcacctctttcaaacctcagcctctccttcctcatcgttacatctctaggctgcacctgctctctaaacattcacacaaaccctgcaaattttcttcctcataattgggagaagactcactggccgaatggcagcagtagatgacttgcaatttgaagaatttggcaatgcagccacttctctgacagcaaacccagatgccaccacagtaaacattgaggatcctggtgaaaccccaaaacatcagccaggatccccaagaggctcaggaagagaagaagatgatgagttactgggaaatgatgactctgacaaaactgagttacttgctggacagaagaaaagctcccccttctggacatttgaatactaccaaacattctttgatgtggacacctaccaggtctttgacagaattaaaggatctcttttgccaatacccgggaaaaactttgtgaggttatatatccgcagcaatccagatctctatggccccttttggatatgtgccacgttggtctttgccatagcaattagtgggaatctttccaacttcttgatccatctgggagagaagacgtaccattatgtgcccgaattccgaaaagtgtccatagcagctaccatcatctatgcctatgcctggctggttcctcttgcactctggggtttcctcatgtggagaaacagcaaagttatgaacatcgtctcctattcatttctggagattgtgtgtgtctatggatattccctcttcatttatatccccaccgcaatactgtggattatcccccagaaagctgttcgttggattctagtcatgattgccctgggcatctcaggatctctcttggcaatgacattttggccagctgttcgtgaggataaccgacgcgttgcattggccacaattgtgacaattgtgttgctccatatgctgctttctgtgggctgcttggcatacttttttgatgcaccagagatggaccatctcccaacaactacagctactccaaaccaaacagttgctgcagccaagtccagctaatgaggaaattctcttttgttttttggagcatggttctttgggaagtggcatccactgcaggaaagcagaatgagcagagccagcagaactgatggagtggcacaaattcccagtgtctggatggtgccacactggcgcctaatcacccgtttaacaagcagaaattaaatgttgctcagcacatgtgtctttcagctcttccttttcacccatggatgatcattgcgagcatgcgctgattggactgaaatgccggggaataggttaggcatgctcagtgccgtccctttgccaccacagtcaaatgacatgcttcactgtggtaccttaatacctgaaatagaaccatggaaaattctgatgtcctctctctgaattatgtacagactacctgggggatcctcttctctccaaatgttagccatcctgaagtagccgaacagtagaaactttggtggggattaaccgggagcttgaaaatttgtctttggtaacctgatactggacagctgaactgaatggtgcaaaataaatacctcacatgaaaaaaaaaaaatggcctcnttggccctagcggggagctctgcggccttccctttagggaggttaatnaagatcctcncnantnaccccctcgcccccggcatg

SEQ ID NO: 295314 - DNA, 1549 bp, Homo sapiens
cccggaggaggcggagaggttccgccccccggatctccggcttccggcaactgggctggaccgaaaccggcgcggagcaactgaggcccgagccttctcgggacccgggggacgcctaaccccgcgagatgaggaaactgaggccgcgaggagcgcgcacacagcagagaagcagcagaatcgggaatcaaacccagctctgtctgaccccagagcctgtgcctttaaccactggctaggctgaactgcctttgttcttcactgtccccatcacctctttcaaacctcagcctctccttcctcatcgttacatctctaggctgcacctgctctctaaacattcacacaaaccctgcaaattttcttcctcataattgggagaagactcactggccgaatggcagcagtagatgacttgcaatttgaagaatttggcaatgcagccacttctctgacagcaaacccagatgccaccacagtaaacattgaggatcctggtgaaaccccaaaacatcagccaggatccccaagaggctcaggaagagaagaagatgatgagttactgggaaatgatgactctgacaaaactgagttacttgctggacagaagaaaagctcccccttctggacatttgaatactaccaaacattctttgatgtggacacctaccaggtctttgacagaattaaaggatctcttttgccaatacccgggaaaaactttgtgaggttatatatccgcagcaatccagatctctatggccccttttggatatgtgccacgttggtctttgccatagcaattagtgggaatctttccaacttcttgatccatctgggagagaagacgtaccattatgtgcccgaattccgaaaagtgtccatagcagctaccatcatctatgcctatgcctggctggttcctcttgcactctggggtttcctcatgtggagaaacagcaaagttatgaacatcgtctcctattcatttctggagattgtgtgtgtctatggatattccctcttcatttatatccccaccgcaatactgtggattatcccccagaaagctgttcgttggattctagtcatgattgccctgggcatctcaggatctctcttggcaatgacattttggccagctgttcgtgaggataaccgacgcgttgcattggccacaattgtgacaattgtgttgctccatatgctgctttctgtgggctgcttggcatacttttttgatgcaccagagatggaccatctcccaacaactacagctactccaaaccaaacagttgctgcagccaagtccagctaatgaggaaagactcacttgagataccctctccttgctgaagtttttcttgacttctccagttctcttttgttttttggagcatggttctttgggaagtggcatccactgcaggaaagcagaatgagcagagccagcagaactgatggagtggcacaaattcccagtgtctggatggtgccacactggcgcctaatcacccgtttaacaagcagaaattaaatgttgctcagc

SEQ ID NO: 295315 - DNA, 1562 bp, Homo sapiens
cccggaggaggcggagaggttccgccccccggatctccggcttccggcaactgggctggaccgaaaccggcgcggagcaactgaggcccgagccttctcgggacccgggggacgcctaaccccgcgagaatttggcaatgcagccacttctctgacagcaaacccagatgccaccacagtaaacattgaggatcctggtgaaaccccaaaacatcagccaggatccccaagaggctcaggaagagaagaagatgatgagttactgggaaatgatgactctgacaaaactgagttacttgctggacagaagaaaagctcccccttctggacatttgaatactaccaaacattctttgatgtggacacctaccaggtctttgacagaattaaaggatctcttttgccaatacccgggaaaaactttgtgaggttatatatccgcagcaatccagatctctatggccccttttggatatgtgccacgttggtctttgccatagcaattagtgggaatctttccaacttcttgatccatctgggagagaagacgtaccattatgtgcccgaattccgaaaagtgtccatagcagctaccatcatctatgcctatgcctggctggttcctcttgcactctggggtttcctcatgtggagaaacagcaaagttatgaacatcgtctcctattcatttctggagattgtgtgtgtctatggatattccctcttcatttatatccccaccgcaatactgtggattatcccccagaaagctgttcgttggattctagtcatgattgccctgggcatctcaggatctctcttggcaatgacattttggccagctgttcgtgaggataaccgacgcgttgcattggccacaattgtgacaattgtgttgctccatatgctgctttctgtgggctgcttggcatacttttttgatgcaccagagatggaccatctcccaacaactacagctactccaaaccaaacagttgctgcagccaagtccagctaatgaggaaattctcttttgttttttggagcatggttctttgggaagtggcatccactgcaggaaagcagaatgagcagagccagcagaactgatggagtggcacaaattcccagtgtctggatggtgccacactggcgcctaatcacccgtttaacaagcagaaattaaatgttgctcagcacatgtgtctttcagctcttccttttcacccatggatgatcattgcgagcatgcgctgattggactgaaatgccggggaataggttaggcatgctcagtgccgtccctttgccaccacagtcaaatgacatgcttcactgtggtaccttaatacctgaaatagaaccatggaaaattctgatgtcctctctctgaattatgtacagactacctgggggatcctcttctctccaaatgttagccatcctgaagtagccgaacagtagaaactttggtggggattaaccgggagcttgaaaatttgtctttggtaacctgatactggacagctgaactgaatggtgcaaaataaatacctcacatg

SEQ ID NO: 295316 - DNA, 1853 bp, Homo sapiens
  misc_feature (1769)..(1769): n is a, c, g, or t
  misc_feature (1817)..(1817): n is a, c, g, or t
  misc_feature (1827)..(1827): n is a, c, g, or t
  misc_feature (1829)..(1829): n is a, c, g, or t
  misc_feature (1831)..(1831): n is a, c, g, or t
  misc_feature (1833)..(1833): n is a, c, g, or t
cccggaggaggcggagaggttccgccccccggatctccggcttccggcaactgggctggaccgaaaccggcgcggagcaactgaggcccgagccttctcgggacccgggggacgcctaaccccgcgagatgaggaaactgaggccgcgaggagcgcgcacacagcagagaagcagcagaatcgggaatcaaacccagctctgtctgaccccagagcctgtgcctttaaccactggctaggctgaactgcctttgttcttcactgtccccatcacctctttcaaacctcagcctctccttcctcatcgttacatctctaggctgcacctgctctctaaacattcacacaaaccctgcaaattttcttcctcataattgggagaagactcactggccgaatggcagcagtagatgacttgcaatttgaagttacttgctggacagaagaaaagctcccccttctggacatttgaatactaccaaacattctttgatgtggacacctaccaggtctttgacagaattaaaggatctcttttgccaatacccgggaaaaactttgtgaggttatatatccgcagcaatccagatctctatggccccttttggatatgtgccacgttggtctttgccatagcaattagtgggaatctttccaacttcttgatccatctgggagagaagacgtaccattatgtgcccgaattccgaaaagtgtccatagcagctaccatcatctatgcctatgcctggctggttcctcttgcactctggggtttcctcatgtggagaaacagcaaagttatgaacatcgtctcctattcatttctggagattgtgtgtgtctatggatattccctcttcatttatatccccaccgcaatactgtggattatcccccagaaagctgttcgttggattctagtcatgattgccctgggcatctcaggatctctcttggcaatgacattttggccagctgttcgtgaggataaccgacgcgttgcattggccacaattgtgacaattgtgttgctccatatgctgctttctgtgggctgcttggcatacttttttgatgcaccagagatggaccatctcccaacaactacagctactccaaaccaaacagttgctgcagccaagtccagctaatgaggaaagactcacttgagataccctctccttgctgaagtttttcttgacttctccagttctcttttgttttttggagcatggttctttgggaagtggcatccactgcaggaaagcagaatgagcagagccagcagaactgatggagtggcacaaattcccagtgtctggatggtgccacactggcgcctaatcacccgtttaacaagcagaaattaaatgttgctcagcacatgtgtctttcagctcttccttttcacccatggatgatcattgcgagcatgcgctgattggactgaaatgccggggaataggttaggcatgctcagtgccgtccctttgccaccacagtcaaatgacatgcttcactgtggtaccttaatacctgaaatagaaccatggaaaattctgatgtcctctctctgaattatgtacagactacctgggggatcctcttctctccaaatgttagccatcctgaagtagccgaacagtagaaactttggtggggattaaccgggagcttgaaaatttgtctttggtaacctgatactggacagctgaactgaatggtgcaaaataaatacctcacatgaaaaaaaaaaaatggcctcnttggccctagcggggagctctgcggccttccctttagggaggttaatnaagatcctcncnantnaccccctcgcccccggcatg

SEQ ID NO: 295317 - DNA, 1886 bp, Homo sapiens
  misc_feature (1802)..(1802): n is a, c, g, or t
  misc_feature (1850)..(1850): n is a, c, g, or t
  misc_feature (1860)..(1860): n is a, c, g, or t
  misc_feature (1862)..(1862): n is a, c, g, or t
  misc_feature (1864)..(1864): n is a, c, g, or t
  misc_feature (1866)..(1866): n is a, c, g, or t
cccggaggaggcggagaggttccgccccccggatctccggcttccggcaactgggctggaccgaaaccggcgcggagcaactgaggcccgagccttctcgggacccgggggacgcctaaccccgcgagaaccctgcaaattttcttcctcataattgggagaagactcactggccgaatggcagcagtagatgacttgcaatttgaagaatttggcaatgcagccacttctctgacagcaaacccagatgccaccacagtaaacattgaggatcctggtgaaaccccaaaacatcagccaggatccccaagaggctcaggaagagaagaagatgatgagttactgggaaatgatgactctgacaaaactgaggtacagtgtcaggcaatgacagctcagaggtaaatgacacatggcctcttccttggtgggggaaacaggcaaacagaccattactttccttacttgctggacagaagaaaagctcccccttctggacatttgaatactaccaaacattctttgatgtggacacctaccaggtctttgacagaattaaaggatctcttttgccaatacccgggaaaaactttgtgaggttatatatccgcagcaatccagatctctatggccccttttggatatgtgccacgttggtctttgccatagcaattagtgggaatctttccaacttcttgatccatctgggagagaagacgtaccattatgtgcccgaattccgaaaagtgtccatagcagctaccatcatctatgcctatgcctggctggttcctcttgcactctggggtttcctcatgtggagaaacagcaaagttatgaacatcgtctcctattcatttctggagattgtgtgtgtctatggatattccctcttcatttatatccccaccgcaatactgtggattatcccccagaaagctgttcgttggattctagtcatgattgccctgggcatctcaggatctctcttggcaatgacattttggccagctgttcgtgaggataaccgacgcgttgcattggccacaattgtgacaattgtgttgctccatatgctgctttctgtgggctgcttggcatacttttttgatgcaccagagatggaccatctcccaacaactacagctactccaaaccaaacagttgctgcagccaagtccagctaatgaggaaagactcacttgagataccctctccttgctgaagtttttcttgacttctccagttctcttttgttttttggagcatggttctttgggaagtggcatccactgcaggaaagcagaatgagcagagccagcagaactgatggagtggcacaaattcccagtgtctggatggtgccacactggcgcctaatcacccgtttaacaagcagaaattaaatgttgctcagcacatgtgtctttcagctcttccttttcacccatggatgatcattgcgagcatgcgctgattggactgaaatgccggggaataggttaggcatgctcagtgccgtccctttgccaccacagtcaaatgacatgcttcactgtggtaccttaatacctgaaatagaaccatggaaaattctgatgtcctctctctgaattatgtacagactacctgggggatcctcttctctccaaatgttagccatcctgaagtagccgaacagtagaaactttggtggggattaaccgggagcttgaaaatttgtctttggtaacctgatactggacagctgaactgaatggtgcaaaataaatacctcacatgaaaaaaaaaaaatggcctcnttggccctagcggggagctctgcggccttccctttagggaggttaatnaagatcctcncnantnaccccctcgcccccggcatg

SEQ ID NO: 295318 - DNA, 292 bp, Homo sapiens
cccggaggaggcggagaggttccgccccccggatctccggcttccggcaactgggctggaccgaaaccggcgcggagcaactgaggcccgagccttctcgggacccgggggacgcctaaccccgcgagatgaggaaactgaggccgcgaggagcgcgcacacagcagagaagcagcagaatcgggaatcaaacccagctctgtctgaccccagagcctgtgcctttaaccactggctaggctgaactgcctttgttcttggggagcgggagacgttgtggtggggctggggc

SEQ ID NO: 295319 - DNA, 1498 bp, Homo sapiens
cccggaggaggcggagaggttccgccccccggatctccggcttccggcaactgggctggaccgaaaccggcgcggagcaactgaggcccgagccttctcgggacccgggggacgcctaaccccgcgagatgaggaaactgaggccgcgaggagcgcgcacacagcagagaagcagcagaatcgggaatcaaacccagctctgtctgaccccagagcctgtgcctttaaccactggctaggctgaactgcctttgttcttcactgtccccatcacctctttcaaacctcagcctctccttcctcatcgttacatctctaggctgcacctgctctctaaacattcacacaaaccctgcaaattttcttcctcataattgggagaagactcactggccgaatggcagcagtagatgacttgcaatttgaagaatttggcaatgcagccacttctctgacagcaaacccagatgccaccacagtaaacattgaggatcctggtgaaaccccaaaacatcagccaggatccccaagaggctcaggaagagaagaagatgatgagttactgggaaatgatgactctgacaaaactgagttacttgctggacagaagaaaagctcccccttctggacatttgaatactaccaaacattctttgatgtggacacctaccaggtctttgacagaattaaaggatctcttttgccaatacccgggaaaaactttgtgaggttatatatccgcagcaatccagatctctatggccccttttggatatgtgccacgttggtctttgccatagcaattagtgggaatctttccaacttcttgatccatctgggagagaagacgtaccattatgtgcccgaattccgaaaagtgtccatagcagctaccatcatctatgcctatgcctggctggttcctcttgcactctggggtttcctcatgtggagaaacagcaaagttatgaacatcgtctcctattcatttctggagattgtgtgtgtctatggatattccctcttcatttatatccccaccgcaatactgtggattatcccccagaaagctgttcgttggattctagtcatgattgccctgggcatctcaggatctctcttggcaatgacattttggccagctgttcgtgaggataaccgacgcgttgcattggccacaattgtgacaattgtgttgctccatatgctgctttctgtgggctgcttggcatacttttttgatgcaccagagatggaccatctcccaacaactacagctactccaaaccaaacagttgctgcagccaagtccagctaatgaggaaattctcttttgttttttggagcatggttctttgggaagtggcatccactgcaggaaagcagaatgagcagagccagcagaactgatggagtggcacaaattcccagtgtctggatggtgccacactggcgcctaatcacccgtttaacaagcagaaattaaatgttgctcagc

SEQ ID NO: 295320 - DNA, 2106 bp, Homo sapiens
  misc_feature (2022)..(2022): n is a, c, g, or t
  misc_feature (2070)..(2070): n is a, c, g, or t
  misc_feature (2080)..(2080): n is a, c, g, or t
  misc_feature (2082)..(2082): n is a, c, g, or t
  misc_feature (2084)..(2084): n is a, c, g, or t
  misc_feature (2086)..(2086): n is a, c, g, or t
cccggaggaggcggagaggttccgccccccggatctccggcttccggcaactgggctggaccgaaaccggcgcggagcaactgaggcccgagccttctcgggacccgggggacgcctaaccccgcgagatgaggaaactgaggccgcgaggagcgcgcacacagcagagaagcagcagaatcgggaatcaaacccagctctgtctgaccccagagcctgtgcctttaaccactggctaggctgaactgcctttgttcttcactgtccccatcacctctttcaaacctcagcctctccttcctcatcgttacatctctaggctgcacctgctctctaaacattcacacaaaccctgcaaattttcttcctcataattgggagaagactcactggccgaatggcagcagtagatgacttgcaatttgaagaatttggcaatgcagccacttctctgacagcaaacccagatgccaccacagtaaacattgaggatcctggtgaaaccccaaaacatcagccaggatccccaagaggctcaggaagagaagaagatgatgagttactgggaaatgatgactctgacaaaactgaggtacagtgtcaggcaatgacagctcagaggtaaatgacacatggcctcttccttggtgggggaaacaggcaaacagaccattactttccttacttgctggacagaagaaaagctcccccttctggacatttgaatactaccaaacattctttgatgtggacacctaccaggtctttgacagaattaaaggatctcttttgccaatacccgggaaaaactttgtgaggttatatatccgcagcaatccagatctctatggccccttttggatatgtgccacgttggtctttgccatagcaattagtgggaatctttccaacttcttgatccatctgggagagaagacgtaccattatgtgcccgaattccgaaaagtgtccatagcagctaccatcatctatgcctatgcctggctggttcctcttgcactctggggtttcctcatgtggagaaacagcaaagttatgaacatcgtctcctattcatttctggagattgtgtgtgtctatggatattccctcttcatttatatccccaccgcaatactgtggattatcccccagaaagctgttcgttggattctagtcatgattgccctgggcatctcaggatctctcttggcaatgacattttggccagctgttcgtgaggataaccgacgcgttgcattggccacaattgtgacaattgtgttgctccatatgctgctttctgtgggctgcttggcatacttttttgatgcaccagagatggaccatctcccaacaactacagctactccaaaccaaacagttgctgcagccaagtccagctaatgaggaaagactcacttgagataccctctccttgctgaagtttttcttgacttctccagttctcttttgttttttggagcatggttctttgggaagtggcatccactgcaggaaagcagaatgagcagagccagcagaactgatggagtggcacaaattcccagtgtctggatggtgccacactggcgcctaatcacccgtttaacaagcagaaattaaatgttgctcagcacatgtgtctttcagctcttccttttcacccatggatgatcattgcgagcatgcgctgattggactgaaatgccggggaataggttaggcatgctcagtgccgtccctttgccaccacagtcaaatgacatgcttcactgtggtaccttaatacctgaaatagaaccatggaaaattctgatgtcctctctctgaattatgtacagactacctgggggatcctcttctctccaaatgttagccatcctgaagtagccgaacagtagaaactttggtggggattaaccgggagcttgaaaatttgtctttggtaacctgatactggacagctgaactgaatggtgcaaaataaatacctcacatgaaaaaaaaaaaatggcctcnttggccctagcggggagctctgcggccttccctttagggaggttaatnaagatcctcncnantnaccccctcgcccccggcatg

SEQ ID NO: 295321 - DNA, 1633 bp, Homo sapiens
  misc_feature (1549)..(1549): n is a, c, g, or t
  misc_feature (1597)..(1597): n is a, c, g, or t
  misc_feature (1607)..(1607): n is a, c, g, or t
  misc_feature (1609)..(1609): n is a, c, g, or t
  misc_feature (1611)..(1611): n is a, c, g, or t
  misc_feature (1613)..(1613): n is a, c, g, or t
cccggaggaggcggagaggttccgccccccggatctccggcttccggcaactgggctggaccgaaaccggcgcggagcaactgaggcccgagccttctcgggacccgggggacgcctaaccccgcgagaaccctgcaaattttcttcctcataattgggagaagactcactggccgaatggcagcagtagatgacttgcaatttgaagttacttgctggacagaagaaaagctcccccttctggacatttgaatactaccaaacattctttgatgtggacacctaccaggtctttgacagaattaaaggatctcttttgccaatacccgggaaaaactttgtgaggttatatatccgcagcaatccagatctctatggccccttttggatatgtgccacgttggtctttgccatagcaattagtgggaatctttccaacttcttgatccatctgggagagaagacgtaccattatgtgcccgaattccgaaaagtgtccatagcagctaccatcatctatgcctatgcctggctggttcctcttgcactctggggtttcctcatgtggagaaacagcaaagttatgaacatcgtctcctattcatttctggagattgtgtgtgtctatggatattccctcttcatttatatccccaccgcaatactgtggattatcccccagaaagctgttcgttggattctagtcatgattgccctgggcatctcaggatctctcttggcaatgacattttggccagctgttcgtgaggataaccgacgcgttgcattggccacaattgtgacaattgtgttgctccatatgctgctttctgtgggctgcttggcatacttttttgatgcaccagagatggaccatctcccaacaactacagctactccaaaccaaacagttgctgcagccaagtccagctaatgaggaaagactcacttgagataccctctccttgctgaagtttttcttgacttctccagttctcttttgttttttggagcatggttctttgggaagtggcatccactgcaggaaagcagaatgagcagagccagcagaactgatggagtggcacaaattcccagtgtctggatggtgccacactggcgcctaatcacccgtttaacaagcagaaattaaatgttgctcagcacatgtgtctttcagctcttccttttcacccatggatgatcattgcgagcatgcgctgattggactgaaatgccggggaataggttaggcatgctcagtgccgtccctttgccaccacagtcaaatgacatgcttcactgtggtaccttaatacctgaaatagaaccatggaaaattctgatgtcctctctctgaattatgtacagactacctgggggatcctcttctctccaaatgttagccatcctgaagtagccgaacagtagaaactttggtggggattaaccgggagcttgaaaatttgtctttggtaacctgatactggacagctgaactgaatggtgcaaaataaatacctcacatgaaaaaaaaaaaatggcctcnttggccctagcggggagctctgcggccttccctttagggaggttaatnaagatcctcncnantnaccccctcgcccccggcatg

SEQ ID NO: 295322 - DNA, 981 bp, Homo sapiens
tgggaacacaaacttgctggcgggaagagcccggaaagaaacctgtggatctcccttcgagatcatccaaagagaagaaaggtgacctcacattcgtgccccttagcagcactctgcagaaatgcctcctcagctgcaaaacggcctgaacctctcggccaaagttgtccagggaagcctggacagcctgccccaggcagtgagggagtttctcgagaataacgctgagctgtgtcagcctgatcacatccacatctgtgacggctctgaggaggagaatgggcggcttctgggccagatggaggaagagggcatcctcaggcggctgaagaagtatgacaactgctggttggctctcactgaccccagggatgtggccaggatcgaaagcaagacggttatcgtcacccaagagcaaagagacacagtgcccatccccaaaacaggcctcagccagctcggtcgctggatgtcagaggaggattttgagaaagcgttcaatgccaggttcccagggtgcatgaaaggtcgcaccatgtacgtcatcccattcagcatggggccgctgggctcacctctgtcgaagatcggcatcgagctgacggattcgccctacgtggtggccagcatgcggatcatgacgcggatgggcacgcccgtcctggaagcactgggcgatggggagtttgtcaaatgcctccattctgtggggtgccctctgcctttacaaaagcctttggtcaacaactggccctgcaacccggagctgacgctcatcgcccacctgcctgaccgcagagagatcatctcctttggcagtgggtacggcgggaactcgctgctcgggaagaagtgctttgctctcaggatggccagccggctggccaaggaggaagggtggctggcagagcacatgctgatctgggtataaccaacctgaggttgagagaatgtccggggcgcctagagatcctcgagggc

SEQ ID NO: 295323 - DNA, 393 bp, Homo sapiens
aactttgctcaattgcactgtagagctcagtttggccaatgtgtagttgactgagatgcaagttgggaggcattagatattagataattttgatgtgtgtgtgtgtgtgtgtgtgtgtgtgtgtgcatgtatgtgcacatgtgtctgtgtggtatatttgtgtatgtgtatttgtatgtactgttattgaaaatatatttaatacctttggaaaaatcttgggcaagatgacctactagttttccttgaaaaaaagttgctttgttattaatattgtgcttaaattatttttatacaccattgttccttacctttacataattgcaatatttcccccttactacttcttggaaaaaaattacaaaatgaagttttatagaaaagaaaaaaaag

SEQ ID NO: 295324 - DNA, 364 bp, Homo sapiens
gccccttgttgttagttgggctggcaagggaatttctggtgactgtagttccttagttaggtcttagcaatcaaaccaaattgatgtctcccttgactcttctgtgtatatgtgtctgtgtggtatatttgtgtatgtgtatttgtatgtactgttattgaaaatatatttaatacctttggaaaaatcttgggcaagatgacctactagttttccttgaaaaaaagttgctttgttattaatattgtgcttaaattatttttatacaccattgttccttacctttacataattgcaatatttcccccttactacttcttggaaaaaaattacaaaatgaagttttatagaaaagaaaaaaaag

SEQ ID NO: 295325 - DNA, 2998 bp, Homo sapiens
tgggaacacaaacttgctggcgggaagagcccggaaagaaacctgtggatctcccttcgagatcatccaaagagaagaaaggtgacctcacattcgtgccccttagcagcactctgcagaaatgcctcctcagctgcaaaacggcctgaacctctcggccaaagttgtccagggaagcctggacagcctgccccaggcagtgagggagtttctcgagaataacgctgagctgtgtcagcctgatcacatccacatctgtgacggctctgaggaggagaatgggcggcttctgggccagatggaggaagagggcatcctcaggcggctgaagaagtatgacaactgctggttggctctcactgaccccagggatgtggccaggatcgaaagcaagacggttatcgtcacccaagagcaaagagacacagtgcccatccccaaaacaggcctcagccagctcggtcgctggatgtcagaggaggattttgagaaagcgttcaatgccaggttcccagggtgcatgaaaggtcgcaccatgtacgtcatcccattcagcatggggccgctgggctcacctctgtcgaagatcggcatcgagctgacggattcgccctacgtggtggccagcatgcggatcatgacgcggatgggcacgcccgtcctggaagcactgggcgatggggagtttgtcaaatgcctccattctgtggggtgccctctgcctttacaaaagcctttggtcaacaactggccctgcaacccggagctgacgctcatcgcccacctgcctgaccgcagagagatcatctcctttggcagtgggtacggcgggaactcgctgctcgggaagaagtgctttgctctcaggatggccagccggctggccaaggaggaagggtggctggcagagcacatgctggtgagcctgcaggaagccctgatgtgcagatgagaggcctggggggtggcagaaacaaacagcattacagttcccacccgtcagcacacctctctgagcgtgcaggttcccggacagatcgggaaaccccaccagtaatgattagtttacacatatacatcgcttttgaaggcccccaaacaccaggggaccatagagatcctttggacttcatgattctgggagtgtttgtttgcactgatacctgaagaaatagatcttgagggcctacattccaacctctgggctgaagtaccaacctcggggagaaggaaacaaagatcacaataaagaatcttgtccccaacagattctgggtataaccaaccctgagggtgagaagaagtacctggcggccgcatttcccagcgcctgcgggaagaccaacctggccatgatgaaccccagcctccccgggtggaaggttgagtgcgtcggggatgacattgcctggatgaagtttgacgcacaaggtcatttaagggccatcaacccagaaaatggctttttcggtgtcgctcctgggacttcagtgaagaccaaccccaatgccatcaagaccatccagaagaacacaatctttaccaatgtggccgagaccagcgacgggggcgtttactgggaaggcattgatgagccgctagcttcaggcgtcaccatcacgtcctggaagaataaggagtggagctcagaggatggggaaccttgtgcccaccccaactcgaggttctgcacccctgccagccagtgccccatcattgatgctgcctgggagtctccggaaggtgttcccattgaaggcattatctttggaggccgtagacctgctggtgtccctctagtctatgaagctctcagctggcaacatggagtctttgtgggggcggccatgagatcagaggccacagcggctgcagaacataaaggcaaaatcatcatgcatgacccctttgccatgcggcccttctttggctacaacttcggcaaatacctggcccactggcttagcatggcccagcacccagcagccaaactgcccaagatcttccatgtcaactggttccggaaggacaaggaaggcaaattcctctggccaggctttggagagaactccagggtgctggagtggatgttcaaccggatcgatggaaaagccagcaccaagctcacgcccataggctacatccccaaggaggatgccctgaacctgaaaggcctggggcacatcaacatgatggagcttttcagcatctccaaggaattctgggagaaggaggtggaagacatcgagaagtatctggaggatcaagtcaatgccgacctcccctgtgaaatcgagagagagatccttgccttgaagcaaagaataagccagatgtaatcagggcctgagtgctttacctttaaaatcattccctttcccatccataaggtgcagtaggagcaagagagggcaagtgttcccaaattgacgccaccataataatcatcaccacaccgtgagcagatctgaaaggcacactttgatttttttaaggataagaaccacagaacactgggtagtagctaatgaaattgagaagggaaatcttagcatgcctccaaaaattcacatccaatgcatagtttgttcaaatttaaggttactcaggcattgatcttttcagtgttttttcactttagctatgtggattagctagaatgcacaccaaaaaaatacttgagctgtatatatatatatgtgtgtgtgtgtgtgtgtgtgtgtgtgtgtgcatgtatgtgcacatgtgtctgtgtggtatatttgtgtatgtgtatttgtatgtactgttattgaaaatatatttaatacctttggaaaaatcttgggcaagatgacctactagttttccttgaaaaaaagttgctttgttattaatattgtgcttaaattatttttatacaccattgttccttacctttacataattgcaatatttcccccttactacttcttggaaaaaaattacaaaatgaagttttatagaaaagaaaaaaaag

SEQ ID NO: 295326 - DNA, 2797 bp, Homo sapiens
ggttcgctgcccgtggtgcttggctgaaaggaagcctgtgatttttgcagctggttggctctcactgaccccagggatgtggccaggatcgaaagcaagacggttatcgtcacccaagagcaaagagacacagtgcccatccccaaaacaggcctcagccagctcggtcgctggatgtcagaggaggattttgagaaagcgttcaatgccaggttcccagggtgcatgaaaggtgagcggaacattgatttgattgggtaaaacagcagagagccttttcttatttacatctatcctaatggtaattcaaacaataatggaagctcccaccacctcagatgtctttcagttccatacatgaagttggcaatgtattgaaaatgcacatccctcttctgcttttacagactgtcttatacaaacgtgaaaactagttccatgcatatgggttttaaatagcttggtgggacccaattgcacatttatgaaaactctttaatttcagcaggctgttcactttccagtggcctcttctaacccagggggctggtgaccagcagggtgtggtggtgttagtggaacaccgtgaaaatgggtctacctgggaaaaaaatgctggtcgtgttcgaagtccaaggtcatttctcaccagtgcccacccatcgcaccctgtaggtcgcaccatgtacgtcatcccattcagcatggggccgctgggctcacctctgtcgaagatcggcatcgagctgacggattcgccctacgtggtggccagcatgcggatcatgacgcggatgggcacgcccgtcctggaagcactgggcgatggggagtttgtcaaatgcctccattctgtggggtgccctctgcctttacaaaagcctttggtcaacaactggccctgcaacccggagctgacgctcatcgcccacctgcctgaccgcagagagatcatctcctttggcagtgggtacggcgggaactcgctgctcgggaagaagtgctttgctctcaggatggccagccggctggccaaggaggaagggtggctggcagagcacatgctgattctgggtataaccaaccctgagggtgagaagaagtacctggcggccgcatttcccagcgcctgcgggaagaccaacctggccatgatgaaccccagcctccccgggtggaaggttgagtgcgtcggggatgacattgcctggatgaagtttgacgcacaaggtcatttaagggccatcaacccagaaaatggctttttcggtgtcgctcctgggacttcagtgaagaccaaccccaatgccatcaagaccatccagaagaacacaatctttaccaatgtggccgagaccagcgacgggggcgtttactgggaaggcattgatgagccgctagcttcaggcgtcaccatcacgtcctggaagaataaggagtggagctcagaggatggggaaccttgtgcccaccccaactcgaggttctgcacccctgccagccagtgccccatcattgatgctgcctgggagtctccggaaggtgttcccattgaaggcattatctttggaggccgtagacctgctggtgtccctctagtctatgaagctctcagctggcaacatggagtctttgtgggggcggccatgagatcagaggccacagcggctgcagaacataaaggcaaaatcatcatgcatgacccctttgccatgcggcccttctttggctacaacttcggcaaatacctggcccactggcttagcatggcccagcacccagcagccaaactgcccaagatcttccatgtcaactggttccggaaggacaaggaaggcaaattcctctggccaggctttggagagaactccagggtgctggagtggatgttcaaccggatcgatggaaaagccagcaccaagctcacgcccataggctacatccccaaggaggatgccctgaacctgaaaggcctggggcacatcaacatgatggagcttttcagcatctccaaggaattctgggagaaggaggtggaagacatcgagaagtatctggaggatcaagtcaatgccgacctcccctgtgaaatcgagagagagatccttgccttgaagcaaagaataagccagatgtaatcagggcctgagtgctttacctttaaaatcattccctttcccatccataaggtgcagtaggagcaagagagggcaagtgttcccaaattgacgccaccataataatcatcaccacaccgtgagcagatctgaaaggcacactttgatttttttaaggataagaaccacagaacactgggtagtagctaatgaaattgagaagggaaatcttagcatgcctccaaaaattcacatccaatgcatagtttgttcaaatttaaggttactcaggcattgatcttttcagtgttttttcactttagctatgtggattagctagaatgcacaccaaaaaaatacttgagctgtatatatatatatgtgtgtgtgtgtgtgtgtgtgtgtgtgtgtgcatgtatgtgcacatgtgtctgtgtggtatatttgtgtatgtgtatttgtatgtactgttattgaaaatatatttaatacctttggaaaaatcttgggcaagatgacctactagttttccttgaaaaaaagttgctttgttattaatattgtgcttaaattatttttatacaccattgttccttacctttacataattgcaatatttcccccttactacttcttggaaaaaaattacaaaatgaagttttatagaaaagaaaaaaaag

SEQ ID NO: 295327 - DNA, 2777 bp, Homo sapiens
tgggaacacaaacttgctggcgggaagagcccggaaagaaacctgtggatctcccttcgagatcatccaaagagaagaaaggtgacctcacattcgtgccccttagcagcactctgcagaaatgcctcctcagctgcaaaacggcctgaacctctcggccaaagttgtccagggaagcctggacagcctgccccaggcagtgagggagtttctcgagaataacgctgagctgtgtcagcctgatcacatccacatctgtgacggctctgaggaggagaatgggcggcttctgggccagatggaggaagagggcatcctcaggcggctgaagaagtatgacaactgctggttggctctcactgaccccagggatgtggccaggatcgaaagcaagacggttatcgtcacccaagagcaaagagacacagtgcccatccccaaaacaggcctcagccagctcggtcgctggatgtcagaggaggattttgagaaagcgttcaatgccaggttcccagggtgcatgaaaggtcgcaccatgtacgtcatcccattcagcatggggccgctgggctcacctctgtcgaagatcggcatcgagctgacggattcgccctacgtggtggccagcatgcggatcatgacgcggatgggcacgcccgtcctggaagcactgggcgatggggagtttgtcaaatgcctccattctgtggggtgccctctgcctttacaaagtaagtgtattatttcagaatcaaaagtcaaaataaaaaagaaagctgaacgcaaaccccagtgagtgcctcggggacccccaagcagggccctggcgcactgacttgggagaggtccttgttcacagagcctttggtcaacaactggccctgcaacccggagctgacgctcatcgcccacctgcctgaccgcagagagatcatctcctttggcagtgggtacggcgggaactcgctgctcgggaagaagtgctttgctctcaggatggccagccggctggccaaggaggaagggtggctggcagagcacatgctgattctgggtataaccaaccctgagggtgagaagaagtacctggcggccgcatttcccagcgcctgcgggaagaccaacctggccatgatgaaccccagcctccccgggtggaaggttgagtgcgtcggggatgacattgcctggatgaagtttgacgcacaaggtcatttaagggccatcaacccagaaaatggctttttcggtgtcgctcctgggacttcagtgaagaccaaccccaatgccatcaagaccatccagaagaacacaatctttaccaatgtggccgagaccagcgacgggggcgtttactgggaaggcattgatgagccgctagcttcaggcgtcaccatcacgtcctggaagaataaggagtggagctcagaggatggggaaccttgtgcccaccccaactcgaggttctgcacccctgccagccagtgccccatcattgatgctgcctgggagtctccggaaggtgttcccattgaaggcattatctttggaggccgtagacctgctggtgtccctctagtctatgaagctctcagctggcaacatggagtctttgtgggggcggccatgagatcagaggccacagcggctgcagaacataaaggcaaaatcatcatgcatgacccctttgccatgcggcccttctttggctacaacttcggcaaatacctggcccactggcttagcatggcccagcacccagcagccaaactgcccaagatcttccatgtcaactggttccggaaggacaaggaaggcaaattcctctggccaggctttggagagaactccagggtgctggagtggatgttcaaccggatcgatggaaaagccagcaccaagctcacgcccataggctacatccccaaggaggatgccctgaacctgaaaggcctggggcacatcaacatgatggagcttttcagcatctccaaggaattctgggagaaggaggtggaagacatcgagaagtatctggaggatcaagtcaatgccgacctcccctgtgaaatcgagagagagatccttgccttgaagcaaagaataagccagatgtaatcagggcctgagtgctttacctttaaaatcattccctttcccatccataaggtgcagtaggagcaagagagggcaagtgttcccaaattgacgccaccataataatcatcaccacaccgtgagcagatctgaaaggcacactttgatttttttaaggataagaaccacagaacactgggtagtagctaatgaaattgagaagggaaatcttagcatgcctccaaaaattcacatccaatgcatagtttgttcaaatttaaggttactcaggcattgatcttttcagtgttttttcactttagctatgtggattagctagaatgcacaccaaaaaaatacttgagctgtatatatatatatgtgtgtgtgtgtgtgtgtgtgtgtgtgtgtgcatgtatgtgcacatgtgtctgtgtggtatatttgtgtatgtgtatttgtatgtactgttattgaaaatatatttaatacctttggaaaaatcttgggcaagatgacctactagttttccttgaaaaaaagttgctttgttattaatattgtgcttaaattatttttatacaccattgttccttacctttacataattgcaatatttcccccttactacttcttggaaaaaaattacaaaatgaagttttatagaaaagaaaaaaaag

SEQ ID NO: 295328 - DNA, 2947 bp, Homo sapiens
tgggaacacaaacttgctggcgggaagagcccggaaagaaacctgtggatctcccttcgagatcatccaaagagaagaaaggtgacctcacattcgtgccccttagcagcactctgcagaaatgcctcctcagctgcaaaacggcctgaacctctcggccaaagttgtccagggaagcctggacagcctgccccaggcagtgagggagtttctcgagaataacgctgagctgtgtcagcctgatcacatccacatctgtgacggctctgaggaggagaatgggcggcttctgggccagatggaggaagagggcatcctcaggcggctgaagaagtatgacaactgctggttggctctcactgaccccagggatgtggccaggatcgaaagcaagacggttatcgtcacccaagagcaaagagacacagtgcccatccccaaaacaggcctcagccagctcggtcgctggatgtcagaggaggattttgagaaagcgttcaatgccaggttcccagggtgcatgaaaggtcgcaccatgtacgtcatcccattcagcatggggccgctgggctcacctctgtcgaagatcggcatcgagctgacggattcgccctacgtggtggccagcatgcggatcatgacgcggatgggcacgcccgtcctggaagcactgggcgatggggagtttgtcaaatgcctccattctgtggggtgccctctgcctttacaaaagcctttggtcaacaactggccctgcaacccggagctgacgctcatcgcccacctgcctgaccgcagagagatcatctcctttggcagtgggtacggcgggaactcgctgctcgggaagaagtgctttgctctcaggatggccagccggctggccaaggaggaagggtggctggcagagcacatgctggtgagcctgcaggaagccctgatgtgcagatgagaggcctggggggtggcagaaacaaacagcattacagttcccacccgtcagcacacctctctgagcgtgcaggttcccggacagatcgggaaaccccaccagtaatgattagtttacacatatacatcgcttttgaaggcccccaaacaccaggggaccatagagatcctttggacttcatgattctgggagtgtttgtttgcactgatacctgaagaaatagatcttgagggcctacattccaacctctgggctgaagtaccaacctcggggagaaggaaacaaagatcacaataaagaatcttgtccccaacagattctgggtataaccaaccctgagggtgagaagaagtacctggcggccgcatttcccagcgcctgcgggaagaccaacctggccatgatgaaccccagcctccccgggtggaaggttgagtgcgtcggggatgacattgcctggatgaagtttgacgcacaaggtcatttaagggccatcaacccagaaaatggctttttcggtgtcgctcctgggacttcagtgaagaccaaccccaatgccatcaagaccatccagaagaacacaatctttaccaatgtggccgagaccagcgacgggggcgtttactgggaaggcattgatgagccgctagcttcaggcgtcaccatcacgtcctggaagaataaggagtggagctcagaggatggggaaccttgtgcccaccccaactcgaggttctgcacccctgccagccagtgccccatcattgatgctgcctgggagtctccggaaggtgttcccattgaaggcattatctttggaggccgtagacctgctggtgtccctctagtctatgaagctctcagctggcaacatggagtctttgtgggggcggccatgagatcagaggccacagcggctgcagaacataaaggcaaaatcatcatgcatgacccctttgccatgcggcccttctttggctacaacttcggcaaatacctggcccactggcttagcatggcccagcacccagcagccaaactgcccaagatcttccatgtcaactggttccggaaggacaaggaaggcaaattcctctggccaggctttggagagaactccagggtgctggagtggatgttcaaccggatcgatggaaaagccagcaccaagctcacgcccataggctacatccccaaggaggatgccctgaacctgaaaggcctggggcacatcaacatgatggagcttttcagcatctccaaggaattctgggagaaggaggtggaagacatcgagaagtatctggaggatcaagtcaatgccgacctcccctgtgaaatcgagagagagatccttgccttgaagcaaagaataagccagatgtaatcagggcctgagtgctttacctttaaaatcattccctttcccatccataaggtgcagtaggagcaagagagggcaagtgttcccaaattgacgccaccataataatcatcaccacaccgtgagcagatctgaaaggcacactttgatttttttaaggataagaaccacagaacactgggtagtagctaatgaaattgagaagggaaatcttagcatgcctccaaaaattcacatccaatgcatagtttgttcaaatttaaggttactcaggcattgatcttttcagtgttttttcactttagctatgtggattagctagaatgcacaccaaaaaaatacttgagctgtatatatatatatgtgtgtgtgtgtgtgtgtgtgtgtgtgtgtgcatgtatgtgcacatgtgtctgtgtggtatatttgtgtatgtgtatttgtatgtactgttattgaaaatatatttaatacctttggaaaaatcttgggcaagatgacctactagttttccttgaaaaaaagttgcaattatgtaaaggtaaggaacaatggtgtataaaaataatttaagcacaatattaataacaaagcaacttttttgtcgacgc

SEQ ID NO: 295329 - DNA, 634 bp, Homo sapiens
tgggaacacaaacttgctggcgggaagagcccggaaagaaacctgtggatctcccttcgagatcatccaaagagaagaaaggtgacctcacattcgtgccccttagcagcactctgcagaaatgcctcctcagctgcaaaacggcctgaacctctcggccaaagttgtccagggaagcctggacagcctgccccaggcagtgagggagtttctcgagaataacgctgagctgtgtcagcctgatcacatccacatctgtgacggctctgaggaggagaatgggcggcttctgggccagatggaggaagagggcatcctcaggcggctgaagaagtatgacaactggtaagctcggcccccgctgcctgtcccagcaccctgcaggcagggctcccctgcgtctcctgggagttggtggagaaaggtgaatgaaggccttcgggtagtttcagactcttgagaagatgaatgcaatggtcagaaccatacagacttgaattttgtgacattagtgggccagcccaagctttaaatgaggtgtgtgcacaaaagctctgccaactagattcctgattaaaaaaaaggcagcccctctcctacagaccaggtcctagtggagtaaatgtccacctgg

SEQ ID NO: 295330 - DNA, 2649 bp, Homo sapiens
tgggaacacaaacttgctggcgggaagagcccggaaagaaacctgtggatctcccttcgagatcatccaaagagaagaaaggtgacctcacattcgtgccccttagcagcactctgcagaaatgcctcctcagctgcaaaacggcctgaacctctcggccaaagttgtccagggaagcctggacagcctgccccaggcagtgagggagtttctcgagaataacgctgagctgtgtcagcctgatcacatccacatctgtgacggctctgaggaggagaatgggcggcttctgggccagatggaggaagagggcatcctcaggcggctgaagaagtatgacaactgctggttggctctcactgaccccagggatgtggccaggatcgaaagcaagacggttatcgtcacccaagagcaaagagacacagtgcccatccccaaaacaggcctcagccagctcggtcgctggatgtcagaggaggattttgagaaagcgttcaatgccaggttcccagggtgcatgaaaggtcgcaccatgtacgtcatcccattcagcatggggccgctgggctcacctctgtcgaagatcggcatcgagctgacggattcgccctacgtggtggccagcatgcggatcatgacgcggatgggcacgcccgtcctggaagcactgggcgatggggagtttgtcaaatgcctccattctgtggggtgccctctgcctttacaaaagcctttggtcaacaactggccctgcaacccggagctgacgctcatcgcccacctgcctgaccgcagagagatcatctcctttggcagtgggtacggcgggaactcgctgctcgggaagaagtgctttgctctcaggatggccagccggctggccaaggaggaagggtggctggcagagcacatgctgattctgggtataaccaaccctgagggtgagaagaagtacctggcggccgcatttcccagcgcctgcgggaagaccaacctggccatgatgaaccccagcctccccgggtggaaggttgagtgcgtcggggatgacattgcctggatgaagtttgacgcacaaggtcatttaagggccatcaacccagaaaatggctttttcggtgtcgctcctgggacttcagtgaagaccaaccccaatgccatcaagaccatccagaagaacacaatctttaccaatgtggccgagaccagcgacgggggcgtttactgggaaggcattgatgagccgctagcttcaggcgtcaccatcacgtcctggaagaataaggagtggagctcagaggatggggaaccttgtgcccaccccaactcgaggttctgcacccctgccagccagtgccccatcattgatgctgcctgggagtctccggaaggtgttcccattgaaggcattatctttggaggccgtagacctgctggtgtccctctagtctatgaagctctcagctggcaacatggagtctttgtgggggcggccatgagatcagaggccacagcggctgcagaacataaaggcaaaatcatcatgcatgacccctttgccatgcggcccttctttggctacaacttcggcaaatacctggcccactggcttagcatggcccagcacccagcagccaaactgcccaagatcttccatgtcaactggttccggaaggacaaggaaggcaaattcctctggccaggctttggagagaactccagggtgctggagtggatgttcaaccggatcgatggaaaagccagcaccaagctcacgcccataggctacatccccaaggaggatgccctgaacctgaaaggcctggggcacatcaacatgatggagcttttcagcatctccaaggaattctgggagaaggaggtggaagacatcgagaagtatctggaggatcaagtcaatgccgacctcccctgtgaaatcgagagagagatccttgccttgaagcaaagaataagccagatgtaatcagggcctgagtgctttacctttaaaatcattccctttcccatccataaggtgcagtaggagcaagagagggcaagtgttcccaaattgacgccaccataataatcatcaccacaccgtgagcagatctgaaaggcacactttgatttttttaaggataagaaccacagaacactgggtagtagctaatgaaattgagaagggaaatcttagcatgcctccaaaaattcacatccaatgcatagtttgttcaaatttaaggttactcaggcattgatcttttcagtgttttttcactttagctatgtggattagctagaatgcacaccaaaaaaatacttgagctgtatatatatatatgtgtgtgtgtgtgtgtgtgtgtgtgtgtgtgcatgtatgtgcacatgtgtctgtgtggtatatttgtgtatgtgtatttgtatgtactgttattgaaaatatatttaatacctttggaaaaatcttgggcaagatgacctactagttttccttgaaaaaaagttgctttgttattaatattgtgcttaaattatttttatacaccattgttccttacctttacataattgcaatatttcccccttactacttcttggaaaaaaattacaaaatgaagttttatagaaaagaaaaaaaag

SEQ ID NO: 295331 - DNA, 3212 bp, Homo sapiens
tgggaacacaaacttgctggcgggaagagcccggaaagaaacctgtggatctcccttcgagatcatccaaagagaagaaaggtgacctcacattcgtgccccttagcagcactctgcagaaatgcctcctcagctgcaaaacggcctgaacctctcggccaaagttgtccagggaagcctggacagcctgccccaggcagtgagggagtttctcgagaataacgctgagctgtgtcagcctgatcacatccacatctgtgacggctctgaggaggagaatgggcggcttctgggccagatggaggaagagggcatcctcaggcggctgaagaagtatgacaactgctggttggctctcactgaccccagggatgtggccaggatcgaaagcaagacggttatcgtcacccaagagcaaagagacacagtgcccatccccaaaacaggcctcagccagctcggtcgctggatgtcagaggaggattttgagaaagcgttcaatgccaggttcccagggtgcatgaaaggtcgcaccatgtacgtcatcccattcagcatggggccgctgggctcacctctgtcgaagatcggcatcgagctgacggattcgccctacgtggtggccagcatgcggatcatgacgcggatgggcacgcccgtcctggaagcactgggcgatggggagtttgtcaaatgcctccattctgtggggtgccctctgcctttacaaaagcctttggtcaacaactggccctgcaacccggagctgacgctcatcgcccacctgcctgaccgcagagagatcatctcctttggcagtgggtacggcgggaactcgctgctcgggaagaagtgctttgctctcaggatggccagccggctggccaaggaggaagggtggctggcagagcacatgctggtgagcctgcaggaagccctgatgtgcagatgagaggcctggggggtggcagaaacaaacagcattacagttcccacccgtcagcacacctctctgagcgtgcaggttcccggacagatcgggaaaccccaccagtaatgattagtttacacatatacatcgcttttgaaggcccccaaacaccaggggaccatagagatcctttggacttcatgattctgggagtgtttgtttgcactgatacctgaagaaatagatcttgagggcctacattccaacctctgggctgaagtaccaacctcggggagaaggaaacaaagatcacaataaagaatcttgtccccaacagattctgggtataaccaaccctgagggtgagaagaagtacctggcggccgcatttcccagcgcctgcgggaagaccaacctggccatgatgaaccccagcctccccgggtggaaggttgagtgcgtcggggatgacattgcctggatgaagtttgacgcacaaggtcatttaagggccatcaacccagaaaatggctttttcggtgtcgctcctgggacttcagtgaagaccaaccccaatgccatcaagaccatccagaagaacacaatctttaccaatgtggccgagaccagcgacgggggcgtttactgggaaggcattgatgagccgctagcttcaggcgtcaccatcacgtcctggaagaataaggagtggagctcagaggatggggaaccttgtgcccaccccaactcgaggttctgcacccctgccagccagtgccccatcattgatgctgcctgggagtctccggaaggtgttcccattgaaggcattatctttggaggccgtagacctgctggtgtccctctagtctatgaagctctcagctggcaacatggagtctttgtgggggcggccatgagatcagaggccacagcggctgcagaacataaaggtaaatcaaagtcctgatctgaaaccacagagaagtgggattagagcactcttcgtcactcttatgtctctctccttttctgtgtctgtgtgtggggagagagagagagagaaagagagagaggagaacaaagcatgctaatgtcaacaatcaatggcgtcagtcttgcctaggagagcctcatttactaatgaactccctctctgtttaacaggcaaaatcatcatgcatgacccctttgccatgcggcccttctttggctacaacttcggcaaatacctggcccactggcttagcatggcccagcacccagcagccaaactgcccaagatcttccatgtcaactggttccggaaggacaaggaaggcaaattcctctggccaggctttggagagaactccagggtgctggagtggatgttcaaccggatcgatggaaaagccagcaccaagctcacgcccataggctacatccccaaggaggatgccctgaacctgaaaggcctggggcacatcaacatgatggagcttttcagcatctccaaggaattctgggagaaggaggtggaagacatcgagaagtatctggaggatcaagtcaatgccgacctcccctgtgaaatcgagagagagatccttgccttgaagcaaagaataagccagatgtaatcagggcctgagtgctttacctttaaaatcattccctttcccatccataaggtgcagtaggagcaagagagggcaagtgttcccaaattgacgccaccataataatcatcaccacaccgtgagcagatctgaaaggcacactttgatttttttaaggataagaaccacagaacactgggtagtagctaatgaaattgagaagggaaatcttagcatgcctccaaaaattcacatccaatgcatagtttgttcaaatttaaggttactcaggcattgatcttttcagtgttttttcactttagctatgtggattagctagaatgcacaccaaaaaaatacttgagctgtatatatatatatgtgtgtgtgtgtgtgtgtgtgtgtgtgtgtgcatgtatgtgcacatgtgtctgtgtggtatatttgtgtatgtgtatttgtatgtactgttattgaaaatatatttaatacctttggaaaaatcttgggcaagatgacctactagttttccttgaaaaaaagttgctttgttattaatattgtgcttaaattatttttatacaccattgttccttacctttacataattgcaatatttcccccttactacttcttggaaaaaaattacaaaatgaagttttatagaaaagaaaaaaaag

SEQ ID NO: 295332 - DNA, 2092 bp, Homo sapiens
tgggaacacaaacttgctggcgggaagagcccggaaagaaacctgtggatctcccttcgagatcatccaaagagaagaaaggtgacctcacattcgtgccccttagcagcactctgcagaaatgcctcctcagctgcaaaacggcctgaacctctcggccaaagttgtccagggaagcctggacagcctgccccaggcagtgagggagtttctcgagaataacgctgagctgtgtcagcctgatcacatccacatctgtgacggctctgaggaggagaatgggcggcttctgggccagatggaggaagagggcatcctcaggcggctgaagaagtatgacaactgctggttggctctcactgaccccagggatgtggccaggatcgaaagcaagacggttatcgtcacccaagagcaaagagacacagtgcccatccccaaaacaggcctcagccagctcggtcgccgggtggaaggttgagtgcgtcggggatgacattgcctggatgaagtttgacgcacaaggtcatttaagggccatcaacccagaaaatggctttttcggtgtcgctcctgggacttcagtgaagaccaaccccaatgccatcaagaccatccagaagaacacaatctttaccaatgtggccgagaccagcgacgggggcgtttactgggaaggcattgatgagccgctagcttcaggcgtcaccatcacgtcctggaagaataaggagtggagctcagaggatggggaaccttgtgcccaccccaactcgaggttctgcacccctgccagccagtgccccatcattgatgctgcctgggagtctccggaaggtgttcccattgaaggcattatctttggaggccgtagacctgctggtgtccctctagtctatgaagctctcagctggcaacatggagtctttgtgggggcggccatgagatcagaggccacagcggctgcagaacataaaggcaaaatcatcatgcatgacccctttgccatgcggcccttctttggctacaacttcggcaaatacctggcccactggcttagcatggcccagcacccagcagccaaactgcccaagatcttccatgtcaactggttccggaaggacaaggaaggcaaattcctctggccaggctttggagagaactccagggtgctggagtggatgttcaaccggatcgatggaaaagccagcaccaagctcacgcccataggctacatccccaaggaggatgccctgaacctgaaaggcctggggcacatcaacatgatggagcttttcagcatctccaaggaattctgggagaaggaggtggaagacatcgagaagtatctggaggatcaagtcaatgccgacctcccctgtgaaatcgagagagagatccttgccttgaagcaaagaataagccagatgtaatcagggcctgagtgctttacctttaaaatcattccctttcccatccataaggtgcagtaggagcaagagagggcaagtgttcccaaattgacgccaccataataatcatcaccacaccgtgagcagatctgaaaggcacactttgatttttttaaggataagaaccacagaacactgggtagtagctaatgaaattgagaagggaaatcttagcatgcctccaaaaattcacatccaatgcatagtttgttcaaatttaaggttactcaggcattgatcttttcagtgttttttcactttagctatgtggattagctagaatgcacaccaaaaaaatacttgagctgtatatatatatatgtgtgtgtgtgtgtgtgtgtgtgtgtgtgtgcatgtatgtgcacatgtgtctgtgtggtatatttgtgtatgtgtatttgtatgtactgttattgaaaatatatttaatacctttggaaaaatcttgggcaagatgacctactagttttccttgaaaaaaagttgctttgttattaatattgtgcttaaattatttttatacaccattgttccttacctttacataattgcaatatttcccccttactacttcttggaaaaaaattacaaaatgaagttttatagaaaagaaaaaaaag

SEQ ID NO: 295333 - DNA, 2120 bp, Homo sapiens
tgggaacacaaacttgctggcgggaagagcccggaaagaaacctgtggatctcccttcgagatcatccaaagagaagaaaggtgacctcacattcgtgccccttagcagcactctgcagaaatgcctcctcagctgcaaaacggcctgaacctctcggccaaagttgtccagggaagcctggacagcctgccccaggcagtgagggagtttctcgagaataacgctgagctgtgtcagcctgatcacatccacatctgtgacggctctgaggaggagaatgggcggcttctgggccagatggaggaagagggcatcctcaggcggctgaagaagtatgacaactgctggttggctctcactgaccccagggatgtggccaggatcgaaagcaagacggttatcgtcacccaagagcaaagagacacagtgcccatccccaaaacaggcctcagccagctcggtcgctggatgtcagaggaggattttgagaaagcgttcaatgccaggttcccagggtgcatgaaaggtcgcaccatgtacgtcatcccattcagcatggggccgctgggctcacctctgtcgaagatcggcatcgagctgacggattcgccctacgtggtggccagcatgcggatcatgacgcggatgggcacgcccgtcctggaagcactgggcgatggggagtttgtcaaatgcctccattctgtggggtgccctctgcctttacaaaagcctttggtcaacaactggccctgcaacccggagctgacgctcatcgcccacctgcctgaccgcagagagatcatctcctttggcagtgggtacggcgggaactcgctgctcgggaagaagtgctttgctctcaggatggccagccggctggccaaggaggaagggtggctggcagagcacatgctggtgagcctgcaggaagccctgatgtgcagatgagaggcctggggggtggcagaaacaaacagcattacagttcccacccgtcagcacacctctctgagcgtgcaggttcccggacagatcgggaaaccccaccagtaatgattagtttacacatatacatcgcttttgaaggcccccaaacaccaggggaccatagagatcctttggacttcatgattctgggagtgtttgtttgcactgatacctgaagaaatagatcttgagggcctacattccaacctctgggctgaagtaccaacctcggggagaaggaaacaaagatcacaataaagaatcttgtccccaacagattctgggtataaccaaccctgagggtgagaagaagtacctggcggccgcatttcccagcgcctgcgggaagaccaacctggccatgatgaaccccagcctccccgggtggaaggttgagtgcgtcggggatgacattgcctggatgaagtttgacgcacaaggtcatttaagggccatcaacccagaaaatggctttttcggtgtcgctcctgggacttcagtgaagaccaaccccaatgccatcaagaccatccagaagaacacaatctttaccaatgtggccgagaccataataatcatcaccacaccgtgagcagatctgaaaggcacactttgatttttttaaggataagaaccacagaacactgggtagtagctaatgaaattgagaagggaaatcttagcatgcctccaaaaattcacatccaatgcatagtttgttcaaatttaaggttactcaggcattgatcttttcagtgttttttcactttagctatgtggattagctagaatgcacaccaaaaaaatacttgagctgtatatatatatatgtgtgtgtgtgtgtgtgtgtgtgtgtgtgtgcatgtatgtgcacatgtgtctgtgtggtatatttgtgtatgtgtatttgtatgtactgttattgaaaatatatttaatacctttggaaaaatcttgggcaagatgacctactagttttccttgaaaaaaagttgctttgttattaatattgtgcttaaattatttttatacaccattgttccttacctttacataattgcaatatttcccccttactacttcttggaaaaaaattacaaaatgaagttttatagaaaagaaaaaaaag

SEQ ID NO: 295334 - DNA, 2368 bp, Homo sapiens
cctcgctggctagtaggagagactggtgcttgccccgcccggtggactaactcgcttaattttaaataaaaagtcgaggacacggcggtcgttttcccgaagacatgggccctcccatgggccatttgctccctggaggccctcgcgtcttgctgagcccggggagttaggatgacgcgagcggtgagggagcccggaacgattccttcgcggaacaattgaggcgaggcctttgggagtactttgtgggacggaccctggcgggccctgccagacgcacagggatggcggcggaggcggccgatttggggctgggggccgccgtccccgtggagctgaggcgggagcgacgcatggtgtgcgtggagtacccgggagtggtgcgtgatgtggctaagatgctgccgactctgggcggcgaggaaggcgtctcccggatctacgcagaccccaccaagaggctggagctgtacttccggcccaaggacccatactgccacccagtgtgcgccaaccgcttcagtaccagcagcctgctgctccgcatcaggaagagaacgaggcggcagaaaggggtgctgggcactgaggcccactccgaggtcacatttgacatggagatccttggcatcatctccaccatttacaaatttcaggggatgtctgacttccagtacttggctgtgcatacggaagcaggcggcaagcatacgtcaatgtatgacaaggtgctcatgctccggcccgagaaggaggcctttttccaccaggagctgccgctctacatccccccacccatcttctcccggctggacgccccggtggactacttctaccgaccagagacccagcaccgggaaggctacaacaatccccccatctcaggtgagaatctgattggcctgagcagagcccggcgcccccacaatgccatctttgtcaactttgaggatgaggaggtgcccaagcagccactggaggctgcagcccagacgtggaggagagtctgcactaaccccgtggaccggaaggtggaggaggagctgaggaagctgtttgacatccgtcccatctggtcccgaaatgctgtcaaggccaacatcagcgtccacccagacaagctcaaggtcttgcttcccttcatagcctattacatgataacaggcccctggcgcagcctatgggattcgatttgggtatgacccccgaaaaaacccagatgccaagatttatcaagtcctcgatttccgaatccgttgtggaatgaaacacggttacgcccccagtgacttgccggtcaaagcaaagcgcagcacctacaactacagcctccccatcaccgtcaagaagacatccagccagcttgtcaccatgcatgacctgaagcagggcctgggcccgtcggggacgagtggtgctcggaaaccagcttccagcaagtacaagctcaaggactctgtctacatcttccgggaaggggccttgccaccctatcggcagatgttctaccagttatgcgacttgaatgtggaagagttgcagaagatcattcaccgcaatgacggggcagagaattcctgcacagaacgggatgggtggtgcctccccaagaccagcgacgagctcagggacaccatgtccctcatgatccggcagaccatccgctccaagaggcctgctctcttttccagctcagccaaggctgatggcggaaaagagcagctgacgtacgagtctggggaagacgaggaggatgaggaggaggaggaagaggaggaggaggacttcaagccatccgacggcagtgaaaacgaaatggagacagagattctggactacgtgtgacagggcccaaggctgggcctccctgacccggccagactggtgtctggcctaatgagggagccggggctccccattgccacccacagtgcccggaatggccctaggaggccctctgaggagagctagagtcccagcaaagggtgcagctgaccctagcactggctgtgacatgctgcttggtgctgcctctggtcctgaggggttagggacatccccaaagggtataccctggctctgccacccatgaaccagcccagcatccagccagtgagtgggcacccaatgcctctcaggatgagaccagtaaatgccggaggtggagctgggcagctgtggagccccaggccacaggccagtctcgcttggctctcatgactgtggtggtggagatagtgtggggagcctcgcccatggtctcacgtggcaagaagtgcctttagctctggatcccaaccgtttggcacagctttggccacagccaggcccctctggaattgtccttattaaaccagtttcccgagaa

SEQ ID NO: 295335 - DNA, 2025 bp, Homo sapiens
cctcgctggctagtaggagagactggtgcttgccccgcccggtggactaactcgcttaattttaaataaaaagtcgaggacacggcggtcgttttcccgaagacatgggccctcccatgggccatttgctccctggaggccctcgcgtcttgctgagcccggggagttaggatgacgcgagcggtgagggagcccggaacgattccttcgcggaacaattgaggcgaggcctttgggagtactttgtgggacggaccctggcgggccctgccagacgcacagggatggcggcggaggcggccgatttggggctgggggccgccgtccccgtggagctgaggcgggagcgacgcatggtgtgcgtggagtacccgggagtggtgcgtgatgtggctaagatgctgccgactctgggcggcgaggaaggcgtctcccggatctacgcagaccccaccaagaggctggagctgtacttccggcccaaggacccatactgccacccagtgtgcgccaaccgcttcagtaccagcagcctgctgctccgcatcaggaagagaacgaggcggcagaaaggggtgctgggcactgaggcccactccgaggtcacatttgacatggagatccttggcatcatctccaccatttacaaatttcaggggatgtctgacttccagtacttggctgtgcatacggaagcaggcggcaagcatacgtcaatgtatgacaaggtgctcatgctccggcccgagaaggaggcctttttccaccaggagctgccgctctacatccccccacccatcttctcccggctggacgccccggtggactacttctaccgaccagagacccagcaccgggaaggctacaacaatccccccatctcaggtgagaatctgattggcctgagcagagcccggcgcccccacaatgccatctttgtcaactttgaggatgaggaggtgcccaagcagccactggaggctgcagcccagacgtggaggagagtctgcactaaccccgtggaccggaaggtggaggaggagctgaggaagctgtttgacatccgtcccatctggtcccgaaatgctgtcaaggccaacatcagcgtccacccagacaagctcaaggtcttgcttcccttcatagcctattacatgataacaggcccctggcgcagcctatgggattcgatttgggtatgacccccgaaaaaacccagatgccaagatttatcaagtcctcgatttccgaatccgttgtggaatgaaacacggttacgcccccagtgacttgccggtcaaagcaaagcgcagcacctacaactacagcctccccatcaccgtcaagaagacatccagccagcttgtcaccatgcatgacctgaagcagggcctgggcccgtcggggacgagtggtgctcggaaaccagcttccagcaagtacaagctcaaggactctgtctacatcttccgggaaggggccttgccaccctatcggcagatgttctaccagttatgcgacttgaatgtggaagagttgcagaagatcattcaccgcaatgacggggcagagaattcctgcacagaacgggatgggtggtgcctccccaagaccagcgacgagctcagggacaccatgtccctcatgatccggcagaccatccgctccaagaggcctgctctcttttccagctcagccaaggctgatggcggaaaagagcagctgacgtacgagtctggggaagacgaggaggatgaggaggaggaggaagaggaggaggaggacttcaagccatccgacggcagtgaaaacgaaatggagacagagattctggactacgtgtgacagggcccaaggctgggcctccctgacccggccagactggtgtctggcctaatgagggacctcgcccatggtctcacgtggcaagaagtgcctttagctctggatcccaaccgtttggcacagctttggccacagccaggcccctctggaattgtccttattaaaccagtttcccgagaa

SEQ ID NO: 295336 - DNA, 2010 bp, Homo sapiens
cctcgctggctagtaggagagactggtgcttgccccgcccggtggactaactcgcttaattttaaataaaaagtcgaggacacggcggtcgttttcccgaagacatgggccctcccatgggccatttgctccctggaggccctcgcgtcttgctgagcccggggagttaggatgacgcgagcggtgagggagcccggaacgattccttcgcggaacaattgaggcgaggcctttgggagtactttgtgggacggaccctggcgggccctgccagacgcacagggatggcggcggaggcggccgatttggggctgggggccgccgtccccgtggagctgaggcgggagcgacgcatggtgtgcgtggagtacccgggagtggtgcgtgatgtggctaagatgctgccgactctgggcggcgaggaaggcgtctcccggatctacgcagaccccaccaagaggctggagctgtacttccggcccaaggacccatactgccacccagtgtgcgccaaccgcttcagtaccagcagcctgctgctccgcatcaggaagagaacgaggcggcagaaaggggtgctgggcactgaggcccactccgaggtcacatttgacatggagatccttggcatcatctccaccatttacaaatttcaggggatgtctgacttccagtacttggctgtgcatacggaagcaggcggcaagcatacgtcaatgtatgacaaggtgctcatgctccggcccgagaaggaggcctttttccaccaggagctgccgctctacatccccccacccatcttctcccggctggacgccccggtggactacttctaccgaccagagacccagcaccgggaaggctacaacaatccccccatctcaggtgagaatctgattggcctgagcagagcccggcgcccccacaatgccatctttgtcaactttgaggatgaggaggtgcccaagcagccactggaggctgcagcccagacgtggaggagagtctgcactaaccccgtggaccggaaggtggaggaggagctgaggaagctgtttgacatccgtcccatctggtcccgaaatgctgtcaaggccaacatcagcgtccacccagacaagctcaaggtcttgcttcccttcatagcctattacatgataacaggcccctggcgcagcctatgggattcgatttgggtatgacccccgaaaaaacccagatgccaagatttatcaagtcctcgatttccgaatccgttgtggaatgaaacacggttacgcccccagtgacttgccggtcaaagcaaagcgcagcacctacaactacagcctccccatcaccgtcaagaagacatccagccagcttgtcaccatgcatgacctgaagcagggcctgggcccgtcggggacgagtggtgctcggaaaccagcttccagcaagtacaagctcaagggcgcccctggaggccaggaatggaggggaggacttccctcttggggccgggcaccttgtgggtgacacctggggggctgtgattagggcagctctgcccaccggggcctcggcaccttgcttccttttaggtcagccttcagacactgagggtgagaactcgggtgcaaagccccagggctgtgtgtgttggggacatctggcgaagaggtggtgacaagtctcagggaagtctggcaccagcagctgcatgtggttgtccttctcgagccctttgggagcctgggcccccactgagccacgtgaccactccgggaatgatcggaattgggcacacacaggaggacagagccagagcaggccatgtgggctgcagctgtggcaggagcctcactggctcacgtttccgtcagtgcggttgcccagcgggggttggcggtttccagagctgttcccacattcaggctcccgcaagccgctccacagccctgggggaggccgagaagggggcatcccgcacggtggaatcacctgccgagggagtgggtggcagagatg

SEQ ID NO: 295337 - DNA, 1817 bp, Homo sapiens
cctcgctggctagtaggagagactggtgcttgccccgcccggtggactaactcgcttaattttaaataaaaagtcgaggacacggcggtcgttttcccgaagacatgggccctcccatgggccatttgctccctggaggccctcgcgtcttgctgagcccggggagttaggatgacgcgagcggtgagggagcccggaacgattccttcgcggaacaattgaggcgaggcctttgggagtactttgtgggacggaccctggcgggccctgccagacgcacagggatggcggcggaggcggccgatttggggctgggggccgccgtccccgtggagctgaggcgggagcgacgcatggtgtgcgtggagtacccgggagtggtgcgtgatgtggctaagatgctgccgactctgggcggcgaggaaggcgtctcccggatctacgcagaccccaccaagaggctggagctgtacttccggcccaaggacccatactgccacccagtgtgcgccaaccgcttcagtaccagcagcctgctgctccgcatcaggaagagaacgaggcggcagaaaggggtgctgggcactgaggcccactccgaggtcacatttgacatggagatccttggcatcatctccaccatttacaaatttcaggggatgtctgacttccagtacttggctgtgcatacggaagcaggcggcaagcatacgtcaatgtatgacaaggtgctcatgctccggcccgagaaggaggcctttttccaccaggagctgccgctctacatccccccacccatcttctcccggctggacgccccggtggactacttctaccgaccagagacccagcaccgggaaggctacaacaatccccccatctcaggtgagaatctgattggcctgagcagagcccggcgcccccacaatgccatctttgtcaactttgaggatgaggaggtgcccaagcagccactggaggctgcagcccagacgtggaggagagtctgcactaaccccgtggaccggaaggtggaggaggagctgaggaagctgtttgacatccgtcccatctggtcccgaaatgctgtcaaggccaacatcagcgtccacccagacaagctcaaggtcttgcttcccttcatagcctattacatgataacaggcccctggcgcagcctatgggattcgatttgggtatgacccccgaaaaaacccagatgccaagatttatcaagtcctcgatttccgaatccgttgtggaatgaaacacggttacgcccccagtgacttgccggtcaaagcaaagcgcagcacctacaactacagcctccccatcaccgtcaagaagacatccagccagcttgtcaccatgcatgacctgaagcagggcctgggcccgtcggggacgagtggtgctcggaaaccagcttccagcaagtacaagctcaagggacatctggcgaagaggtggtgacaagtctcagggaagtctggcaccagcagctgcatgtggttgtccttctcgagccctttgggagcctgggcccccactgagccacgtgaccactccgggaatgatcggaattgggcacacacaggaggacagagccagagcaggccatgtgggctgcagctgtggcaggagcctcactggctcacgtttccgtcagtgcggttgcccagcgggggttggcggtttccagagctgttcccacattcaggctcccgcaagccgctccacagccctgggggaggccgagaagggggcatcccgcacggtggaatcacctgccgagggagtgggtggcagagatg

SEQ ID NO: 295338 - DNA, 2901 bp, Homo sapiens
cctcgctggctagtaggagagactggtgcttgccccgcccggtggactaactcgcttaattttaaataaaaagtcgaggacacggcggtcgttttcccgaagacatgggccctcccatgggccatttgctccctggaggccctcgcgtcttgctgagcccggggagttaggatgacgcgagcggtgagggagcccggaacgattccttcgcggaacaattgaggcgaggcctttgggagtactttgtgggacggaccctggcgggccctgccagacgcacagggatggcggcggaggcggccgatttggggctgggggccgccgtccccgtggagctgaggcgggagcgacgcatggtgtgcgtggagtacccgggagtggtgcgtgatgtggctaagatgctgccgactctgggcggcgaggaaggcgtctcccggggatgtctgacttccagtacttggctgtgcatacggaagcaggcggcaagcatacgtcaatgtatgacaaggtgctcatgctccggcccgagaaggaggcctttttccaccaggagctgccgctctacatccccccacccatcttctcccggctggacgccccggtggactacttctaccgaccagagacccagcaccgggaaggctacaacaatccccccatctcaggtgagaatctgattggcctgagcagagcccggcgcccccacaatgccatctttgtcaactttgaggatgaggaggtgcccaagcagccactggaggctgcagcccagacgtggaggagagtctgcactaaccccgtggaccggaaggtggaggaggagctgaggaagctgtttgacatccgtcccatctggtcccgaaatgctgtcaaggccaacatcagcgtccacccagacaagctcaaggtcttgcttcccttcatagcctattacatgataacaggcccctggcgcagcctatgggattcgatttgggtatgacccccgaaaaaacccagatgccaagatttatcaagtcctcgatttccgaatccgttgtggaatgaaacacggttacgcccccagtgacttgccggtcaaagcaaagcgcagcacctacaactacagcctccccatcaccgtcaagaagacatccagccagcttgtcaccatgcatgacctgaagcagggcctgggcccgtcggggacgagtggtgctcggaaaccagcttccagcaagtacaagctcaaggactctgtctacatcttccgggaaggggccttgccaccctatcggcagatgttctaccagttatgcgacttgaatgtggaagagttgcagaagatcattcaccgcaatgacggggcagagaattcctgcacagaacgggatgggtggtgcctccccaagaccagcgacgagctcagggacaccatgtccctcatgatccggcagaccatccgctccaagaggcctgctctcttttccagctcagccaaggctgatggcggaaaagagcagctgacgtacgagtctggggaagacgaggaggatgaggaggaggaggaagaggaggaggaggacttcaagccatccgacggcagtgaaaacgaaatggagacagagattctggactacgtgtgacagggcccaaggctgggcctccctgacccggccagactggtgtctggcctaatgagggagccggggctccccattgccacccacagtgcccggaatggccctaggaggccctctgaggagagctagagtcccagcaaagggtgcagctgaccctagcactggctgtgacatgctgcttggtgctgcctctggtcctgaggggttagggacatccccaaagggtataccctggctctgccacccatgaaccagcccagcatccagccagtgagtgggcacccaatgcctctcaggatgagaccagtaaatgccggaggtggagctgggcagctgtggagccccaggccacaggccagtctcgcttggctctcatgactgtggtggtggagatagtgtggggagcctcgcccatggtctcacgtggcaagaagtgcctttagctctggatcccaaccgtttggcacagctttggccacagccaggcccctctggaattgtccttattaaaccagtttcccgagaaaaaaaaaaaaaaaaaaaaaaaaaaaaaaaaaaaaaaaaaaagggggggggggccaaaaaatattctccccgggggggcccaaaatatagggggatacccggagttttgtggcgtcaccaggggggcgccccaatatggggcggcgcgccgatatataaacccacgcgacgcaggggcccgcgaggttaacaaccacggggtggcgacacgacgcggaaacaacgtgcgacacacgacgcgacactttgggcgagatggacggacccaaaacagacgggggggggcgagccaaaaattgtggggggacacaccatcatctccactaaggaaggcaaatattacaagggctcctcacgaggggaacaaatcataaaaacatcttcacgcgggggtgtaaaataggtggggcttgacaacacatggggggaaattctttgggtaggaatgctggaaaaagtagtgggagcacaacagggtagtagatgttgctgaacaaattttttaacagccggggggcagtggccagatataaacagcgggaccgacagatagagaccacacgacgctgacggatcacgcacacgagcgagcacaaacgaccaggctgcggggggagagcgcaggcaacgtcaagcgcaccacgcgctgacgacacagaagagcgacgagagcgagcgagcagcgcgacagacaagaagaaaaagcaccaaacagcaacgatcagcacaccaagagcaagcagacacagcgaga

SEQ ID NO: 295339 - DNA, 2647 bp, Homo sapiens
cctcgctggctagtaggagagactggtgcttgccccgcccggtggactaactcgcttaattttaaataaaaagtcgaggacacggcggtcgttttcccgaagacatgggccctcccatgggccatttgctccctggaggccctcgcgtcttgctgagcccggggagttaggatgacgcgagcgggatgtctgacttccagtacttggctgtgcatacggaagcaggcggcaagcatacgtcaatgtatgacaaggtgctcatgctccggcccgagaaggaggcctttttccaccaggagctgccgctctacatccccccacccatcttctcccggctggacgccccggtggactacttctaccgaccagagacccagcaccgggaaggctacaacaatccccccatctcaggtgagaatctgattggcctgagcagagcccggcgcccccacaatgccatctttgtcaactttgaggatgaggaggtgcccaagcagccactggaggctgcagcccagacgtggaggagagtctgcactaaccccgtggaccggaaggtggaggaggagctgaggaagctgtttgacatccgtcccatctggtcccgaaatgctgtcaaggccaacatcagcgtccacccagacaagctcaaggtcttgcttcccttcatagcctattacatgataacaggcccctggcgcagcctatgggattcgatttgggtatgacccccgaaaaaacccagatgccaagatttatcaagtcctcgatttccgaatccgttgtggaatgaaacacggttacgcccccagtgacttgccggtcaaagcaaagcgcagcacctacaactacagcctccccatcaccgtcaagaagacatccagccagcttgtcaccatgcatgacctgaagcagggcctgggcccgtcggggacgagtggtgctcggaaaccagcttccagcaagtacaagctcaaggactctgtctacatcttccgggaaggggccttgccaccctatcggcagatgttctaccagttatgcgacttgaatgtggaagagttgcagaagatcattcaccgcaatgacggggcagagaattcctgcacagaacgggatgggtggtgcctccccaagaccagcgacgagctcagggacaccatgtccctcatgatccggcagaccatccgctccaagaggcctgctctcttttccagctcagccaaggctgatggcggaaaagagcagctgacgtacgagtctggggaagacgaggaggatgaggaggaggaggaagaggaggaggaggacttcaagccatccgacggcagtgaaaacgaaatggagacagagattctggactacgtgtgacagggcccaaggctgggcctccctgacccggccagactggtgtctggcctaatgagggagccggggctccccattgccacccacagtgcccggaatggccctaggaggccctctgaggagagctagagtcccagcaaagggtgcagctgaccctagcactggctgtgacatgctgcttggtgctgcctctggtcctgaggggttagggacatccccaaagggtataccctggctctgccacccatgaaccagcccagcatccagccagtgagtgggcacccaatgcctctcaggatgagaccagtaaatgccggaggtggagctgggcagctgtggagccccaggccacaggccagtctcgcttggctctcatgactgtggtggtggagatagtgtggggagcctcgcccatggtctcacgtggcaagaagtgcctttagctctggatcccaaccgtttggcacagctttggccacagccaggcccctctggaattgtccttattaaaccagtttcccgagaaaaaaaaaaaaaaaaaaaaaaaaaaaaaaaaaaaaaaaaaaagggggggggggccaaaaaatattctccccgggggggcccaaaatatagggggatacccggagttttgtggcgtcaccaggggggcgccccaatatggggcggcgcgccgatatataaacccacgcgacgcaggggcccgcgaggttaacaaccacggggtggcgacacgacgcggaaacaacgtgcgacacacgacgcgacactttgggcgagatggacggacccaaaacagacgggggggggcgagccaaaaattgtggggggacacaccatcatctccactaaggaaggcaaatattacaagggctcctcacgaggggaacaaatcataaaaacatcttcacgcgggggtgtaaaataggtggggcttgacaacacatggggggaaattctttgggtaggaatgctggaaaaagtagtgggagcacaacagggtagtagatgttgctgaacaaattttttaacagccggggggcagtggccagatataaacagcgggaccgacagatagagaccacacgacgctgacggatcacgcacacgagcgagcacaaacgaccaggctgcggggggagagcgcaggcaacgtcaagcgcaccacgcgctgacgacacagaagagcgacgagagcgagcgagcagcgcgacagacaagaagaaaaagcaccaaacagcaacgatcagcacaccaagagcaagcagacacagcgaga

SEQ ID NO: 295340 - DNA, 218 bp, Homo sapiens
ttcgatttgggtatgacccccgaaaaaacccagatgccaagatttatcaagtcctcgatttccgaatccgttgtggaatgaaacacggtaaaaattcctgaaagctttgcttcctgcctttctctctctttatctttcagtttctagcattctcttttgtagtaagaatcttttcatttggaaagaataaaaaaaccttttgcccccgttgctgagac

SEQ ID NO: 295341 - DNA, 3121 bp, Homo sapiens
cctcgctggctagtaggagagactggtgcttgccccgcccggtggactaactcgcttaattttaaataaaaagtcgaggacacggcggtcgttttcccgaagacatgggccctcccatgggccatttgctccctggaggccctcgcgtcttgctgagcccggggagttaggatgacgcgagcggtgagggagcccggaacgattccttcgcggaacaattgaggcgaggcctttgggagtactttgtgggacggaccctggcgggccctgccagacgcacagggatggcggcggaggcggccgatttggggctgggggccgccgtccccgtggagctgaggcgggagcgacgcatggtgtgcgtggagtacccgggagtggtgcgtgatgtggctaagatgctgccgactctgggcggcgaggaaggcgtctcccggatctacgcagaccccaccaagaggctggagctgtacttccggcccaaggacccatactgccacccagtgtgcgccaaccgcttcagtaccagcagcctgctgctccgcatcaggaagagaacgaggcggcagaaaggggtgctgggcactgaggcccactccgaggtcacatttgacatggagatccttggcatcatctccaccatttacaaatttcaggggatgtctgacttccagtacttggctgtgcatacggaagcaggcggcaagcatacgtcaatgtatgacaaggtgctcatgctccggcccgagaaggaggcctttttccaccaggagctgccgctctacatccccccacccatcttctcccggctggacgccccggtggactacttctaccgaccagagacccagcaccgggaaggctacaacaatccccccatctcaggtgagaatctgattggcctgagcagagcccggcgcccccacaatgccatctttgtcaactttgaggatgaggaggtgcccaagcagccactggaggctgcagcccagacgtggaggagagtctgcactaaccccgtggaccggaaggtggaggaggagctgaggaagctgtttgacatccgtcccatctggtcccgaaatgctgtcaaggccaacatcagcgtccacccagacaagctcaaggtcttgcttcccttcatagcctattacatgataacaggcccctggcgcagcctatgggattcgatttgggtatgacccccgaaaaaacccagatgccaagatttatcaagtcctcgatttccgaatccgttgtggaatgaaacacggttacgcccccagtgacttgccggtcaaagcaaagcgcagcacctacaactacagcctccccatcaccgtcaagaagacatccagccagcttgtcaccatgcatgacctgaagcagggcctgggcccgtcggggacgagtggtgctcggaaaccagcttccagcaagtacaagctcaaggactctgtctacatcttccgggaaggggccttgccaccctatcggcagatgttctaccagttatgcgacttgaatgtggaagagttgcagaagatcattcaccgcaatgacggggcagagaattcctgcacagaacgggatgggtggtgcctccccaagaccagcgacgagctcagggacaccatgtccctcatgatccggcagaccatccgctccaagaggcctgctctcttttccagctcagccaaggctgatggcggaaaagagcagctgacgtacgagtctggggaagacgaggaggatgaggaggaggaggaagaggaggaggaggacttcaagccatccgacggcagtgaaaacgaaatggagacagagattctggactacgtgtgacagggcccaaggctgggcctccctgacccggccagactggtgtctggcctaatgagggagccggggctccccattgccacccacagtgcccggaatggccctaggaggccctctgaggagagctagagtcccagcaaagggtgcagctgaccctagcactggctgtgacatgctgcttggtgctgcctctggtcctgaggggttagggacatccccaaagggtataccctggctctgccacccatgaaccagcccagcatccagccagtgagtgggcacccaatgcctctcaggatgagaccagtaaatgccggaggtggagctgggcagctgtggagccccaggccacaggccagtctcgcttggctctcatgactgtggtggtggagatagtgtggggagcctcgcccatggtctcacgtggcaagaagtgcctttagctctggatcccaaccgtttggcacagctttggccacagccaggcccctctggaattgtccttattaaaccagtttcccgagaaaaaaaaaaaaaaaaaaaaaaaaaaaaaaaaaaaaaaaaaaagggggggggggccaaaaaatattctccccgggggggcccaaaatatagggggatacccggagttttgtggcgtcaccaggggggcgccccaatatggggcggcgcgccgatatataaacccacgcgacgcaggggcccgcgaggttaacaaccacggggtggcgacacgacgcggaaacaacgtgcgacacacgacgcgacactttgggcgagatggacggacccaaaacagacgggggggggcgagccaaaaattgtggggggacacaccatcatctccactaaggaaggcaaatattacaagggctcctcacgaggggaacaaatcataaaaacatcttcacgcgggggtgtaaaataggtggggcttgacaacacatggggggaaattctttgggtaggaatgctggaaaaagtagtgggagcacaacagggtagtagatgttgctgaacaaattttttaacagccggggggcagtggccagatataaacagcgggaccgacagatagagaccacacgacgctgacggatcacgcacacgagcgagcacaaacgaccaggctgcggggggagagcgcaggcaacgtcaagcgcaccacgcgctgacgacacagaagagcgacgagagcgagcgagcagcgcgacagacaagaagaaaaagcaccaaacagcaacgatcagcacaccaagagcaagcagacacagcgaga

SEQ ID NO: 295342 - DNA, 2177 bp, Homo sapiens
cctcgctggctagtaggagagactggtgcttgccccgcccggtggactaactcgcttaattttaaataaaaagtcgaggacacggcggtcgttttcccgaagacatgggccctcccatgggccatttgctccctggaggccctcgcgtcttgctgagcccggggagttaggatgacgcgagcggtgagggagcccggaacgattccttcgcggaacaattgaggcgaggcctttgggagtactttgtgggacggaccctggcgggccctgccagacgcacagggatggcggcggaggcggccgatttggggctgggggccgccgtccccgtggagctgaggcgggagcgacgcatggtgtgcgtggagtacccgggagtggtgcgtgatgtggctaagatgctgccgactctgggcggcgaggaaggcgtctcccggatctacgcagaccccaccaagaggctggagctgtacttccggcccaaggacccatactgccacccagtgtgcgccaaccgcttcagtaccagcagcctgctgctccgcatcaggaagagaacgaggcggcagaaaggggtgctgggcactgaggcccactccgaggtcacatttgacatggagatccttggcatcatctccaccatttacaaatttcaggggatgtctgacttccagtacttggctgtgcatacggaagcaggcggcaagcatacgtcaatgtatgacaaggtgctcatgctccggcccgagaaggaggcctttttccaccaggagctgccgctctacatccccccacccatcttctcccggctggacgccccggtggactacttctaccgaccagagacccagcaccgggaaggctacaacaatccccccatctcaggtgagaatctgattggcctgagcagagcccggcgcccccacaatgccatctttgtcaactttgaggatgaggaggtgcccaataacaggcccctggcgcagcctatgggattcgatttgggtatgacccccgaaaaaacccagatgccaagatttatcaagtcctcgatttccgaatccgttgtggaatgaaacacggttacgcccccagtgacttgccggtcaaagcaaagcgcagcacctacaactacagcctccccatcaccgtcaagaagacatccagccagcttgtcaccatgcatgacctgaagcagggcctgggcccgtcggggacgagtggtgctcggaaaccagcttccagcaagtacaagctcaaggactctgtctacatcttccgggaaggggccttgccaccctatcggcagatgttctaccagttatgcgacttgaatgtggaagagttgcagaagatcattcaccgcaatgacggggcagagaattcctgcacagaacgggatgggtggtgcctccccaagaccagcgacgagctcagggacaccatgtccctcatgatccggcagaccatccgctccaagaggcctgctctcttttccagctcagccaaggctgatggcggaaaagagcagctgacgtacgagtctggggaagacgaggaggatgaggaggaggaggaagaggaggaggaggacttcaagccatccgacggcagtgaaaacgaaatggagacagagattctggactacgtgtgacagggcccaaggctgggcctccctgacccggccagactggtgtctggcctaatgagggagccggggctccccattgccacccacagtgcccggaatggccctaggaggccctctgaggagagctagagtcccagcaaagggtgcagctgaccctagcactggctgtgacatgctgcttggtgctgcctctggtcctgaggggttagggacatccccaaagggtataccctggctctgccacccatgaaccagcccagcatccagccagtgagtgggcacccaatgcctctcaggatgagaccagtaaatgccggaggtggagctgggcagctgtggagccccaggccacaggccagtctcgcttggctctcatgactgtggtggtggagatagtgtggggagcctcgcccatggtctcacgtggcaagaagtgcctttagctctggatcccaaccgtttggcacagctttggccacagccaggcccctctggaattgtccttattaaaccagtttcccgagaa

SEQ ID NO: 295343 - DNA, 2867 bp, Homo sapiens
cctcgctggctagtaggagagactggtgcttgccccgcccggtggactaactcgcttaattttaaataaaaagtcgaggacacggcggtcgttttcccgaagacatgggccctcccatgggccatttgctccctggaggccctcgcgtcttgctgagcccggggagttaggatgacgcgagcgatctacgcagaccccaccaagaggctggagctgtacttccggcccaaggacccatactgccacccagtgtgcgccaaccgcttcagtaccagcagcctgctgctccgcatcaggaagagaacgaggcggcagaaaggggtgctgggcactgaggcccactccgaggtcacatttgacatggagatccttggcatcatctccaccatttacaaatttcaggggatgtctgacttccagtacttggctgtgcatacggaagcaggcggcaagcatacgtcaatgtatgacaaggtgctcatgctccggcccgagaaggaggcctttttccaccaggagctgccgctctacatccccccacccatcttctcccggctggacgccccggtggactacttctaccgaccagagacccagcaccgggaaggctacaacaatccccccatctcaggtgagaatctgattggcctgagcagagcccggcgcccccacaatgccatctttgtcaactttgaggatgaggaggtgcccaagcagccactggaggctgcagcccagacgtggaggagagtctgcactaaccccgtggaccggaaggtggaggaggagctgaggaagctgtttgacatccgtcccatctggtcccgaaatgctgtcaaggccaacatcagcgtccacccagacaagctcaaggtcttgcttcccttcatagcctattacatgataacaggcccctggcgcagcctatgggattcgatttgggtatgacccccgaaaaaacccagatgccaagatttatcaagtcctcgatttccgaatccgttgtggaatgaaacacggttacgcccccagtgacttgccggtcaaagcaaagcgcagcacctacaactacagcctccccatcaccgtcaagaagacatccagccagcttgtcaccatgcatgacctgaagcagggcctgggcccgtcggggacgagtggtgctcggaaaccagcttccagcaagtacaagctcaaggactctgtctacatcttccgggaaggggccttgccaccctatcggcagatgttctaccagttatgcgacttgaatgtggaagagttgcagaagatcattcaccgcaatgacggggcagagaattcctgcacagaacgggatgggtggtgcctccccaagaccagcgacgagctcagggacaccatgtccctcatgatccggcagaccatccgctccaagaggcctgctctcttttccagctcagccaaggctgatggcggaaaagagcagctgacgtacgagtctggggaagacgaggaggatgaggaggaggaggaagaggaggaggaggacttcaagccatccgacggcagtgaaaacgaaatggagacagagattctggactacgtgtgacagggcccaaggctgggcctccctgacccggccagactggtgtctggcctaatgagggagccggggctccccattgccacccacagtgcccggaatggccctaggaggccctctgaggagagctagagtcccagcaaagggtgcagctgaccctagcactggctgtgacatgctgcttggtgctgcctctggtcctgaggggttagggacatccccaaagggtataccctggctctgccacccatgaaccagcccagcatccagccagtgagtgggcacccaatgcctctcaggatgagaccagtaaatgccggaggtggagctgggcagctgtggagccccaggccacaggccagtctcgcttggctctcatgactgtggtggtggagatagtgtggggagcctcgcccatggtctcacgtggcaagaagtgcctttagctctggatcccaaccgtttggcacagctttggccacagccaggcccctctggaattgtccttattaaaccagtttcccgagaaaaaaaaaaaaaaaaaaaaaaaaaaaaaaaaaaaaaaaaaaagggggggggggccaaaaaatattctccccgggggggcccaaaatatagggggatacccggagttttgtggcgtcaccaggggggcgccccaatatggggcggcgcgccgatatataaacccacgcgacgcaggggcccgcgaggttaacaaccacggggtggcgacacgacgcggaaacaacgtgcgacacacgacgcgacactttgggcgagatggacggacccaaaacagacgggggggggcgagccaaaaattgtggggggacacaccatcatctccactaaggaaggcaaatattacaagggctcctcacgaggggaacaaatcataaaaacatcttcacgcgggggtgtaaaataggtggggcttgacaacacatggggggaaattctttgggtaggaatgctggaaaaagtagtgggagcacaacagggtagtagatgttgctgaacaaattttttaacagccggggggcagtggccagatataaacagcgggaccgacagatagagaccacacgacgctgacggatcacgcacacgagcgagcacaaacgaccaggctgcggggggagagcgcaggcaacgtcaagcgcaccacgcgctgacgacacagaagagcgacgagagcgagcgagcagcgcgacagacaagaagaaaaagcaccaaacagcaacgatcagcacaccaagagcaagcagacacagcgaga

SEQ ID NO: 295344 - DNA, 540 bp, Homo sapiens
ggcccagaatgaaacatgagcctcctggcctttcctggatcaccgtcaggcttttattgagagaggagcagctccccactggctgcttggcttgtcattgcttcactctgtctcctttggccttgccacagatctacgcagaccccaccaagaggctggagctgtacttccggcccaaggacccatactgccacccagtgtgcgccaaccgcttcagtaccagcagcctgctgctccgcatcaggaagagaacgaggcggcagaaaggggtgctgggcactgaggcccactccgaggtcacatttgacatggagatccttggcatcatctccaccatttacaaatttcagggtaactgaaatctgctcttgcaatgtctggttatttcagggctggccatcctagctgcctgcaggagctgtgtgggtcatctgcaccagtggagggggccaggatatgcccaggggctgtggggacacagcagggcacaggccccatccaggaggcagcctttcttccctccagccaacagttccccag

SEQ ID NO: 295345 - DNA, 4698 bp, Homo sapiens
gcgcggcccggctggccgtctgcgcaccctctctcccctcggctctttcctaggaaagctgagcctcatagcttccgggagaaggttttccggaagaaacctccagtctgtgcagtatgtaaggtgaccatcgatgggacaggcgtttcgtgcagagtctgcaaggtggcgacgcacagaaaatgtgaagcaaaggtgacttcagcctgtcaggccttgcctcccgtggagttgcggcgaaacacggccccagtcaggcgcatagagcacctgggatccaccaaatctctgaaccactcaaagcagcgcagcactctgcccaggagcttcagcctggacccgctcatggagcggcgctgggacttagacctcacctacgtgacggagcgcatcttggccgccgccttccccgcgcggcccgatgaacagcggcaccggggccacctgcgcgagctggcccatgtgctgcaatccaagcaccgggacaagtacctgctcttcaacctttcagagaaaaggcatgacctgacccgcttaaaccccaaggttcaagacttcggctggcctgagctgcatgctccacccctggacaagctgtgctccatctgcaaagccatggagacatggctcagtgctgacccacagcacgtggtcgtactatactgcaagggaaacaagggcaagcttggggtcatcgtttctgcctacatgcactacagcaagatctctgcaggggcggaccaggcactggccactcttaccatgcggaaattctgcgaggacaaggtggccacagaactgcagccctcccagcgtcgatatatcagctacttcagtgggctgctatctggctccatcagaatgaacagcagccctctcttcctgcactatgtgctcatccccatgctgccagcctttgaacctggcacaggcttccagcccttccttaaaatctaccagtccatgcagcttgtctacacatctggagtctatcacattgcaggccctggtccccagcagctttgcatcagcctggagccagccctcctcctcaaaggcgatgtcatggtaacatgttatcacaagggtggccggggcacagaccggaccctcgtgttccgagtccagttccacacctgcaccatccacggaccacagctcactttccccaaggaccagcttgacgaggcctggactgatgagaggttccccttccaagcctccgtggagtttgtcttctcctccagccccgagaagatcaaaggcagcactccacggaacgacccctcggtctctgtcgactacaacaccactgagccagccgtgcgctgggactcctatgagaacttcaaccagcaccacgaggacagtgtggatggctccttgacccacacccggggtcccctggatggcagtccttatgcccaggtgcagcggcctccccggcagacccccccggcaccctctccagagcctccaccaccccccatgctctctgtcagcagcgactcaggccattcctccacgctgaccacagagccggctgctgagtcccctggccggccgccccctacagctgctgaacggcaggagctggatcgcctcctaggaggctgcggagtggccagtgggggccggggagctgggcgcgagacggccatcctagatgacgaagagcagcccactgtgggcggaggcccccacctcggagtgtatccaggccataggcctggcctcagccgccactgctcctgccgccagggctaccgggagccctgcggggttcccaatgggggctactaccggccagagggaaccctggagaggaggcgactggcctacgggggctatgagggatccccccagggctacgccgaggcctcgatggagaagaggcgcctctgccgatcgctgtcagaggggctatacccctacccacctgagatggggaaaccagccactggggactttggctaccgcgccccaggctaccgggaggtggtcatcctggaggaccctgggctgcctgccctatacccatgcccagcctgcgaggagaagctggcgctgcctacagcagccttgtatggactgcggctggagagggaggctggagaagggtgggcaagtgaggctggcaagcctctcctgcacccagtgcggcctgggcacccgctgcctctgctcttgcctgcctgtgggcatcaccatgccccgatgcctgactacagctgcctgaagccacccaaggcaggcgaggaagggcacgagggctgctcctacaccatgtgccccgaaggcaggtatgggcatccagggtaccctgccctggtgacatacagctatggaggagcagttcccagttactgcccagcatatggccgtgtgcctcatagctgtggctctccaggagagggcagagggtatcccagccctggtgcccactccccacgggctggctccatttccccgggcagcccgccctatccacaatctaggaagctgagctacgagatccctacggaggagggaggggacaggtacccattgcctgggcacctggcctcagcaggacctttggcatctgcagagtcgctggagccggtgtcctggagggagggccccagtgggcacagcacactgcctcggtctccccgagatgccccatgcagtgcttcgtcagagttgtctggtccctccacgcccctgcacaccagcagtccagtccagggcaaggaaagcacccggcgacaggacaccaggtcccccacctcagcgcccactcagagactgagtcctggcgaggccttgccccctgtttcccaggcaggcaccggaaaggcccctgagctgccgtcgggaagtgggcctgagcctctggcccctagcccagtctctccgaccttccctcccagctcgcccagtgactggcctcaggaaaggagtccagggggccactcagatggcgccagtcctcggagccctgtgcccaccacacttcctggcctccgccacgccccctggcaaggccctcgaggcccccccgacagcccagatgggtctcccctcactcctgtgccttcccagatgccctggcttgtggccagcccagagccgcctcagagctcacctacacctgctttccccctggctgcctcctatgacaccaatggccttagccagcccccacttcctgagaaacgccacctgcccgggccggggcaacagccaggaccctggggcccagagcaggcatcatcgccagccagaggcatcagtcaccatgtcaccttcgcacctctgctctcagataatgtcccccaaaccccagagcctcctacacaagagagccaaagcaatgtcaagtttgtccaggatacatccaagttctggtacaagccacacctgtcccgtgaccaagccattgccctgctgaaggacaaggaccctggggccttcctgatcagggacagtcattcattccaaggagcttatgggctggccctcaaggtggccacaccgccacccagtgcccagccctggaaaggggaccccgtggaacagctggtccgccatttcctcatcgagactgggcccaaaggggtgaagatcaagggctgccccagtgagccctactttggcagcctgtccgccttggtctcccagcactccatctcccccatctccctgccctgctgcctgcgcattcccagcaaagatcctctggaagagaccccagaggctccagtgcccaccaacatgagcacagcggcagacctcctgcgtcagggtgctgcctgcagcgtgctctacttgacctcagtggagacagagtcactgacgggcccccaagctgtggcccgggccagctctgcagctctgagctgtagcccccgcccgacaccagctgttgtccacttcaaggtgtcagcccagggcattacactgacggacaaccaaaggaagctcttctttcgccgccattatccagtgaacagcatcaccttctccagcactgaccctcaagaccggagatggaccaacccagacgggaccacctccaagatctttggtttcgtggccaagaagccgggaagcccctgggagaatgtgtgtcacctctttgcagagcttgacccagatcagcctgctggcgccattgtcaccttcatcaccaaagttctactgggccagagaaaatgaaggaaggccacaagctcagagcccacatcaacactgcccccctcccagcaccccacagccctcacatcccctggcctggacccaggagacccaggagaaagcaccctcccttaggaatgaggagtgggcatcaggcctgggacactgctctccttccccgcccccagcctgctaagttaagtggacaggcccacaagatgaccttgcatgtgagcagatggcagagatgggtgtgtgaggggtgaggaggcatcagcagttgagccccgaaggagatcaggcagccccacctgcaggagaacgtcagccctccaggggatcagcccctgccagttccacccagctgcaggtgccagcacggcagggatgggagaggggtggggagcgagtcactgcctcctctgagcagagattcagagtaggatcacatgaataggggaaaaaagagagtctatttttgtctaataataaagaatttctataaactttagccga

SEQ ID NO: 295346 - DNA, 4687 bp, Homo sapiens
gctgaggaaggagagcagacccaggagagccatgaagcctaggaaagctgagcctcatagcttccgggagaaggttttccggaagaaacctccagtctgtgcagtatgtaaggtgaccatcgatgggacaggcgtttcgtgcagagtctgcaaggtggcgacgcacagaaaatgtgaagcaaaggtgacttcagcctgtcaggccttgcctcccgtggagttgcggcgaaacacggccccagtcaggcgcatagagcacctgggatccaccaaatctctgaaccactcaaagcagcgcagcactctgcccaggagcttcagcctggacccgctcatggagcggcgctgggacttagacctcacctacgtgacggagcgcatcttggccgccgccttccccgcgcggcccgatgaacagcggcaccggggccacctgcgcgagctggcccatgtgctgcaatccaagcaccgggacaagtacctgctcttcaacctttcagagaaaaggcatgacctgacccgcttaaaccccaaggttcaagacttcggctggcctgagctgcatgctccacccctggacaagctgtgctccatctgcaaagccatggagacatggctcagtgctgacccacagcacgtggtcgtactatactgcaagggaaacaagggcaagcttggggtcatcgtttctgcctacatgcactacagcaagatctctgcaggggcggaccaggcactggccactcttaccatgcggaaattctgcgaggacaaggtggccacagaactgcagccctcccagcgtcgatatatcagctacttcagtgggctgctatctggctccatcagaatgaacagcagccctctcttcctgcactatgtgctcatccccatgctgccagcctttgaacctggcacaggcttccagcccttccttaaaatctaccagtccatgcagcttgtctacacatctggagtctatcacattgcaggccctggtccccagcagctttgcatcagcctggagccagccctcctcctcaaaggcgatgtcatggtaacatgttatcacaagggtggccggggcacagaccggaccctcgtgttccgagtccagttccacacctgcaccatccacggaccacagctcactttccccaaggaccagcttgacgaggcctggactgatgagaggttccccttccaagcctccgtggagtttgtcttctcctccagccccgagaagatcaaaggcagcactccacggaacgacccctcggtctctgtcgactacaacaccactgagccagccgtgcgctgggactcctatgagaacttcaaccagcaccacgaggacagtgtggatggctccttgacccacacccggggtcccctggatggcagtccttatgcccaggtgcagcggcctccccggcagacccccccggcaccctctccagagcctccaccaccccccatgctctctgtcagcagcgactcaggccattcctccacgctgaccacagagccggctgctgagtcccctggccggccgccccctacagctgctgaacggcaggagctggatcgcctcctaggaggctgcggagtggccagtgggggccggggagctgggcgcgagacggccatcctagatgacgaagagcagcccactgtgggcggaggcccccacctcggagtgtatccaggccataggcctggcctcagccgccactgctcctgccgccagggctaccgggagccctgcggggttcccaatgggggctactaccggccagagggaaccctggagaggaggcgactggcctacgggggctatgagggatccccccagggctacgccgaggcctcgatggagaagaggcgcctctgccgatcgctgtcagaggggctatacccctacccacctgagatggggaaaccagccactggggactttggctaccgcgccccaggctaccgggaggtggtcatcctggaggaccctgggctgcctgccctatacccatgcccagcctgcgaggagaagctggcgctgcctacagcagccttgtatggactgcggctggagagggaggctggagaagggtgggcaagtgaggctggcaagcctctcctgcacccagtgcggcctgggcacccgctgcctctgctcttgcctgcctgtgggcatcaccatgccccgatgcctgactacagctgcctgaagccacccaaggcaggcgaggaagggcacgagggctgctcctacaccatgtgccccgaaggcaggtatgggcatccagggtaccctgccctggtgacatacagctatggaggagcagttcccagttactgcccagcatatggccgtgtgcctcatagctgtggctctccaggagagggcagagggtatcccagccctggtgcccactccccacgggctggctccatttccccgggcagcccgccctatccacaatctaggaagctgagctacgagatccctacggaggagggaggggacaggtacccattgcctgggcacctggcctcagcaggacctttggcatctgcagagtcgctggagccggtgtcctggagggagggccccagtgggcacagcacactgcctcggtctccccgagatgccccatgcagtgcttcgtcagagttgtctggtccctccacgcccctgcacaccagcagtccagtccagggcaaggaaagcacccggcgacaggacaccaggtcccccacctcagcgcccactcagagactgagtcctggcgaggccttgccccctgtttcccaggcaggcaccggaaaggcccctgagctgccgtcgggaagtgggcctgagcctctggcccctagcccagtctctccgaccttccctcccagctcgcccagtgactggcctcaggaaaggagtccagggggccactcagatggcgccagtcctcggagccctgtgcccaccacacttcctggcctccgccacgccccctggcaaggccctcgaggcccccccgacagcccagatgggtctcccctcactcctgtgccttcccagatgccctggcttgtggccagcccagagccgcctcagagctcacctacacctgctttccccctggctgcctcctatgacaccaatggccttagccagcccccacttcctgagaaacgccacctgcccgggccggggcaacagccaggaccctggggcccagagcaggcatcatcgccagccagaggcatcagtcaccatgtcaccttcgcacctctgctctcagataatgtcccccaaaccccagagcctcctacacaagagagccaaagcaatgtcaagtttgtccaggatacatccaagttctggtacaagccacacctgtcccgtgaccaagccattgccctgctgaaggacaaggaccctggggccttcctgatcagggacagtcattcattccaaggagcttatgggctggccctcaaggtggccacaccgccacccagtgcccagccctggaaaggggaccccgtggaacagctggtccgccatttcctcatcgagactgggcccaaaggggtgaagatcaagggctgccccagtgagccctactttggcagcctgtccgccttggtctcccagcactccatctcccccatctccctgccctgctgcctgcgcattcccagcaaagatcctctggaagagaccccagaggctccagtgcccaccaacatgagcacagcggcagacctcctgcgtcagggtgctgcctgcagcgtgctctacttgacctcagtggagacagagtcactgacgggcccccaagctgtggcccgggccagctctgcagctctgagctgtagcccccgcccgacaccagctgttgtccacttcaaggtgtcagcccagggcattacactgacggacaaccaaaggaagctcttctttcgccgccattatccagtgaacagcatcaccttctccagcactgaccctcaagaccggagatggaccaacccagacgggaccacctccaagatctttggtttcgtggccaagaagccgggaagcccctgggagaatgtgtgtcacctctttgcagagcttgacccagatcagcctgctggcgccattgtcaccttcatcaccaaagttctactgggccagagaaaatgaaggaaggccacaagctcagagcccacatcaacactgcccccctcccagcaccccacagccctcacatcccctggcctggacccaggagacccaggagaaagcaccctcccttaggaatgaggagtgggcatcaggcctgggacactgctctccttccccgcccccagcctgctaagttaagtggacaggcccacaagatgaccttgcatgtgagcagatggcagagatgggtgtgtgaggggtgaggaggcatcagcagttgagccccgaaggagatcaggcagccccacctgcaggagaacgtcagccctccaggggatcagcccctgccagttccacccagctgcaggtgccagcacggcagggatgggagaggggtggggagcgagtcactgcctcctctgagcagagattcagagtaggatcacatgaataggggaaaaaagagagtctatttttgtctaataataaagaatttctataaactttagccga

SEQ ID NO: 295347 - DNA, 4748 bp, Homo sapiens
agcaccccagccagccgaacaccatgaagtccagcggccctgtggagaggctgctcagagccctggggaggagggacagcagccgggccgcaagcaggcctaggaaagctgagcctcatagcttccgggagaaggttttccggaagaaacctccagtctgtgcagtatgtaaggtgaccatcgatgggacaggcgtttcgtgcagagtctgcaaggtggcgacgcacagaaaatgtgaagcaaaggtgacttcagcctgtcaggccttgcctcccgtggagttgcggcgaaacacggccccagtcaggcgcatagagcacctgggatccaccaaatctctgaaccactcaaagcagcgcagcactctgcccaggagcttcagcctggacccgctcatggagcggcgctgggacttagacctcacctacgtgacggagcgcatcttggccgccgccttccccgcgcggcccgatgaacagcggcaccggggccacctgcgcgagctggcccatgtgctgcaatccaagcaccgggacaagtacctgctcttcaacctttcagagaaaaggcatgacctgacccgcttaaaccccaaggttcaagacttcggctggcctgagctgcatgctccacccctggacaagctgtgctccatctgcaaagccatggagacatggctcagtgctgacccacagcacgtggtcgtactatactgcaagggaaacaagggcaagcttggggtcatcgtttctgcctacatgcactacagcaagatctctgcaggggcggaccaggcactggccactcttaccatgcggaaattctgcgaggacaaggtggccacagaactgcagccctcccagcgtcgatatatcagctacttcagtgggctgctatctggctccatcagaatgaacagcagccctctcttcctgcactatgtgctcatccccatgctgccagcctttgaacctggcacaggcttccagcccttccttaaaatctaccagtccatgcagcttgtctacacatctggagtctatcacattgcaggccctggtccccagcagctttgcatcagcctggagccagccctcctcctcaaaggcgatgtcatggtaacatgttatcacaagggtggccggggcacagaccggaccctcgtgttccgagtccagttccacacctgcaccatccacggaccacagctcactttccccaaggaccagcttgacgaggcctggactgatgagaggttccccttccaagcctccgtggagtttgtcttctcctccagccccgagaagatcaaaggcagcactccacggaacgacccctcggtctctgtcgactacaacaccactgagccagccgtgcgctgggactcctatgagaacttcaaccagcaccacgaggacagtgtggatggctccttgacccacacccggggtcccctggatggcagtccttatgcccaggtgcagcggcctccccggcagacccccccggcaccctctccagagcctccaccaccccccatgctctctgtcagcagcgactcaggccattcctccacgctgaccacagagccggctgctgagtcccctggccggccgccccctacagctgctgaacggcaggagctggatcgcctcctaggaggctgcggagtggccagtgggggccggggagctgggcgcgagacggccatcctagatgacgaagagcagcccactgtgggcggaggcccccacctcggagtgtatccaggccataggcctggcctcagccgccactgctcctgccgccagggctaccgggagccctgcggggttcccaatgggggctactaccggccagagggaaccctggagaggaggcgactggcctacgggggctatgagggatccccccagggctacgccgaggcctcgatggagaagaggcgcctctgccgatcgctgtcagaggggctatacccctacccacctgagatggggaaaccagccactggggactttggctaccgcgccccaggctaccgggaggtggtcatcctggaggaccctgggctgcctgccctatacccatgcccagcctgcgaggagaagctggcgctgcctacagcagccttgtatggactgcggctggagagggaggctggagaagggtgggcaagtgaggctggcaagcctctcctgcacccagtgcggcctgggcacccgctgcctctgctcttgcctgcctgtgggcatcaccatgccccgatgcctgactacagctgcctgaagccacccaaggcaggcgaggaagggcacgagggctgctcctacaccatgtgccccgaaggcaggtatgggcatccagggtaccctgccctggtgacatacagctatggaggagcagttcccagttactgcccagcatatggccgtgtgcctcatagctgtggctctccaggagagggcagagggtatcccagccctggtgcccactccccacgggctggctccatttccccgggcagcccgccctatccacaatctaggaagctgagctacgagatccctacggaggagggaggggacaggtacccattgcctgggcacctggcctcagcaggacctttggcatctgcagagtcgctggagccggtgtcctggagggagggccccagtgggcacagcacactgcctcggtctccccgagatgccccatgcagtgcttcgtcagagttgtctggtccctccacgcccctgcacaccagcagtccagtccagggcaaggaaagcacccggcgacaggacaccaggtcccccacctcagcgcccactcagagactgagtcctggcgaggccttgccccctgtttcccaggcaggcaccggaaaggcccctgagctgccgtcgggaagtgggcctgagcctctggcccctagcccagtctctccgaccttccctcccagctcgcccagtgactggcctcaggaaaggagtccagggggccactcagatggcgccagtcctcggagccctgtgcccaccacacttcctggcctccgccacgccccctggcaaggccctcgaggcccccccgacagcccagatgggtctcccctcactcctgtgccttcccagatgccctggcttgtggccagcccagagccgcctcagagctcacctacacctgctttccccctggctgcctcctatgacaccaatggccttagccagcccccacttcctgagaaacgccacctgcccgggccggggcaacagccaggaccctggggcccagagcaggcatcatcgccagccagaggcatcagtcaccatgtcaccttcgcacctctgctctcagataatgtcccccaaaccccagagcctcctacacaagagagccaaagcaatgtcaagtttgtccaggatacatccaagttctggtacaagccacacctgtcccgtgaccaagccattgccctgctgaaggacaaggaccctggggccttcctgatcagggacagtcattcattccaaggagcttatgggctggccctcaaggtggccacaccgccacccagtgcccagccctggaaaggggaccccgtggaacagctggtccgccatttcctcatcgagactgggcccaaaggggtgaagatcaagggctgccccagtgagccctactttggcagcctgtccgccttggtctcccagcactccatctcccccatctccctgccctgctgcctgcgcattcccagcaaagatcctctggaagagaccccagaggctccagtgcccaccaacatgagcacagcggcagacctcctgcgtcagggtgctgcctgcagcgtgctctacttgacctcagtggagacagagtcactgacgggcccccaagctgtggcccgggccagctctgcagctctgagctgtagcccccgcccgacaccagctgttgtccacttcaaggtgtcagcccagggcattacactgacggacaaccaaaggaagctcttctttcgccgccattatccagtgaacagcatcaccttctccagcactgaccctcaagaccggagatggaccaacccagacgggaccacctccaagatctttggtttcgtggccaagaagccgggaagcccctgggagaatgtgtgtcacctctttgcagagcttgacccagatcagcctgctggcgccattgtcaccttcatcaccaaagttctactgggccagagaaaatgaaggaaggccacaagctcagagcccacatcaacactgcccccctcccagcaccccacagccctcacatcccctggcctggacccaggagacccaggagaaagcaccctcccttaggaatgaggagtgggcatcaggcctgggacactgctctccttccccgcccccagcctgctaagttaagtggacaggcccacaagatgaccttgcatgtgagcagatggcagagatgggtgtgtgaggggtgaggaggcatcagcagttgagccccgaaggagatcaggcagccccacctgcaggagaacgtcagccctccaggggatcagcccctgccagttccacccagctgcaggtgccagcacggcagggatgggagaggggtggggagcgagtcactgcctcctctgagcagagattcagagtaggatcacatgaataggggaaaaaagagagtctatttttgtctaataataaagaatttctataaactttagccga

SEQ ID NO: 295348 - DNA, 4598 bp, Homo sapiens
gctgaggaaggagagcagacccaggagagccatgaagcctaggaaagctgagcctcatagcttccgggagaaggttttccggaagaaacctccagtctgtgcagtatgtaaggtgaccatcgatgggacaggcgtttcgtgcagagtctgcaaggtggcgacgcacagaaaatgtgaagcaaaggtgacttcagcctgtcaggccttgcctcccgtggagttgcggcgaaacacggccccagtcaggcgcatagagcacctgggatccaccaaatctctgaaccactcaaagcagcgcagcactctgcccaggagcttcagcctggacccgctcatggagcggcgctgggacttagacctcacctacgtgacggagcgcatcttggccgccgccttccccgcgcggcccgatgaacagcggcaccggggccacctgcgcgagctggcccatgtgctgcaatccaagcaccgggacaagtacctgctcttcaacctttcagagaaaaggcatgacctgacccgcttaaaccccaaggttcaagacttcggctggcctgagctgcatgctccacccctggacaagctgtgctccatctgcaaagccatggagacatggctcagtgctgacccacagcacgtggtcgtactatactgcaagggaaacaagggcaagcttggggtcatcgtttctgcctacatgcactacagcaagatctctgcaggggcggaccaggcactggccactcttaccatgcggaaattctgcgaggacaaggtggccacagaactgcagccctcccagcgtcgatatatcagctacttcagtgggctgctatctggctccatcagaatgaacagcagccctctcttcctgcactatgtgctcatccccatgctgccagcctttgaacctggcacaggcttccagcccttccttaaaatctaccagtccatgcagcttgtctacacatctggagtctatcacattgcaggccctggtccccagcagctttgcatcagcctggagccagccctcctcctcaaaggcgatgtcatggtaacatgttatcacaagggtggccggggcacagaccggaccctcgtgttccgagtccagttccacacctgcaccatccacggaccacagctcactttccccaaggaccagcttgacgaggcctggactgatgagaggttccccttccaagcctccgtggagtttgtcttctcctccagccccgagaagatcaaaggcagcactccacggaacgacccctcggtctctgtcgactacaacaccactgagccagccgtgcgctgggactcctatgagaacttcaaccagcaccacgaggacagtgtggatggctccttgacccacacccggggtcccctggatggcagtccttatgcccaggtgcagcggcctccccggcagacccccccggcaccctctccagagcctccaccaccccccatgctctctgtcagcagcgactcaggccattcctccacgctgaccacagagccggctgctgagtcccctggccggccgccccctacagctgctgaacggcaggagctggatcgcctcctaggaggctgcggagtggccagtgggggccggggagctgggcgcgagacggccatcctagatgacgaagagcagcccactgtgggcggaggcccccacctcggagtgtatccaggccataggcctggcctcagccgccactgctcctgccgccagggctaccgggagccctgcggggttcccaatgggggctactaccggccagagggaaccctggagaggaggcgactggcctacgggggctatgagggatccccccagggctacgccgaggcctcgatggagaagaggcgcctctgccgatcgctgtcagaggggctatacccctacccacctgagatggggaaaccagccactggggactttggctaccgcgccccaggctaccgggaggtggtcatcctggaggaccctgggctgcctgccctatacccatgcccagcctgcgaggagaagctggcgctgcctacagcagccttgtatggactgcggctggagagggaggctggagaagggtgggcaagtgaggctggcaagcctctcctgcacccagtgcggcctgggcacccgctgcctctgctcttgcctgcctgtgggcatcaccatgccccgatgcctgactacagctgcctgaagccacccaaggcaggcgaggaagggcacgagggctgctcctacaccatgtgccccgaaggcaggtatgggcatccagggtaccctgccctggtgacatacagctatggaggagcagttcccagttactgcccagcatatggccgtgtgcctcatagctgtggctctccaggagagggcagagggtatcccagccctggtgcccactccccacgggctggctccatttccccgggcagcccgccctatccacaatctaggaagctgagctacgagatccctacggaggagggaggggacaggtacccattgcctgggcacctggcctcagcaggacctttggcatctgcagagtcgctggagccggtgtcctggagggagggccccagtgggcacagcacactgcctcggtctccccgagatgccccatgcagtgcttcgtcagagttgtctggtccctccacgcccctgcacaccagcagtccagtccagggcaaggaaagcacccggcgacaggacaccaggtcccccacctcagcgcccactcagagactgagtcctggcgaggccttgccccctgtttcccagctcgcccagtgactggcctcaggaaaggagtccagggggccactcagatggcgccagtcctcggagccctgtgcccaccacacttcctggcctccgccacgccccctggcaaggccctcgaggcccccccgacagcccagatgggtctcccctcactcctgtgccttcccagatgccctggcttgtggccagcccagagccgcctcagagctcacctacacctgctttccccctggctgcctcctatgacaccaatggccttagccagcccccacttcctgagaaacgccacctgcccgggccggggcaacagccaggaccctggggcccagagcaggcatcatcgccagccagaggcatcagtcaccatgtcaccttcgcacctctgctctcagataatgtcccccaaaccccagagcctcctacacaagagagccaaagcaatgtcaagtttgtccaggatacatccaagttctggtacaagccacacctgtcccgtgaccaagccattgccctgctgaaggacaaggaccctggggccttcctgatcagggacagtcattcattccaaggagcttatgggctggccctcaaggtggccacaccgccacccagtgcccagccctggaaaggggaccccgtggaacagctggtccgccatttcctcatcgagactgggcccaaaggggtgaagatcaagggctgccccagtgagccctactttggcagcctgtccgccttggtctcccagcactccatctcccccatctccctgccctgctgcctgcgcattcccagcaaagatcctctggaagagaccccagaggctccagtgcccaccaacatgagcacagcggcagacctcctgcgtcagggtgctgcctgcagcgtgctctacttgacctcagtggagacagagtcactgacgggcccccaagctgtggcccgggccagctctgcagctctgagctgtagcccccgcccgacaccagctgttgtccacttcaaggtgtcagcccagggcattacactgacggacaaccaaaggaagctcttctttcgccgccattatccagtgaacagcatcaccttctccagcactgaccctcaagaccggagatggaccaacccagacgggaccacctccaagatctttggtttcgtggccaagaagccgggaagcccctgggagaatgtgtgtcacctctttgcagagcttgacccagatcagcctgctggcgccattgtcaccttcatcaccaaagttctactgggccagagaaaatgaaggaaggccacaagctcagagcccacatcaacactgcccccctcccagcaccccacagccctcacatcccctggcctggacccaggagacccaggagaaagcaccctcccttaggaatgaggagtgggcatcaggcctgggacactgctctccttccccgcccccagcctgctaagttaagtggacaggcccacaagatgaccttgcatgtgagcagatggcagagatgggtgtgtgaggggtgaggaggcatcagcagttgagccccgaaggagatcaggcagccccacctgcaggagaacgtcagccctccaggggatcagcccctgccagttccacccagctgcaggtgccagcacggcagggatgggagaggggtggggagcgagtcactgcctcctctgagcagagattcagagtaggatcacatgaataggggaaaaaagagagtctatttttgtctaataataaagaatttctataaactttagccga

SEQ ID NO: 295349 - DNA, 4802 bp, Homo sapiens
gctgaggaaggagagcagacccaggagagccatgaagcctaggaaagctgagcctcatagcttccgggagaaggttttccggaagaaacctccagtctgtgcagtatgtaaggtgaccatcgatgggacaggcgtttcgtgcagagtctgcaaggtggcgacgcacagaaaatgtgaagcaaaggtgacttcagcctgtcaggccttgcctcccgtggagttgcggcgaaacacggccccagtcaggcgcatagagcacctgggatccaccaaatctctgaaccactcaaagcagcgcagcactctgcccaggagcttcagcctggacccgctcatggagcggcgctgggacttagacctcacctacgtgacggagcgcatcttggccgccgccttccccgcgcggcccgatgaacagcggcaccggggccacctgcgcgagctggcccatgtgctgcaatccaagcaccgggacaagtacctgctcttcaacctttcagagaaaaggcatgacctgacccgcttaaaccccaaggttcaagacttcggctggcctgagctgcatgctccacccctggacaagctgtgctccatctgcaaagccatggagacatggctcagtgctgacccacagcacgtggtcgtactatactgcaagggaaacaagggcaagcttggggtcatcgtttctgcctacatgcactacagcaagatctctgcaggggcggaccaggcactggccactcttaccatgcggaaattctgcgaggacaaggtggccacagaactgcagccctcccagcgtcgatatatcagctacttcagtgggctgctatctggctccatcagaatgaacagcagccctctcttcctgcactatgtgctcatccccatgctgccagcctttgaacctggcacaggcttccagcccttccttaaaatctaccagtccatgcagcttgtctacacatctggagtctatcacattgcaggccctggtccccagcagctttgcatcagcctggagccagccctcctcctcaaaggcgatgtcatggtaacatgttatcacaagggtggccggggcacagaccggaccctcgtgttccgagtccagttccacacctgcaccatccacggaccacagctcactttccccaaggaccagcttgacgaggcctggactgatgagaggttccccttccaagcctccgtggagtttgtcttctcctccagccccgagaagatcaaaggcagcactccacggaacgacccctcggtctctgtcgactacaacaccactgagccagccgtgcgctgggactcctatgagaacttcaaccagcaccacgaggacagtgtggatggctccttgacccacacccggggtcccctggatggcagtccttatgcccaggtgcagcggcctccccggcagacccccccggcaccctctccagagcctccaccaccccccatgctctctgtcagcagcgactcaggccattcctccacgctgaccacagagccggctgctgagtcccctggccggccgccccctacagctgctgaacggcaggagctggatcgcctcctaggaggctgcggagtggccagtgggggccggggagctgggcgcgagacggccatcctagatgacgaagagcagcccactgtgggcggaggcccccacctcggagtgtatccaggccataggcctggcctcagccgccactgctcctgccgccagggctaccgggagccctgcggggttcccaatgggggctactaccggccagagggaaccctggagaggaggcgactggcctacgggggctatgagggatccccccagggctacgccgaggcctcgatggagaagaggcgcctctgccgatcgctgtcagaggggctatacccctacccacctgagatggggaaaccagccactggggactttggctaccgcgccccaggctaccgggaggtggtcatcctggaggaccctgggctgcctgccctatacccatgcccagcctgcgaggagaagctggcgctgcctacagcagccttgtatggactgcggctggagagggaggctggagaagggtgggcaagtgaggctggcaagcctctcctgcacccagtgcggcctgggcacccgctgcctctgctcttgcctgcctgtgggcatcaccatgccccgatgcctgactacagctgcctgaagccacccaaggcaggcgaggaagggcacgagggctgctcctacaccatgtgccccgaaggcaggtatgggcatccagggtaccctgccctggtgacatacagctatggaggagcagttcccagttactgcccagcatatggccgtgtgcctcatagctgtggctctccaggagagggcagagggtatcccagccctggtgcccactccccacgggctggctccatttccccgggcagcccgccctatccacaatctaggaagctgagctacgagatccctacggaggagggaggggacaggtacccattgcctgggcacctggcctcagcaggacctttggcatctgcagagtcgctggagccggtgtcctggagggagggccccagtgggcacagcacactgcctcggtctccccgagatgccccatgcagtgcttcgtcagagttgtctggtccctccacgcccctgcacaccagcagtccagtccagggcaaggaaagcacccggcgacaggacaccaggtcccccacctcagcgcccactcagagactgagtcctggcgaggccttgccccctgtttcccaggcaggcaccggaaaggcccctgagctgccgtcgggaagtgggcctgagcctctggcccctagcccagtctctccgaccttccctcccagctcgcccagtgactggcctcaggaaaggagtccagggggccactcagatggcgccagtcctcggagccctgtgcccaccacacttcctggcctccgccacgccccctggcaaggccctcgaggcccccccgacagcccagatgggtctcccctcactcctgtgccttcccagatgccctggcttgtggccagcccagagccgcctcagagctcacctacacctgctttccccctggctgcctcctatgacaccaatggccttagccagcccccacttcctgagaaacgccacctgcccgggccggggcaacagccaggaccctggggcccagagcaggcatcatcgccagccagaggcatcagtcaccatgtcaccttcgcacctctgctctcagataatgtcccccaaaccccaggtataaaggccttgagggggttggtgccaccttgagagaaccctttctcctgggatgtagcatggatggggacccgggtaccctggggtctgaacctactccctccctgtcctagagcctcctacacaagagagccaaagcaatgtcaagtttgtccaggatacatccaagttctggtacaagccacacctgtcccgtgaccaagccattgccctgctgaaggacaaggaccctggggccttcctgatcagggacagtcattcattccaaggagcttatgggctggccctcaaggtggccacaccgccacccagtgcccagccctggaaaggggaccccgtggaacagctggtccgccatttcctcatcgagactgggcccaaaggggtgaagatcaagggctgccccagtgagccctactttggcagcctgtccgccttggtctcccagcactccatctcccccatctccctgccctgctgcctgcgcattcccagcaaagatcctctggaagagaccccagaggctccagtgcccaccaacatgagcacagcggcagacctcctgcgtcagggtgctgcctgcagcgtgctctacttgacctcagtggagacagagtcactgacgggcccccaagctgtggcccgggccagctctgcagctctgagctgtagcccccgcccgacaccagctgttgtccacttcaaggtgtcagcccagggcattacactgacggacaaccaaaggaagctcttctttcgccgccattatccagtgaacagcatcaccttctccagcactgaccctcaagaccggagatggaccaacccagacgggaccacctccaagatctttggtttcgtggccaagaagccgggaagcccctgggagaatgtgtgtcacctctttgcagagcttgacccagatcagcctgctggcgccattgtcaccttcatcaccaaagttctactgggccagagaaaatgaaggaaggccacaagctcagagcccacatcaacactgcccccctcccagcaccccacagccctcacatcccctggcctggacccaggagacccaggagaaagcaccctcccttaggaatgaggagtgggcatcaggcctgggacactgctctccttccccgcccccagcctgctaagttaagtggacaggcccacaagatgaccttgcatgtgagcagatggcagagatgggtgtgtgaggggtgaggaggcatcagcagttgagccccgaaggagatcaggcagccccacctgcaggagaacgtcagccctccaggggatcagcccctgccagttccacccagctgcaggtgccagcacggcagggatgggagaggggtggggagcgagtcactgcctcctctgagcagagattcagagtaggatcacatgaataggggaaaaaagagagtctatttttgtctaataataaagaatttctataaactttagccga

SEQ ID NO: 295350 - DNA, 6089 bp, Homo sapiens
gctgaggaaggagagcagacccaggagagccatgaagcctaggaaagctgagcctcatagcttccgggagaaggttttccggaagaaacctccagtctgtgcagtatgtaaggtgaccatcgatgggacaggcgtttcgtgcagagtctgcaaggtggcgacgcacagaaaatgtgaagcaaaggtgacttcagcctgtcaggccttgcctcccgtggagttgcggcgaaacacggccccagtcaggcgcatagagcacctgggatccaccaaatctctgaaccactcaaagcagcgcagcactctgcccaggagcttcagcctggacccgctcatggagcggcgctgggacttagacctcacctacgtgacggagcgcatcttggccgccgccttccccgcgcggcccgatgaacagcggcaccggggccacctgcgcgagctggcccatgtgctgcaatccaagcaccgggacaagtacctgctcttcaacctttcagagaaaaggcatgacctgacccgcttaaaccccaaggttcaagacttcggctggcctgagctgcatgctccacccctggacaagctgtgctccatctgcaaagccatggagacatggctcagtgctgacccacagcacgtggtcgtactatactgcaagggaaacaagggcaagcttggggtcatcgtttctgcctacatgcactacagcaagatctctgcaggggcggaccaggcactggccactcttaccatgcggaaattctgcgaggacaaggtggccacagaactgcagccctcccagcgtcgatatatcagctacttcagtgggctgctatctggctccatcagaatgaacagcagccctctcttcctgcactatgtgctcatccccatgctgccagcctttgaacctggcacaggcttccagcccttccttaaaatctaccagtccatgcagcttgtctacacatctggagtctatcacattgcaggccctggtccccagcagctttgcatcagcctggagccagccctcctcctcaaaggcgatgtcatggtaacatgttatcacaagggtggccggggcacagaccggaccctcgtgttccgagtccagttccacacctgcaccatccacggaccacagctcactttccccaaggaccagcttgacgaggcctggactgatgagaggttccccttccaagcctccgtggagtttgtcttctcctccagccccgagaagatcaaaggcagcactccacggaacgacccctcggtctctgtcgactacaacaccactgagccagccgtgcgctgggactcctatgagaacttcaaccagcaccacgaggacagtgtggatggctccttgacccacacccggggtcccctggatggcagtccttatgcccaggtgcagcggcctccccggcagacccccccggcaccctctccagagcctccaccaccccccatgctctctgtcagcagcgactcaggccattcctccacgctgaccacagagccggctgctgagtcccctggccggccgccccctacagctgctgaacggcaggagctggatcgcctcctaggaggctgcggagtggccagtgggggccggggagctgggcgcgagacggccatcctagatgacgaagagcagcccactgtgggcggaggcccccacctcggagtgtatccaggccataggcctggcctcagccgccactgctcctgccgccagggctaccgggagccctgcggggttcccaatgggggctactaccggccagagggaaccctggagaggaggcgactggcctacgggggctatgagggatccccccagggctacgccgaggcctcgatggagaagaggcgcctctgccgatcgctgtcagaggggctatacccctacccacctgagatggggaaaccagccactggggactttggctaccgcgccccaggctaccgggaggtggtcatcctggaggaccctgggctgcctgccctatacccatgcccagcctgcgaggagaagctggcgctgcctacagcagccttgtatggactgcggctggagagggaggctggagaagggtgggcaagtgaggctggcaagcctctcctgcacccagtgcggcctgggcacccgctgcctctgctcttgcctgcctgtgggcatcaccatgccccgatgcctgactacagctgcctgaagccacccaaggcaggcgaggaagggcacgagggctgctcctacaccatgtgccccgaaggcaggtatgggcatccagggtaccctgccctggtgacatacagctatggaggagcagttcccagttactgcccagcatatggccgtgtgcctcatagctgtggctctccaggagagggcagagggtatcccagccctggtgcccactccccacgggctggctccatttccccgggcagcccgccctatccacaatctaggaagctgagctacgagatccctacggaggagggaggggacaggtacccattgcctgggcacctggcctcagcaggacctttggcatctgcagagtcgctggagccggtgtcctggagggagggccccagtgggcacagcacactgcctcggtctccccgagatgccccatgcagtgcttcgtcagagttgtctggtccctccacgcccctgcacaccagcagtccagtccagggcaaggaaagcacccggcgacaggacaccaggtcccccacctcagcgcccactcagagactgagtcctggcgaggccttgccccctgtttcccaggcaggcaccggaaaggcccctgagctgccgtcgggaagtgggcctgagcctctggcccctagcccagtctctccgaccttccctcccagctcgcccagtgactggcctcaggaaaggagtccagggggccactcagatggcgccagtcctcggagccctgtgcccaccacacttcctggcctccgccacgccccctggcaaggccctcgaggcccccccgacagcccagatgggtctcccctcactcctgtgccttcccagatgccctggcttgtggccagcccagagccgcctcagagctcacctacacctgctttccccctggctgcctcctatgacaccaatggccttagccagcccccacttcctgagaaacgccacctgcccgggccggggcaacagccaggaccctggggcccagagcaggcatcatcgccagccagaggcatcagtcaccatgtcaccttcgcacctctgctctcagataatgtcccccaaaccccagagcctcctacacaagagagccaaagcaatgtcaagtttgtccaggatacatccaagttctggtacaagccacacctgtcccgtgaccaagccattgccctgctgaaggacaaggaccctggggccttcctgatcagggacagtcattcattccaaggagcttatgggctggccctcaaggtggccacaccgccacccagtgcccagccctggaaaggggaccccgtggaacagctggtccgccatttcctcatcgagactgggcccaaaggggtgaagatcaagggctgccccagtgagccctactttggcagcctgtccgccttggtctcccagcactccatctcccccatctccctgccctgctgcctgcgcattcccagcaaagatcctctggaagagaccccagaggctccagtgcccaccaacatgagcacagcggcagacctcctgcgtcagggtgctgcctgcagcgtgctctacttgacctcagtggagacagagtcactgacgggcccccaagctgtggcccgggccagctctgcagctctgagctgtagcccccgcccgacaccagctgttgtccacttcaaggtgtcagcccagggcattacactgacggacaaccaaaggaagctcttctttcgccgccattatccagtgaacagcatcaccttctccagcactgaccctcaagaccggagatggaccaacccagacgggaccacctccaagatctttggtttcgtggccaagaagccgggaagcccctgggagaatgtgtgtcacctctttgcagagcttgacccagatcagcctgctggcgccattgtcaccttcatcaccaaagttctactgggccagagaaaatgaaggaaggccacaagctcagagcccacatcaacactgcccccctcccagcaccccacagccctcacatcccctggcctggacccaggagacccaggagaaagcaccctcccttaggaatgaggagtgggcatcaggcctgggacactgctctccttccccgcccccagcctgctaagttaagtggacaggcccacaagatgaccttgcatgtgagcagatggcagagatgggtgtgtgaggggtgaggaggcatcagcagttgagccccgaaggagatcaggcagccccacctgcaggagaacgtcagccctccaggggatcagcccctgccagttccacccagctgcaggtgccagcacggcagggatgggagaggggtggggagcgagtcactgcctcctctgagcagagattcagagtaggatcacatgaataggggaaaaaagagagtctatttttgtctaataataaagaatttctataaactttagccgaaattggagtcaacacttattcacaggaaggtcaaagcctcatctcccaggggacgtatctgtgctcaggcctgtagccaggcccatggaacatatgattcccatccctggcccaacattggtccacatctccccatgagcaagctgccttcggctgcccccatccagcagtcctgttcctagcccagtggactagaaaggctcctggttccggccatactgataaatacggaaactccatctttatcggctgtataaacatctctggtctgtacatacatttcatacatcgtagggtgggaagcgagggccaaagggaggcccagcagcacaacagctcacccgctttccctacagccctacccgctctgtgcaaaccaaggccaacagctcctgctgcctcttcctccctggaaaagtcactgttacggggagggggccaggggttgaaggattagaaggagatagagggcttggtggggaggacacatgtaagtgctagaatcaaacactgaagcgaaacaggcaactggcacaagcagcaagctgaggcatgggacggggcaggaaaaggggagggaggggccacgctgcccctctgggcttgctcagctaaggctctggggtcttgccctcacgctggcagggagacaggccccagagcctcagccccaatacccgggagctagggacatgggtggcactggtaaagaaaggatggaaggggagaaaggagtgaaggccctagtgccctgtcacctcacagcccctctctcttaaacatgcaacaggcacccacccatgtgggtccaggtatggggagccagagacctagatcctctgtggtgcctgagcaggttggggtggggagccagctctcaagggaaagatggagagcctagaggagtcttcctggggcagcagccagtgaaaggacagagatgaccaaagagaggtcccctggccctgccaggggtatgacagcagcaactggttcacacaaccaggaaagaaaacaagaaagaggaattcaaggagaaataccatggtgagtaggggagggggctgtctactctaccctctacaaagcatcatgcccgaatagcagctgagatagggtgctcacgcctctccacccacacagggccggtgagggaaagggggacccagaagcccactgaccaaagcgagtgggaccacccacataccaacaccattctttgggtccattcctgtccaaccagggactcaggcccagggactgacaacagtggcagcaccaggtcagaaacgtgggcacagagaagcgtgacaggggcctgagccagtgggggcagagtgactacacacctccttggtgcctctggcctccttggtgcctctggcctccttggtgcctctgg

SEQ ID NO: 295351 - DNA, 1301 bp, Homo sapiens
tgatcgagatcggtaccaactccgccattgccctgctgaaggacaaggaccctggggccttcctgatcagggacagtcattcattccaaggagcttatgggctggccctcaaggtggccacaccgccacccagtgcccagccctggaaaggggaccccgtggaacagctggtccgccatttcctcatcgagactgggcccaaaggggtgaagatcaagggctgccccagtgagccctactttggcagcctgtccgccttggtctcccagcactccatctcccccatctccctgccctgctgcctgcgcattcccagcaaagatcctctggaagagaccccagaggctccagtgcccaccaacatgagcacagcggcagacctcctgcgtcagggtgctgcctgcagcgtgctctacttgacctcagtggagacagagtcactgacgggcccccaagctgtggcccgggccagctctgcagctctgagctgtagcccccgcccgacaccagctgttgtccacttcaaggtgtcagcccagggcattacactgacggacaaccaaaggaagctcttctttcgccgccattatccagtgaacagcatcaccttctccagcactgaccctcaagaccggagatggaccaacccagacgggaccacctccaagatctttggtttcgtggccaagaagccgggaagcccctgggagaatgtgtgtcacctctttgcagagcttgacccagatcagcctgctggcgccattgtcaccttcatcaccaaagttctactgggccagagaaaatgaaggaaggccacaagctcagagcccacatcaacactgcccccctcccagcaccccacagccctcacatcccctggcctggacccaggagacccaggagaaagcaccctcccttaggaatgaggagtgggcatcaggcctgggacactgctctccttccccgcccccagcctgctaagttaagtggacaggcccacaagatgaccttgcatgtgagcagatggcagagatgggtgtgtgaggggtgaggaggcatcagcagttgagccccgaaggagatcaggcagccccacctgcaggagaacgtcagccctccaggggatcagcccctgccagttccacccagctgcaggtgccagcacggcagggatgggagaggggtggggagcgagtcactgcctcctctgagcagagattcagagtaggatcacatgaataggggaaaaaagagagtctatttttgtctaataataaagaatttctataaactttagccga

SEQ ID NO: 295352 - DNA, 5422 bp, Homo sapiens
gctgaggaaggagagcagacccaggagagccatgaagcctaggaaagctgagcctcatagcttccgggagaaggttttccggaagaaacctccagtctgtgcagtatgtaaggtgaccatcgatgggacaggcgtttcgtgcagagtctgcaaggtggcgacgcacagaaaatgtgaagcaaaggtgacttcagcctgtcaggccttgcctcccgtggagttgcggcgaaacacggccccagtcaggcgcatagagcacctgggatccaccaaatctctgaaccactcaaagcagcgcagcactctgcccaggagcttcagcctggacccgctcatggagcggcgctgggacttagacctcacctacgtgacggagcgcatcttggccgccgccttccccgcgcggcccgatgaacagcggcaccggggccacctgcgcgagctggcccatgtgctgcaatccaagcaccgggacaagtacctgctcttcaacctttcagagaaaaggcatgacctgacccgcttaaaccccaaggttcaagacttcggctggcctgagctgcatgctccacccctggacaagctgtgctccatctgcaaagccatggagacatggctcagtgctgacccacagcacgtggtcgtactatactgcaagggaaacaagggcaagcttggggtcatcgtttctgcctacatgcactacagcaagatctctgcaggggcggaccaggcactggccactcttaccatgcggaaattctgcgaggacaaggtggccacagaactgcagccctcccagcgtcgatatatcagctacttcagtgggctgctatctggctccatcagaatgaacagcagccctctcttcctgcactatgtgctcatccccatgctgccagcctttgaacctggcacaggcttccagcccttccttaaaatctaccagtccatgcagcttgtctacacatctggagtctatcacattgcaggccctggtccccagcagctttgcatcagcctggagccagccctcctcctcaaaggcgatgtcatggtaacatgttatcacaagggtggccggggcacagaccggaccctcgtgttccgagtccagttccacacctgcaccatccacggaccacagctcactttccccaaggaccagcttgacgaggcctggactgatgagaggttccccttccaagcctccgtggagtttgtcttctcctccagccccgagaagatcaaaggcagcactccacggaacgacccctcggtctctgtcgactacaacaccactgagccagccgtgcgctgggactcctatgagaacttcaaccagcaccacgaggacagtgtggatggctccttgacccacacccggggtcccctggatggcagtccttatgcccaggtgcagcggcctccccggcagacccccccggcaccctctccagagcctccaccaccccccatgctctctgtcagcagcgactcaggccattcctccacgctgaccacagagccggctgctgagtcccctggccggccgccccctacagctgctgaacggcaggagctggatcgcctcctaggaggctgcggagtggccagtgggggccggggagctgggcgcgagacggccatcctagatgacgaagagcagcccactgtgggcggaggcccccacctcggagtgtatccaggccataggcctggcctcagccgccactgctcctgccgccagggctaccgggagccctgcggggttcccaatgggggctactaccggccagagggaaccctggagaggaggcgactggcctacgggggctatgagggatccccccagggctacgccgaggcctcgatggagaagaggcgcctctgccgatcgctgtcagaggggctatacccctacccacctgagatggggaaaccagccactggggactttggctaccgcgccccaggctaccgggaggtggtcatcctggaggaccctgggctgcctgccctatacccatgcccagcctgcgaggagaagctggcgctgcctacagcagccttgtatggactgcggctggagagggaggctggagaagggtgggcaagtgaggctggcaagcctctcctgcacccagtgcggcctgggcacccgctgcctctgctcttgcctgcctgtgggcatcaccatgccccgatgcctgactacagctgcctgaagccacccaaggcaggcgaggaagggcacgagggctgctcctacaccatgtgccccgaaggcaggtatgggcatccagggtaccctgccctggtgacatacagctatggaggagcagttcccagttactgcccagcatatggccgtgtgcctcatagctgtggctctccaggagagggcagagggtatcccagccctggtgcccactccccacgggctggctccatttccccgggcagcccgccctatccacaatctaggaagctgagctacgagatccctacggaggagggaggggacaggtacccattgcctgggcacctggcctcagcaggacctttggcatctgcagagtcgctggagccggtgtcctggagggagggccccagtgggcacagcacactgcctcggtctccccgagatgccccatgcagtgcttcgtcagagttgtctggtccctccacgcccctgcacaccagcagtccagtccagggcaaggaaagcacccggcgacaggacaccaggtcccccacctcagcgcccactcagagactgagtcctggcgaggccttgccccctgtttcccaggcaggcaccggaaaggcccctgagctgccgtcgggaagtgggcctgagcctctggcccctagcccagtctctccgaccttccctcccagctcgcccagtgactggcctcaggaaaggagtccagggggccactcagatggcgccagtcctcggagccctgtgcccaccacacttcctggcctccgccacgccccctggcaaggccctcgaggcccccccgacagcccagatgggtctcccctcactcctgtgccttcccagatgccctggcttgtggccagcccagagccgcctcagagctcacctacacctgctttccccctggctgcctcctatgacaccaatggccttagccagcccccacttcctgagaaacgccacctgcccgggccggggcaacagccaggaccctggggcccagagcaggcatcatcgccagccagaggcatcagtcaccatgtcaccttcgcacctctgctctcagataatgtcccccaaaccccagagcctcctacacaagagagccaaagcaatgtcaagtttgtccaggatacatccaagttctggtacaagccacacctgtcccgtgaccaagccattgccctgctgaaggacaaggaccctggggccttcctgatcagggacagtcattcattccaaggagcttatgggctggccctcaaggtggccacaccgccacccagtgcccagccctggaaaggggaccccgtggaacagctggtccgccatttcctcatcgagactgggcccaaaggggtgaagatcaagggctgccccagtgagccctactttggcagcctgtccgccttggtctcccagcactccatctcccccatctccctgccctgctgcctgcgcattcccagcaaagatcctctggaagagaccccagaggctccagtgcccaccaacatgagcacagcggcagacctcctgcgtcagggtgctgcctgcagcgtgctctacttgacctcagtggagacagagtcactgacgggcccccaagctgtggcccgggccagctctgcagctctgagctgtagcccccgcccgacaccagctgttgtccacttcaaggtgtcagcccagggcattacactgacggacaaccaaaggaagctcttctttcgccgccattatccagtgaacagcatcaccttctccagcactgaccctcaagaccggagatggaccaacccagacgggaccacctccaagatctttggtttcgtggccaagaagccgggaagcccctgggagaatgtgtgtcacctctttgcagagcttgacccagatcagcctgctggcgccattgtcaccttcatcaccaaagttctactgggccagagaaaatgaaggaaggccacaagctcagagcccacatcaacactgcccccctcccagcaccccacagccctcacatcccctggcctggacccaggagacccaggagaaagcaccctcccttaggaatgaggagtgggcatcaggcctgggacactgctctccttccccgcccccagcctgctaagttaagtggacaggcccacaagatgaccttgcatgtgagcagatggcagagatgggtgtgtgaggggtgaggaggcatcagcagttgagccccgaaggagatcaggcagccccacctgcaggagaacgtcagccctccaggggatcagcccctgccagttccacccagctgcaggtgccagcacggcagggatgggagaggggtggggagcgagtcactgcctcctctgagcagagattcagagtaggatcacatgaataggggaaaaaagagagtctatttttgtctaataataaagaatttctataaactttagccgaaattggagtcaacacttattcacaggaaggtcaaagcctcatctcccaggggacgtatctgtgctcaggcctgtagccaggcccatggaacatatgattcccatccctggcccaacattggtccacatctccccatgagcaagctgccttcggctgcccccatccagcagtcctgttcctagcccagtggactagaaaggctcctggttccggccatactgataaatacggaaactccatctttatcggctgtataaacatctctggtctgtacatacatttcatacatcgtagggtgggaagcgagggccaaagggaggcccagcagcacaacagctcacccgctttccctacagccctacccgctctgtgcaaaccaaggccaacagctcctgctgcctcttcctccctggaaaagtcactgttacggggagggggccaggggttgaaggattagaaggagatagagggcttggtggggaggacacatgtaagtgctagaatcaaacactgaagcgaaacaggcaactggcacaagcagcaagctgaggcatgggacggggcaggaaaaggggagggaggggccacgctgcccctctgggcttgctcagctaaggctctggggtcttgccctcacgctggcagggagacaggccccagagcctcagccccaatacccgggagctagggacatgggcggacaattttgatctcaattttccctgcagctgtgag

SEQ ID NO: 295353 - DNA, 2730 bp, Homo sapiens
cggacgcgtccgcccacgcgtccggcctgcgcattcccagcaaagatcctctggaagagaccccagaggctccagtgcccaccaacatgagcacagcggcagacctcctgcgtcagggtgctgcctgcagcgtgctctacttgacctcagtggagacagagtcactgacgggcccccaagctgtggcccgggccagctctgcagctctgagctgtagcccccgcccgacaccagctgttgtccacttcaaggtgtcagcccagggcattacactgacggacaaccaaaggaagctcttctttcgccgccattatccagtgaacagcatcaccttctccagcactgaccctcaagaccggagatggaccaacccagacgggaccacctccaagatctttggtttcgtggccaagaagccgggaagcccctgggagaatgtgtgtcacctctttgcagagcttgacccagatcagcctgctggcgccattgtcaccttcatcaccaaagttctactgggccagagaaaatgaaggaaggccacaagctcagagcccacatcaacactgcccccctcccagcaccccacagccctcacatcccctggcctggacccaggagacccaggagaaagcaccctcccttaggaatgaggagtgggcatcaggcctgggacactgctctccttccccgcccccagcctgctaagttaagtggacaggcccacaagatgaccttgcatgtgagcagatggcagagatgggtgtgtgaggggtgaggaggcatcagcagttgagccccgaaggagatcaggcagccccacctgcaggagaacgtcagccctccagggatgggagaggggtggggagcgagtcactgcctcctctgagcagagattcagagtaggatcacatgaataggggaaaaaagagagtctatttttgtctaataataaagaatttctataaactttagccgaaattggagtcaacacttattcacaggaaggtcaaagcctcatctcccaggggacgtatctgtgctcaggcctgtagccaggcccatggaacatatgattcccatccctggcccaacattggtccacatctccccatgagcaagctgccttcggctgcccccatccagcagtcctgttcctagcccagtggactagaaaggctcctggttccggccatactgataaatacggaaactccatctttatcggctgtataaacatctctggtctgtacatacatttcatacatcgtagggtgggaagcgagggccaaagggaggcccagcagcacaacagctcacccgctttccctacagccctacccgctctgtgcaaaccaaggccaacagctcctgctgcctcttcctccctggaaaagtcactgttacggggagggggccaggggttgaaggattagaaggagatagagggcttggtggggaggacacatgtaagtgctagaatcaaacactgaagcgaaacaggcaactggcacaagcagcaagctgaggcatgggacggggcaggaaaaggggagggaggggccacgctgcccctctgggcttgctcagctaaggctctggggtcttgccctcacgctggcagggagacaggccccagagcctcagccccaatacccgggagctagggacatgggtggcactggtaaagaaaggatggaaggggagaaaggagtgaaggccctagtgccctgtcacctcacagcccctctctcttaaacatgcaacaggcacccacccatgtgggtccaggtatggggagccagagacctagatcctctgtggtgcctgagcaggttggggtggggagccagctctcaagggaaagatggagagcctagaggagtcttcctggggcagcagccagtgaaaggacagagatgaccaaagagaggtcccctggccctgccaggggtatgacagcagcaactggttcacacaaccaggaaagaaaacaagaaagaggaattcaaggagaaataccatggtgagtaggggagggggctgtctactctaccctctacaaagcatcatgcccgaatagcagctgagatagggtgctcacgcctctccacccacacagggccggtgagggaaagggggacccagaagcccactgaccaaagcgagtgggaccacccacataccaacaccattctttgggtccattcctgtccaaccagggactcaggcccagggactgacaacagtggcagcaccaggtcagaaacgtgggcacagagaagcgtgacaggggcctgagccagtgggggcagagtgactacacacctccaggggcctgctgggtaaacgaagcctctgggaagtcaggaactgggtgcctggcccagcagagggtgagcagggagaaggagcaggtctggaggggaggccctagccactcaaggggtgcagatctactttgactttctccccgcagctcagcattccaatggtggggaagaagcctccagaaggaacaacagcatccttcttcccaatgatcttgccattccgagtgaagaaaaccaccaccttcctgccctcatgctccggctctatctcttccccatcctcttcctcttcctcttcctcctcttcctcttccccttcctggtgcaggtacatgacattccgcacgttccggacggcccgggcagtcggagacaggatcactgtgtcacaactgtcatc

SEQ ID NO: 295354 - DNA, 5162 bp, Homo sapiens
gctgaggaaggagagcagacccaggagagccatgaagcctaggaaagctgagcctcatagcttccgggagaaggttttccggaagaaacctccagtctgtgcagtatgtaaggtgaccatcgatgggacaggcgtttcgtgcagagtctgcaaggtggcgacgcacagaaaatgtgaagcaaaggtgacttcagcctgtcaggccttgcctcccgtggagttgcggcgaaacacggccccagtcaggcgcatagagcacctgggatccaccaaatctctgaaccactcaaagcagcgcagcactctgcccaggagcttcagcctggacccgctcatggagcggcgctgggacttagacctcacctacgtgacggagcgcatcttggccgccgccttccccgcgcggcccgatgaacagcggcaccggggccacctgcgcgagctggcccatgtgctgcaatccaagcaccgggacaagtacctgctcttcaacctttcagagaaaaggcatgacctgacccgcttaaaccccaaggttcaagacttcggctggcctgagctgcatgctccacccctggacaagctgtgctccatctgcaaagccatggagacatggctcagtgctgacccacagcacgtggtcgtactatactgcaagggaaacaagggcaagcttggggtcatcgtttctgcctacatgcactacagcaagatctctgcaggggcggaccaggcactggccactcttaccatgcggaaattctgcgaggacaaggtggccacagaactgcagccctcccagcgtcgatatatcagctacttcagtgggctgctatctggctccatcagaatgaacagcagccctctcttcctgcactatgtgctcatccccatgctgccagcctttgaacctggcacaggcttccagcccttccttaaaatctaccagtccatgcagcttgtctacacatctggagtctatcacattgcaggccctggtccccagcagctttgcatcagcctggagccagccctcctcctcaaaggcgatgtcatggtaacatgttatcacaagggtggccggggcacagaccggaccctcgtgttccgagtccagttccacacctgcaccatccacggaccacagctcactttccccaaggaccagcttgacgaggcctggactgatgagaggttccccttccaagcctccgtggagtttgtcttctcctccagccccgagaagatcaaaggcagcactccacggaacgacccctcggtctctgtcgactacaacaccactgagccagccgtgcgctgggactcctatgagaacttcaaccagcaccacgaggacagtgtggatggctccttgacccacacccggggtcccctggatggcagtccttatgcccaggtgcagcggcctccccggcagacccccccggcaccctctccagagcctccaccaccccccatgctctctgtcagcagcgactcaggccattcctccacgctgaccacagagccggctgctgagtcccctggccggccgccccctacagctgctgaacggcaggagctggatcgcctcctaggaggctgcggagtggccagtgggggccggggagctgggcgcgagacggccatcctagatgacgaagagcagcccactgtgggcggaggcccccacctcggagtgtatccaggccataggcctggcctcagccgccactgctcctgccgccagggctaccgggagccctgcggggttcccaatgggggctactaccggccagagggaaccctggagaggaggcgactggcctacgggggctatgagggatccccccagggctacgccgaggcctcgatggagaagaggcgcctctgccgatcgctgtcagaggggctatacccctacccacctgagatggggaaaccagccactggggactttggctaccgcgccccaggctaccgggaggtggtcatcctggaggaccctgggctgcctgccctatacccatgcccagcctgcgaggagaagctggcgctgcctacagcagccttgtatggactgcggctggagagggaggctggagaagggtgggcaagtgaggctggcaagcctctcctgcacccagtgcggcctgggcacccgctgcctctgctcttgcctgcctgtgggcatcaccatgccccgatgcctgactacagctgcctgaagccacccaaggcaggcgaggaagggcacgagggctgctcctacaccatgtgccccgaaggcaggtatgggcatccagggtaccctgccctggtgacatacagctatggaggagcagttcccagttactgcccagcatatggccgtgtgcctcatagctgtggctctccaggagagggcagagggtatcccagccctggtgcccactccccacgggctggctccatttccccgggcagcccgccctatccacaatctaggaagctgagctacgagatccctacggaggagggaggggacaggtacccattgcctgggcacctggcctcagcaggacctttggcatctgcagagtcgctggagccggtgtcctggagggagggccccagtgggcacagcacactgcctcggtctccccgagatgccccatgcagtgcttcgtcagagttgtctggtccctccacgcccctgcacaccagcagtccagtccagggcaaggaaagcacccggcgacaggacaccaggtcccccacctcagcgcccactcagagactgagtcctggcgaggccttgccccctgtttcccaggcaggcaccggaaaggcccctgagctgccgtcgggaagtgggcctgagcctctggcccctagcccagtctctccgaccttccctcccagctcgcccagtgactggcctcaggaaaggagtccagggggccactcagatggcgccagtcctcggagccctgtgcccaccacacttcctggcctccgccacgccccctggcaaggccctcgaggcccccccgacagcccagatgggtctcccctcactcctgtgccttcccagatgccctggcttgtggccagcccagagccgcctcagagctcacctacacctgctttccccctggctgcctcctatgacaccaatggccttagccagcccccacttcctgagaaacgccacctgcccgggccggggcaacagccaggaccctggggcccagagcaggcatcatcgccagccagaggcatcagtcaccatgtcaccttcgcacctctgctctcagataatgtcccccaaaccccagagcctcctacacaagagagccaaagcaatgtcaagtttgtccaggatacatccaagttctggtacaagccacacctgtcccgtgaccaagccattgccctgctgaaggacaaggaccctggggccttcctgatcagggacagtcattcattccaaggagcttatgggctggccctcaaggtggccacaccgccacccagtgcccagccctggaaaggggaccccgtggaacagctggtccgccatttcctcatcgagactgggcccaaaggggtgaagatcaagggctgccccagtgagccctactttggcagcctgtccgccttggtctcccagcactccatctcccccatctccctgccctgctgcctgcgcattcccagcaaagatcctctggaagagaccccagaggctccagtgcccaccaacatgagcacagcggcagacctcctgcgtcagggtgctgcctgcagcgtgctctacttgacctcagtggagacagagtcactgacgggcccccaagctgtggcccgggccagctctgcagctctgagctgtagcccccgcccgacaccagctgttgtccacttcaaggtgtcagcccagggcattacactgacggacaaccaaaggaagctcttctttcgccgccattatccagtgaacagcatcaccttctccagcactgaccctcaagaccggagatggaccaacccagacgggaccacctccaagatctttggtttcgtggccaagaagccgggaagcccctgggagaatgtgtgtcacctctttgcagagcttgacccagatcagcctgctggcgccattgtcaccttcatcaccaaagttctactgggccagagaaaatgaaggaaggccacaagctcagagcccacatcaacactgcccccctcccagcaccccacagccctcacatcccctggcctggacccaggagacccaggagaaagcaccctcccttaggaatgaggagtgggcatcaggcctgggacactgctctccttccccgcccccagcctgctaagttaagtggacaggcccacaagatgaccttgcatgtgagcagatggcagagatgggtgtgtgaggggtgaggaggcatcagcagttgagccccgaaggagatcaggcagccccacctgcaggagaacgtcagccctccaggggatcagcccctgccagttccacccagctgcaggtgccagcacggcagggatgggagaggggtggggagcgagtcactgcctcctctgagcagagattcagagtaggatcacatgaataggggaaaaaagagagtctatttttgtctaataataaagaatttctataaactttagccgaaattggagtcaacacttattcacaggaaggtcaaagcctcatctcccaggggacgtatctgtgctcaggcctgtagccaggcccatggaacatatgattcccatccctggcccaacattggtccacatctccccatgagcaagctgccttcggctgcccccatccagcagtcctgttcctagcccagtggactagaaaggctcctggttccggccatactgataaatacggaaactccatctttatcggctgtataaacatctctggtctgtacatacatttcatacatcgtagggtgggaagcgagggccaaagggaggcccagcagcacaacagctcacccgctttccctacagccctacccgctagtcccacagactctgacatcatgtagccggccccattcatcctcgtaactgtccaccatcatgacgctgtcgtcctcacggcccagctcagcgttgaggtgcagccg

SEQ ID NO: 295355 - DNA, 1727 bp, Homo sapiens
gaggagggcgagtgttggtggagtggtgtgcgtttgatgctcggggtggtcgggcgaggttgtgcgtggacgagtggtttggcttattgtgtgttggtttgtcgtgttgtttctttttttccgttgtgtttgtgttttgtttttttttgtgtttttttttttttttttgtttattgttgttgttttttttttttttttttacggaaactccatctttatcggctgtataaacatctctggtctgtacatacatttcatacatcgtagggtgggaagcgagggccaaagggaggcccagcagcacaacagctcacccgctttccctacagccctacccgctctgtgcaaaccaaggccaacagctcctgctgcctcttcctccctggaaaagtcactgttacggggagggggccaggggttgaaggattagaaggagatagagggcttggtggggaggacacatgtaagtgctagaatcaaacactgaagcgaaacaggcaactggcacaagcagcaagctgaggcatgggacggggcaggaaaaggggagggaggggccacgctgcccctctgggcttgctcagctaaggctctggggtcttgccctcacgctggcagggagacaggccccagagcctcagccccaatacccgggagctagggacatgggtggcactggtaaagaaaggatggaaggggagaaaggagtgaaggccctagtgccctgtcacctcacagcccctctctcttaaacatgcaacaggcacccacccatgtgggtccaggtatggggagccagagacctagatcctctgtggtgcctgagcaggttggggtggggagccagctctcaagggaaagatggagagcctagaggagtcttcctggggcagcagccagtgaaaggacagagatgaccaaagagaggtcccctggccctgccaggggtatgacagcagcaactggttcacacaaccaggaaagaaaacaagaaagaggaattcaaggagaaataccatggtgagtaggggagggggctgtctactctaccctctacaaagcatcatgcccgaatagcagctgagatagggtgctcacgcctctccacccacacagggccggtgagggaaagggggacccagaagcccactgaccaaagcgagtgggaccacccacataccaacaccattctttgggtccattcctgtccaaccagggactcaggcccagggactgacaacagtggcagcaccaggtcagaaacgtgggcacagagaagcgtgacaggggcctgagccagtgggggcagagtgactacacacctccaggggcctgctgggtaaacgaagcctctgggaagtcaggaactgggtgcctggcccagcagagggtgagcagggagaaggagcaggtctggaggggaggccctagccactcaaggggtgcagatctactttgactttctccccgcagctcagcattccaatggtggggaagaagcctccagaaggaacaacagcatccttcttcccaatgatcttgccattccgagtgaagaaaaccaccaccttcctgccctcatgctccggctctatctcttccccatcctcttcctcttcctcttcctcctcttcctcttccccttcctggtgcaggtacatgacattccgcacgttccggacggcccgggcagtcggagacaggatcactgtgtcacaactgtcatc

SEQ ID NO: 295356 - DNA, 499 bp, Homo sapiens
gcagggaggcttctctgcctcgcttctgactgtagatccagtagagtcatggaatctgcctttttaacaagtcacctatgtgattgtaaagcatgtgacagcagtagctggggaatgtgcaagagctggtgggggtggctaggggatgggcactccctccctgacccactccctgcccctgtagcctgcagcgtgctctacttgacctcagtggagacagagtcactgacgggcccccaagctgtggcccgggccagctctgcagctctgagctgtagcccccgcccgacaccagctgttgtccacttcaaggtgtcagcccagggcattacactgacggacaaccaaaggaagtatgtatactcagccctgtagaaccccatgcttaaggcccctgggggctcatgtttctgagtgtgaccttcctcaccctcctccttgcaggctcttctttcgccgccattatccagtgaacagcatcaccttctccagcactgac

SEQ ID NO: 295357 - DNA, 406 bp, Homo sapiens
aacaagggcaagcttggggtcatcgtttctgcctacatgcactacagcaagatctctgcagggtgaggctcccagcgcctgagtagctgcttccccagtggccctttctccagctggccccttaggaacccatctcccctggagcccacctcttcgttgagagtcctttgctgtcagcttagcacttccacctcccttttatcactagtactgcaacatagtctgcagcagatggtctgtagagtttcctggggcagccacaaacagggtggtgtaaaacagtggaaatgggccgggtgcgttggctcacgcctgtaataccagcactttgggaggctgaggtgggcaggtcacctgaggtcaggagtttgaaactagcctggccaggtgaaaccccatctctacc

SEQ ID NO: 295358 - DNA, 4492 bp, Homo sapiens
gctgaggaaggagagcagacccaggagagccatgaagcctaggaaagctgagcctcatagcttccgggagaaggttttccggaagaaacctccagtctgtgcagtatgtaaggtgaccatcgatgggacaggcgtttcgtgcagagtctgcaaggtggcgacgcacagaaaatgtgaagcaaaggtgacttcagcctgtcaggccttgcctcccgtggagttgcggcgaaacacggccccagtcaggcgcatagagcacctgggatccaccaaatctctgaaccactcaaagcagcgcagcactctgcccaggagcttcagcctggacccgctcatggagcggcgctgggacttagacctcacctacgtgacggagcgcatcttggccgccgccttccccgcgcggcccgatgaacagcggcaccggggccacctgcgcgagctggcccatgtgctgcaatccaagcaccgggacaagtacctgctcttcaacctttcagagaaaaggcatgacctgacccgcttaaaccccaaggttcaagacttcggctggcctgagctgcatgctccacccctggacaagctgtgctccatctgcaaagccatggagacatggctcagtgctgacccacagcacgtggtcgtactatactgcaagggaaacaagggcaagcttggggtcatcgtttctgcctacatgcactacagcaagatctctgcaggggcggaccaggcactggccactcttaccatgcggaaattctgcgaggacaaggtggccacagaactgcagccctcccagcgtcgatatatcagctacttcagtgggctgctatctggctccatcagaatgaacagcagccctctcttcctgcactatgtgctcatccccatgctgccagcctttgaacctggcacaggcttccagcccttccttaaaatctaccagtccatgcagcttgtctacacatctggagtctatcacattgcaggccctggtccccagcagctttgcatcagcctggagccagccctcctcctcaaaggcgatgtcatggtaacatgttatcacaagggtggccggggcacagaccggaccctcgtgttccgagtccagttccacacctgcaccatccacggaccacagctcactttccccaaggaccagcttgacgaggcctggactgatgagaggttccccttccaagcctccgtggagtttgtcttctcctccagccccgagaagatcaaaggcagcactccacggaacgacccctcggtctctgtcgactacaacaccactgagccagccgtgcgctgggactcctatgagaacttcaaccagcaccacgaggacagtgtggatggctccttgacccacacccggggtcccctggatggcagtccttatgcccaggtgcagcggcctccccggcagacccccccggcaccctctccagagcctccaccaccccccatgctctctgtcagcagcgactcaggccattcctccacgctgaccacagagccggctgctgagtcccctggccggccgccccctacagctgctgaacggcaggagctggatcgcctcctaggaggctgcggagtggccagtgggggccggggagctgggcgcgagacggccatcctagatgacgaagagcagcccactgtgggcggaggcccccacctcggagtgtatccaggccataggcctggcctcagccgccactgctcctgccgccagggctaccgggagccctgcggggttcccaatgggggctactaccggccagagggaaccctggagaggaggcgactggcctacgggggctatgagggatccccccagggctacgccgaggcctcgatggagaagaggcgcctctgccgatcgctgtcagaggggctatacccctacccacctgagatggggaaaccagccactggggactttggctaccgcgccccaggctaccgggaggtggtcatcctggaggaccctgggctgcctgccctatacccatgcccagcctgcgaggagaagctggcgctgcctacagcagccttgtatggactgcggctggagagggaggctggagaagggtgggcaagtgaggctggcaagcctctcctgcacccagtgcggcctgggcacccgctgcctctgctcttgcctgcctgtgggcatcaccatgccccgatgcctgactacagctgcctgaagccacccaaggcaggcgaggaagggcacgagggctgctcctacaccatgtgccccgaaggcaggaagctgagctacgagatccctacggaggagggaggggacaggtacccattgcctgggcacctggcctcagcaggacctttggcatctgcagagtcgctggagccggtgtcctggagggagggccccagtgggcacagcacactgcctcggtctccccgagatgccccatgcagtgcttcgtcagagttgtctggtccctccacgcccctgcacaccagcagtccagtccagggcaaggaaagcacccggcgacaggacaccaggtcccccacctcagcgcccactcagagactgagtcctggcgaggccttgccccctgtttcccaggcaggcaccggaaaggcccctgagctgccgtcgggaagtgggcctgagcctctggcccctagcccagtctctccgaccttccctcccagctcgcccagtgactggcctcaggaaaggagtccagggggccactcagatggcgccagtcctcggagccctgtgcccaccacacttcctggcctccgccacgccccctggcaaggccctcgaggcccccccgacagcccagatgggtctcccctcactcctgtgccttcccagatgccctggcttgtggccagcccagagccgcctcagagctcacctacacctgctttccccctggctgcctcctatgacaccaatggccttagccagcccccacttcctgagaaacgccacctgcccgggccggggcaacagccaggaccctggggcccagagcaggcatcatcgccagccagaggcatcagtcaccatgtcaccttcgcacctctgctctcagataatgtcccccaaaccccagagcctcctacacaagagagccaaagcaatgtcaagtttgtccaggatacatccaagttctggtacaagccacacctgtcccgtgaccaagccattgccctgctgaaggacaaggaccctggggccttcctgatcagggacagtcattcattccaaggagcttatgggctggccctcaaggtggccacaccgccacccagtgcccagccctggaaaggggaccccgtggaacagctggtccgccatttcctcatcgagactgggcccaaaggggtgaagatcaagggctgccccagtgagccctactttggcagcctgtccgccttggtctcccagcactccatctcccccatctccctgccctgctgcctgcgcattcccagcaaagatcctctggaagagaccccagaggctccagtgcccaccaacatgagcacagcggcagacctcctgcgtcagggtgctgcctgcagcgtgctctacttgacctcagtggagacagagtcactgacgggcccccaagctgtggcccgggccagctctgcagctctgagctgtagcccccgcccgacaccagctgttgtccacttcaaggtgtcagcccagggcattacactgacggacaaccaaaggaagctcttctttcgccgccattatccagtgaacagcatcaccttctccagcactgaccctcaagaccggagatggaccaacccagacgggaccacctccaagatctttggtttcgtggccaagaagccgggaagcccctgggagaatgtgtgtcacctctttgcagagcttgacccagatcagcctgctggcgccattgtcaccttcatcaccaaagttctactgggccagagaaaatgaaggaaggccacaagctcagagcccacatcaacactgcccccctcccagcaccccacagccctcacatcccctggcctggacccaggagacccaggagaaagcaccctcccttaggaatgaggagtgggcatcaggcctgggacactgctctccttccccgcccccagcctgctaagttaagtggacaggcccacaagatgaccttgcatgtgagcagatggcagagatgggtgtgtgaggggtgaggaggcatcagcagttgagccccgaaggagatcaggcagccccacctgcaggagaacgtcagccctccaggggatcagcccctgccagttccacccagctgcaggtgccagcacggcagggatgggagaggggtggggagcgagtcactgcctcctctgagcagagattcagagtaggatcacatgaataggggaaaaaagagagtctatttttgtctaataataaagaatttctataaactttagccga

SEQ ID NO: 295359 - DNA, 6441 bp, Homo sapiens
gctgaggaaggagagcagacccaggagagccatgaagcctaggaaagctgagcctcatagcttccgggagaaggttttccggaagaaacctccagtctgtgcagtatgtaaggtgaccatcgatgggacaggcgtttcgtgcagagtctgcaaggtggcgacgcacagaaaatgtgaagcaaaggtgacttcagcctgtcaggccttgcctcccgtggagttgcggcgaaacacggccccagtcaggcgcatagagcacctgggatccaccaaatctctgaaccactcaaagcagcgcagcactctgcccaggagcttcagcctggacccgctcatggagcggcgctgggacttagacctcacctacgtgacggagcgcatcttggccgccgccttccccgcgcggcccgatgaacagcggcaccggggccacctgcgcgagctggcccatgtgctgcaatccaagcaccgggacaagtacctgctcttcaacctttcagagaaaaggcatgacctgacccgcttaaaccccaaggttcaagacttcggctggcctgagctgcatgctccacccctggacaagctgtgctccatctgcaaagccatggagacatggctcagtgctgacccacagcacgtggtcgtactatactgcaagggaaacaagggcaagcttggggtcatcgtttctgcctacatgcactacagcaagatctctgcaggggcggaccaggcactggccactcttaccatgcggaaattctgcgaggacaaggtggccacagaactgcagccctcccagcgtcgatatatcagctacttcagtgggctgctatctggctccatcagaatgaacagcagccctctcttcctgcactatgtgctcatccccatgctgccagcctttgaacctggcacaggcttccagcccttccttaaaatctaccagtccatgcagcttgtctacacatctggagtctatcacattgcaggccctggtccccagcagctttgcatcagcctggagccagccctcctcctcaaaggcgatgtcatggtaacatgttatcacaagggtggccggggcacagaccggaccctcgtgttccgagtccagttccacacctgcaccatccacggaccacagctcactttccccaaggaccagcttgacgaggcctggactgatgagaggttccccttccaagcctccgtggagtttgtcttctcctccagccccgagaagatcaaaggcagcactccacggaacgacccctcggtctctgtcgactacaacaccactgagccagccgtgcgctgggactcctatgagaacttcaaccagcaccacgaggacagtgtggatggctccttgacccacacccggggtcccctggatggcagtccttatgcccaggtgcagcggcctccccggcagacccccccggcaccctctccagagcctccaccaccccccatgctctctgtcagcagcgactcaggccattcctccacgctgaccacagagccggctgctgagtcccctggccggccgccccctacagctgctgaacggcaggagctggatcgcctcctaggaggctgcggagtggccagtgggggccggggagctgggcgcgagacggccatcctagatgacgaagagcagcccactgtgggcggaggcccccacctcggagtgtatccaggccataggcctggcctcagccgccactgctcctgccgccagggctaccgggagccctgcggggttcccaatgggggctactaccggccagagggaaccctggagaggaggcgactggcctacgggggctatgagggatccccccagggctacgccgaggcctcgatggagaagaggcgcctctgccgatcgctgtcagaggggctatacccctacccacctgagatggggaaaccagccactggggactttggctaccgcgccccaggctaccgggaggtggtcatcctggaggaccctgggctgcctgccctatacccatgcccagcctgcgaggagaagctggcgctgcctacagcagccttgtatggactgcggctggagagggaggctggagaagggtgggcaagtgaggctggcaagcctctcctgcacccagtgcggcctgggcacccgctgcctctgctcttgcctgcctgtgggcatcaccatgccccgatgcctgactacagctgcctgaagccacccaaggcaggcgaggaagggcacgagggctgctcctacaccatgtgccccgaaggcaggtatgggcatccagggtaccctgccctggtgacatacagctatggaggagcagttcccagttactgcccagcatatggccgtgtgcctcatagctgtggctctccaggagagggcagagggtatcccagccctggtgcccactccccacgggctggctccatttccccgggcagcccgccctatccacaatctaggaagctgagctacgagatccctacggaggagggaggggacaggtacccattgcctgggcacctggcctcagcaggacctttggcatctgcagagtcgctggagccggtgtcctggagggagggccccagtgggcacagcacactgcctcggtctccccgagatgccccatgcagtgcttcgtcagagttgtctggtccctccacgcccctgcacaccagcagtccagtccagggcaaggaaagcacccggcgacaggacaccaggtcccccacctcagcgcccactcagagactgagtcctggcgaggccttgccccctgtttcccaggcaggcaccggaaaggcccctgagctgccgtcgggaagtgggcctgagcctctggcccctagcccagtctctccgaccttccctcccagctcgcccagtgactggcctcaggaaaggagtccagggggccactcagatggcgccagtcctcggagccctgtgcccaccacacttcctggcctccgccacgccccctggcaaggccctcgaggcccccccgacagcccagatgggtctcccctcactcctgtgccttcccagatgccctggcttgtggccagcccagagccgcctcagagctcacctacacctgctttccccctggctgcctcctatgacaccaatggccttagccagcccccacttcctgagaaacgccacctgcccgggccggggcaacagccaggaccctggggcccagagcaggcatcatcgccagccagaggcatcagtcaccatgtcaccttcgcacctctgctctcagataatgtcccccaaaccccagagcctcctacacaagagagccaaagcaatgtcaagtttgtccaggatacatccaagttctggtacaagccacacctgtcccgtgaccaagccattgccctgctgaaggacaaggaccctggggccttcctgatcagggacagtcattcattccaaggagcttatgggctggccctcaaggtggccacaccgccacccagtgcccagccctggaaaggggaccccgtggaacagctggtccgccatttcctcatcgagactgggcccaaaggggtgaagatcaagggctgccccagtgagccctactttggcagcctgtccgccttggtctcccagcactccatctcccccatctccctgccctgctgcctgcgcattcccagcaaagatcctctggaagagaccccagaggctccagtgcccaccaacatgagcacagcggcagacctcctgcgtcagggtgctgcctgcagcgtgctctacttgacctcagtggagacagagtcactgacgggcccccaagctgtggcccgggccagctctgcagctctgagctgtagcccccgcccgacaccagctgttgtccacttcaaggtgtcagcccagggcattacactgacggacaaccaaaggaagctcttctttcgccgccattatccagtgaacagcatcaccttctccagcactgaccctcaagaccggagatggaccaacccagacgggaccacctccaagatctttggtttcgtggccaagaagccgggaagcccctgggagaatgtgtgtcacctctttgcagagcttgacccagatcagcctgctggcgccattgtcaccttcatcaccaaagttctactgggccagagaaaatgaaggaaggccacaagctcagagcccacatcaacactgcccccctcccagcaccccacagccctcacatcccctggcctggacccaggagacccaggagaaagcaccctcccttaggaatgaggagtgggcatcaggcctgggacactgctctccttccccgcccccagcctgctaagttaagtggacaggcccacaagatgaccttgcatgtgagcagatggcagagatgggtgtgtgaggggtgaggaggcatcagcagttgagccccgaaggagatcaggcagccccacctgcaggagaacgtcagccctccaggggatcagcccctgccagttccacccagctgcaggtgccagcacggcagggatgggagaggggtggggagcgagtcactgcctcctctgagcagagattcagagtaggatcacatgaataggggaaaaaagagagtctatttttgtctaataataaagaatttctataaactttagccgaaattggagtcaacacttattcacaggaaggtcaaagcctcatctcccaggggacgtatctgtgctcaggcctgtagccaggcccatggaacatatgattcccatccctggcccaacattggtccacatctccccatgagcaagctgccttcggctgcccccatccagcagtcctgttcctagcccagtggactagaaaggctcctggttccggccatactgataaatacggaaactccatctttatcggctgtataaacatctctggtctgtacatacatttcatacatcgtagggtgggaagcgagggccaaagggaggcccagcagcacaacagctcacccgctttccctacagccctacccgctctgtgcaaaccaaggccaacagctcctgctgcctcttcctccctggaaaagtcactgttacggggagggggccaggggttgaaggattagaaggagatagagggcttggtggggaggacacatgtaagtgctagaatcaaacactgaagcgaaacaggcaactggcacaagcagcaagctgaggcatgggacggggcaggaaaaggggagggaggggccacgctgcccctctgggcttgctcagctaaggctctggggtcttgccctcacgctggcagggagacaggccccagagcctcagccccaatacccgggagctagggacatgggtggcactggtaaagaaaggatggaaggggagaaaggagtgaaggccctagtgccctgtcacctcacagcccctctctcttaaacatgcaacaggcacccacccatgtgggtccaggtatggggagccagagacctagatcctctgtggtgcctgagcaggttggggtggggagccagctctcaagggaaagatggagagcctagaggagtcttcctggggcagcagccagtgaaaggacagagatgaccaaagagaggtcccctggccctgccaggggtatgacagcagcaactggttcacacaaccaggaaagaaaacaagaaagaggaattcaaggagaaataccatggtgagtaggggagggggctgtctactctaccctctacaaagcatcatgcccgaatagcagctgagatagggtgctcacgcctctccacccacacagggccggtgagggaaagggggacccagaagcccactgaccaaagcgagtgggaccacccacataccaacaccattctttgggtccattcctgtccaaccagggactcaggcccagggactgacaacagtggcagcaccaggtcagaaacgtgggcacagagaagcgtgacaggggcctgagccagtgggggcagagtgactacacacctccaggggcctgctgggtaaacgaagcctctgggaagtcaggaactgggtgcctggcccagcagagggtgagcagggagaaggagcaggtctggaggggaggccctagccactcaaggggtgcagatctactttgactttctccccgcagctcagcattccaatggtggggaagaagcctccagaaggaacaacagcatccttcttcccaatgatcttgccattccgagtgaagaaaaccaccaccttcctgccctcatgctccggctctatctcttccccatcctcttcctcttcctcttcctcctcttcctcttccccttcctggtgcaggtacatgacattccgcacgttccggacggcccgggcagtcggagacaggatcactgtgtcacaactgtcatc

SEQ ID NO: 295360 - DNA, 1544 bp, Homo sapiens
ctcttggctcctcctgtctgagctgtgtttactcttggctgagtgtttaccagcaggtgattctgggctttgggccaaggcggtgagatccaacatggtcaaaacccctgtgaactctagagccctggcctcagactcttaccgccaccacagctgtcagggcagagaccatggagcttggcagcagaggaggggggctgcatggggctcagtccacccctgtgaaaactcctccccactgcccgctacccctcaccctgcagccatccattgccctgctgaaggacaaggaccctggggccttcctgatcagggacagtcattcattccaaggagcttatgggctggccctcaaggtggccacaccgccacccagtgcccagccctggaaaggggaccccgtggaacagctggtccgccatttcctcatcgagactgggcccaaaggggtgaagatcaagggctgccccagtgagccctactttggcagcctgtccgccttggtctcccagcactccatctcccccatctccctgccctgctgcctgcgcattcccagcaaagatcctctggaagagaccccagaggctccagtgcccaccaacatgagcacagcggcagacctcctgcgtcagggtgctgcctgcagcgtgctctacttgacctcagtggagacagagtcactgacgggcccccaagctgtggcccgggccagctctgcagctctgagctgtagcccccgcccgacaccagctgttgtccacttcaaggtgtcagcccagggcattacactgacggacaaccaaaggaagctcttctttcgccgccattatccagtgaacagcatcaccttctccagcactgaccctcaagaccggagatggaccaacccagacgggaccacctccaagatctttggtttcgtggccaagaagccgggaagcccctgggagaatgtgtgtcacctctttgcagagcttgacccagatcagcctgctggcgccattgtcaccttcatcaccaaagttctactgggccagagaaaatgaaggaaggccacaagctcagagcccacatcaacactgcccccctcccagcaccccacagccctcacatcccctggcctggacccaggagacccaggagaaagcaccctcccttaggaatgaggagtgggcatcaggcctgggacactgctctccttccccgcccccagcctgctaagttaagtggacaggcccacaagatgaccttgcatgtgagcagatggcagagatgggtgtgtgaggggtgaggaggcatcagcagttgagccccgaaggagatcaggcagccccacctgcaggagaacgtcagccctccaggggatcagcccctgccagttccacccagctgcaggtgccagcacggcagggatgggagaggggtggggagcgagtcactgcctcctctgagcagagattcagagtaggatcacatgaataggggaaaaaagagagtctatttttgtctaataataaagaatttctataaactttagccga

SEQ ID NO: 295361 - DNA, 1177 bp, Homo sapiens
ggcaggggagccccatactgtcggggatgaggaattgggtcctcagcctaggttctcaaagtctcatgaacaagacgatcatggggtggtagcagggaggcttctctgcctcgcttctgactgtagatccagtagagtcatggaatctgcctttttaacaagtcacctatgtgattgtaaagcatgtgacagcagtagctggggaatgtgcaagagctggtgggggtggctaggggatgggcactccctccctgacccactccctgcccctgtagcctgcagcgtgctctacttgacctcagtggagacagagtcactgacgggcccccaagctgtggcccgggccagctctgcagctctgagctgtagcccccgcccgacaccagctgttgtccacttcaaggtgtcagcccagggcattacactgacggacaaccaaaggaagctcttctttcgccgccattatccagtgaacagcatcaccttctccagcactgaccctcaagaccggagatggaccaacccagacgggaccacctccaagatctttggtttcgtggccaagaagccgggaagcccctgggagaatgtgtgtcacctctttgcagagcttgacccagatcagcctgctggcgccattgtcaccttcatcaccaaagttctactgggccagagaaaatgaaggaaggccacaagctcagagcccacatcaacactgcccccctcccagcaccccacagccctcacatcccctggcctggacccaggagacccaggagaaagcaccctcccttaggaatgaggagtgggcatcaggcctgggacactgctctccttccccgcccccagcctgctaagttaagtggacaggcccacaagatgaccttgcatgtgagcagatggcagagatgggtgtgtgaggggtgaggaggcatcagcagttgagccccgaaggagatcaggcagccccacctgcaggagaacgtcagccctccaggggatcagcccctgccagttccacccagctgcaggtgccagcacggcagggatgggagaggggtggggagcgagtcactgcctcctctgagcagagattcagagtaggatcacatgaataggggaaaaaagagagtctatttttgtctaataataaagaatttctataaactttagccga

SEQ ID NO: 295362 - DNA, 860 bp, Homo sapiens
  misc_feature (16)..(16): n is a, c, g, or t
ctggctctgatcttanggggagagagaggagaaaaggagatcaaacaggagaggggctcctacttatccattcaagtaagcctccccacgaattcagcctcttccttccaagggaccagggcgctgctgtcctctcaatgctggcatttgatttgtctcaccaaggccagctacattcccttgtggaaggaatgttaagccccttccccaccctttatccccctaggatctttggtttcgtggccaagaagccgggaagcccctgggagaatgtgtgtcacctctttgcagagcttgacccagatcagcctgctggcgccattgtcaccttcatcaccaaagttctactgggccagagaaaatgaaggaaggccacaagctcagagcccacatcaacactgcccccctcccagcaccccacagccctcacatcccctggcctggacccaggagacccaggagaaagcaccctcccttaggaatgaggagtgggcatcaggcctgggacactgctctccttccccgcccccagcctgctaagttaagtggacaggcccacaagatgaccttgcatgtgagcagatggcagagatgggtgtgtgaggggtgaggaggcatcagcagttgagccccgaaggagatcaggcagccccacctgcaggagaacgtcagccctccaggggatcagcccctgccagttccacccagctgcaggtgccagcacggcagggatgggagaggggtggggagcgagtcactgcctcctctgagcagagattcagagtaggatcacatgaataggggaaaaaagagagtctatttttgtctaataataaagaatttctataaactttagccga

SEQ ID NO: 295363 - DNA, 4638 bp, Homo sapiens
gctgaggaaggagagcagacccaggagagccatgaagcctaggaaagctgagcctcatagcttccgggagaaggttttccggaagaaacctccagtctgtgcagtatgtaaggtgaccatcgatgggacaggcgtttcgtgcagagtctgcaaggtggcgacgcacagaaaatgtgaagcaaaggtgacttcagcctgtcaggccttgcctcccgtggagttgcggcgaaacacggccccagtcaggcgcatagagcacctgggatccaccaaatctctgaaccactcaaagcagcgcagcactctgcccaggagcttcagcctggacccgctcatggagcggcgctgggacttagacctcacctacgtgacggagcgcatcttggccgccgccttccccgcgcggcccgatgaacagcggcaccggggccacctgcgcgagctggcccatgtgctgcaatccaagcaccgggacaagtacctgctcttcaacctttcagagaaaaggcatgacctgacccgcttaaaccccaaggttcaagacttcggctggcctgagctgcatgctccacccctggacaagctgtgctccatctgcaaagccatggagacatggctcagtgctgacccacagcacgtggtcgtactatactgcaagggaaacaagggcaagcttggggtcatcgtttctgcctacatgcactacagcaagatctctgcaggggcggaccaggcactggccactcttaccatgcggaaattctgcgaggacaaggtggccacagaactgcagccctcccagcgtcgatatatcagctacttcagtgggctgctatctggctccatcagaatgaacagcagccctctcttcctgcactatgtgctcatccccatgctgccagcctttgaacctggcacaggcttccagcccttccttaaaatctaccagtccatgcagcttgtctacacatctggagtctatcacattgcaggccctggtccccagcagctttgcatcagcctggagccagccctcctcctcaaaggcgatgtcatggtaacatgttatcacaagggtggccggggcacagaccggaccctcgtgttccgagtccagttccacacctgcaccatccacggaccacagctcactttccccaaggaccagcttgacgaggcctggactgatgagaggttccccttccaagcctccgtggagtttgtcttctcctccagccccgagaagatcaaaggcagcactccacggaacgacccctcggtctctgtcgactacaacaccactgagccagccgtgcgctgggactcctatgagaacttcaaccagcaccacgaggacagtgtggatggctccttgacccacacccggggtcccctggatggcagtccttatgcccaggtgcagcggcctccccggcagacccccccggcaccctctccagagcctccaccaccccccatgctctctgtcagcagcgactcaggccattcctccacgctgaccacagagccggctgctgagtcccctggccggccgccccctacagctgctgaacggcaggagctggatcgcctcctaggaggctgcggagtggccagtgggggccggggagctgggcgcgagacggccatcctagatgacgaagagcagcccactgtgggcggaggcccccacctcggagtgtatccaggccataggcctggcctcagccgccactgctcctgccgccagggctaccgggagccctgcggggttcccaatgggggctactaccggccagagggaaccctggagaggaggcgactggcctacgggggctatgagggatccccccagggctacgccgaggcctcgatggagaagaggcgcctctgccgatcgctgtcagaggggctatacccctacccacctgagatggggaaaccagccactggggactttggctaccgcgccccaggctaccgggaggtggtcatcctggaggaccctgggctgcctgccctatacccatgcccagcctgcgaggagaagctggcgctgcctacagcagccttgtatggactgcggctggagagggaggctggagaagggtgggcaagtgaggctggcaagcctctcctgcacccagtgcggcctgggcacccgctgcctctgctcttgcctgcctgtgggcatcaccatgccccgatgcctgactacagctgcctgaagccacccaaggcaggcgaggaagggcacgagggctgctcctacaccatgtgccccgaaggcaggtatgggcatccagggtaccctgccctggtgacatacagctatggaggagcagttcccagttactgcccagcatatggccgtgtgcctcatagctgtggctctccaggagagggcagagggtatcccagccctggtgcccactccccacgggctggctccatttccccgggcagcccgccctatccacaatctaggaagctgagctacgagatccctacggaggagggaggggacaggtacccattgcctgggcacctggcctcagcaggacctttggcatctgcagagtcgctggagccggtgtcctggagggagggccccagtgggcacagcacactgcctcggtctccccgagatgccccatgcagtgcttcgtcagagttgtctggtccctccacgcccctgcacaccagcagtccagtccagggcaaggaaagcacccggcgacaggacaccaggtcccccacctcagcgcccactcagagactgagtcctggcgaggccttgccccctgtttcccaggcaggcaccggaaaggcccctgagctgccgtcgggaagtgggcctgagcctctggcccctagcccagtctctccgaccttccctcccagctcgcccagtgactggcctcaggaaaggagtccagggggccactcagatggcgccagtcctcggagccctgtgcccaccacacttcctggcctccgccacgccccctggcaaggccctcgaggcccccccgacagcccagatgggtctcccctcactcctgtgccttcccagatgccctggcttgtggccagcccagagccgcctcagagctcacctacacctgctttccccctggctgcctcctatgacaccaatggccttagccagcccccacttcctgagaaacgccacctgcccgggccggggcaacagccaggaccctggggcccagagcaggcatcatcgccagccagaggcatcagtcaccatgtcaccttcgcacctctgctctcagataatgtcccccaaaccccagagcctcctacacaagagagccaaagcaatgtcaagtttgtccaggatacatccaagttctggtacaagccacacctgtcccgtgaccaagccattgccctgctgaaggacaaggaccctggggccttcctgatcagggacagtcattcattccaaggagcttatgggctggccctcaaggtggccacaccgccacccagtgcccagccctggaaaggggaccccgtggaacagctggtccgccatttcctcatcgagactgggcccaaaggggtgaagatcaagggctgccccagtgagccctactttggcagcctgtccgccttggtctcccagcactccatctcccccatctccctgccctgctgcctgcgcattcccagcaaagatcctctggaagagaccccagaggctccagtgcccaccaacatgagcacagcggcagacctcctgcgtcagggtgctgcctgcagcgtgctctacttgacctcagtggagacagagtcactgacgggcccccaagctgtggcccgggccagctctgcagctctgagctgtagcccccgcccgacaccagctgttgtccacttcaaggtgtcagcccagggcattacactgacggacaaccaaaggaagctcttctttcgccgccattatccagtgaacagcatcaccttctccagcactgaccctcaagaccggagatggaccaacccagacgggaccacctccaagatctttggtttcgtggccaagaagccgggaagcccctgggagaatgtgtgtcacctctttgcagagcttgacccagatcagcctgctggcgccattgtcaccttcatcaccaaagttctactgggccagagaaaatgaaggaaggccacaagctcagagcccacatcaacactgcccccctcccagcaccccacagccctcacatcccctggcctggacccaggagacccaggagaaagcaccctcccttaggaatgaggagtgggcatcaggcctgggacactgctctccttccccgcccccagcctgctaagttaagtggacaggcccacaagatgaccttgcatgtgagcagatggcagagatgggtgtgtgaggggtgaggaggcatcagcagttgagccccgaaggagatcaggcagccccacctgcaggagaacgtcagccctccagggatgggagaggggtggggagcgagtcactgcctcctctgagcagagattcagagtaggatcacatgaataggggaaaaaagagagtctatttttgtctaataataaagaatttctataaactttagccga

SEQ ID NO: 295364 - DNA, 1322 bp, Homo sapiens
gctgaggaaggagagcagacccaggagagccatgaagcctaggaaagctgagcctcatagcttccgggagaaggttttccggaagaaacctccagtctgtgcagtatgtaaggtgaccatcgatgggacaggcgtttcgtgcagagtctgcaaggtggcgacgcacagaaaatgtgaagcaaaggtgacttcagcctgtcaggccttgcctcccgtggagttgcggcgaaacacggccccagtcaggcgcatagagcacctgggatccaccaaatctctgaaccactcaaagcagcgcagcactctgcccaggagcttcagcctggacccgctcatggagcggcgctgggacttagacctcacctacgtgacggagcgcatcttggccgccgccttccccgcgcggcccgatgaacagcggcaccggggccacctgcgcgagctggcccatgtgctgcaatccaagcaccgggacaagtacctgctcttcaacctttcagagaaaaggcatgacctgacccgcttaaaccccaaggttcaagacttcggctggcctgagctgcatgctccacccctggacaagctgtgctccatctgcaaagccatggagacatggctcagtgctgacccacagcacgtggtcgtactatactgcaagggaaacaagggcaagcttggggtcatcgtttctgcctacatgcactacagcaagatctctgcaggggcggaccaggcactggccactcttaccatgcggaaattctgcgaggacaaggtggccacagaactgcagccctcccagcgtcgatatatcagctacttcagtgggctgctatctggctccatcagaatgaacagcagccctctcttcctgcactatgtgctcatccccatgctgccagcctttgaacctggcacaggcttccagcccttccttaaaatctaccagtccatgcagcttgtctacacatctggagtctatcacattgcaggccctggtccccagcagctttgcatcagcctggagccagccctcctcctcaaaggcgatgtcatggtaacatgttatcacaagggtggccggggcacagaccggaccctcgtgttccgagtccagttccacacctgcaccatccacggaccacagctcactttccccaaggaccagcttgacgaggcctggactgatgagaggttccccttccaagcctccgtggagtttgtcttctcctccagccccgagaagatcaaaggcagcactccacggaacgacccctcggtctctgtcgaccacgttgccaaacatcggggatactctagaa

SEQ ID NO: 295365 - DNA, 105 bp, Homo sapiens
acctccagtctgtgcagtatgtaaggtgaccatcgatgggacaggcgtttcgtgcagaggtgaggctctctgtcctgtgactctgagaccctccacccagtacca

SEQ ID NO: 295366 - DNA, 3832 bp, Homo sapiens
  misc_feature (1385)..(1385): n is a, c, g, or t
ggcacgaggccgcatttcaccctgctccaggcagcgtggtctgtatggctccgccctgggcaggaggagaaagaagagggccaggcaccacgtgcctgcactctccctggatgctggaggctgctccgccgtgggcaggaggagaaggaagagaactgggtgccgcctgcctgcactctctccggatgctggaggctggaggcagtgaggcagcaacagcgcgagggcgaggcgactttggagctgcctcatgcagcgacctcgccttccgctgcgcctcctcccagaacccaagaagcctggaacctgtggcgtccagccctgaaaggaggagacggcaacccagccgcgcttttgcctgcactctccctggatgctggaggctggaggcagtgacgcagcaacagcgcgaggcgactttggagcggcctcatatagcgacctcgccttccgctgcgcgtcctcccagagcccaagaagcccggaacctgtggcatccatctctgaaaggagaagacggcaacccagccgaggcactactgggttggggtctccacgaccgagctggtctcatcaagtggcgtccaacaaggggctcaaacccgggttgaggggttgctggagcgacggagaacgtggaactacactggaggacaccagagtactcttaagcaatcccttggccaaaaccagcaactgatttggataccatcaagacacctgaaatcttgtcatgagccagatactgaggaagagattttgggaagaacccaaggaccccccagttgcagccatgtcaagactgacaataaggaagacatcagtcccagcaagcaacattcatcgggcacagccacccatgtggggccagatcaagaagttgacacagatggcggaagaaaatctgaagaaagcggatgaccagctacaatgagtaatctaatggtagctatgatggctgtgctcaccattgccatgagtattcccccagcacctgctgaaacaaaaaacattatacttattgggcatatattccttttccaccagtttcatggccagtgacatggttagaccccccagtggaggtatacactaatgatagcttttggatacctggttctacagatgatagaggcccatctcacccccaaaaggagggaacaattatgaatatttcgttgggatttgagcatttaactacttgcttgggaaaagccaacaggtgcttacctcccagtcatcaatcttggctggcaatagtgcctgaaggtaacatctctgtggcacaattacatatgctttctgaccttagtatttattacaatgattatgcccctgtaaccaaagtttaccgccctcaaaaacctatctgtatagtggattgnacatgttcagaaaaaaatgaagatatttacttgggaagattgtattgcagggcaagcaaaggtgttgtgtaatgattcatatggagtcactattgattggtcccctaaaggggcatttataaggctcacttctcaatctgtaggtaatggtcaccctgcatctaaagaaaatgatcagatggtagacactataaaaaatacaacaaaagttcctattatttggacatatggtgatatggtggaacctcgaccccaaatgatacgacctgctgtaggagctaaacataaggaattgtggaaaatattaatggcactgaaaaagataaaagatttgggaagggaaatatactaagccatcccaatataatcctaattacatgttagaattggctcacaatgattcagtctggatacatagttgtgtctgtcctccctttctgcttgtagtgagtgatttaaaacttgatctccctaatcatcatgtgactgtcaagaatgtagattgttttcttgtgtgaattcttccttgtataatactgatcattctatcttagtggtaagagcccgagaaggagtatggatacctgtaaagctttcccgtccttgagaagcctctccttctgtgcatattattactgaaattcttcaaaagattttgaggcactctcagggtttcattgctactttaatcattatgggattgattgctgtcacagctactgccacggtagctggagttgctttaccaacacagtacaaacagcagattatgtaaataattggcagaaaaattctactttgctgtggaattcccaaactaatatacaccagaaattaaccaatcagattaatgatctccgacaaactatcgtatggttgggagatcatgtagttagtttaaaatatagaatgcagttaacaatgtgattgaaatacttctgatttttgcattactcctcacctgtataatgaaacagagcatgagtgggaaagagttaagagacatttaaaggatcatactggaaatttatctttggatattgcaaaactgaaggaacacatatttcaagcctctgaggcacatctgacattaatgacaggaactaaagtgcttgaaggagctgcagatggattagcagctattcacccatacaagtggatcaagacacttggagactttgtgatttcaatgatgattgtgcctttaatctgtattgtttgtctttgtgtagtctgcagatgtggatcccgaatcctgcgagaagtagcccaccatgacgaagctgcctttgcttttatcgctttgcaaaaacagaaaaggggacatgctgggaacaggccctaagcctgtcataaacaggccttaaactgaccatgaacaggatttctgcacgaatgtgacgtgctcctgatggctatgacgcccactgctagaagttgttagtttactggagcagggtagggaacacctggcccacccggagcggaaaactgctcaaaccacaaacaacagcatgagtggcctgagccttaacaacatgtttttgctgcagataatcggccagagactgtttctctactcctctctaagtatgctttgtttttcgtaaggaatgcttttagctaatctgtaacctatagaaacaatgcttatcactggcttgctgtcaataaacatgtgggtcaaactctgtttgtggctctcagctctcaaggctgttttccccctgattcccactttgcactttatttctgtgtgtttgtcttcattcctctagcaccactgggttggggtctccttgaccaagctggtctcggcacatatgcatgtatgcccaggtcctgaaatcagccttgtggagcctgtgggtaggaaaagtcaaccctctgtgcatgtaggcctggaacctgaccaatactgtattttcctaccacgtttggtttcaaatgtggaaactgcccatacggacctactgcatttgtttttaaaaatcctctgtaagtggacctgcacagttcaggcccagattgttccaggatcaaccctacagtagaaatcaagtatctttttcattgtctcttgggatctgccttttcaccaataaaatatgagggctgttgggagcaggcccccccaaatctggccataaactgtccccaaaactggccataaacaaaatctctgcagcactataacatgttcataatggccataacgcccaagttggaaggttgtggatttacaggaatgagggcaaggaacacctggcctgcccagggtggaaaaccacttaaaggcattcttaagccacaaacaatagcatgagtgatctgtgccttaagaacatgctcctgctgcagttaactagcccaacatattcctttaattcagtccatcccttcgtttcccataagggatacttttagttaatttaatatctatagaa

SEQ ID NO: 295367 - DNA, 3078 bp, Homo sapiens
  misc_feature (1385)..(1385): n is a, c, g, or t
ggcacgaggccgcatttcaccctgctccaggcagcgtggtctgtatggctccgccctgggcaggaggagaaagaagagggccaggcaccacgtgcctgcactctccctggatgctggaggctgctccgccgtgggcaggaggagaaggaagagaactgggtgccgcctgcctgcactctctccggatgctggaggctggaggcagtgaggcagcaacagcgcgagggcgaggcgactttggagctgcctcatgcagcgacctcgccttccgctgcgcctcctcccagaacccaagaagcctggaacctgtggcgtccagccctgaaaggaggagacggcaacccagccgcgcttttgcctgcactctccctggatgctggaggctggaggcagtgacgcagcaacagcgcgaggcgactttggagcggcctcatatagcgacctcgccttccgctgcgcgtcctcccagagcccaagaagcccggaacctgtggcatccatctctgaaaggagaagacggcaacccagccgaggcactactgggttggggtctccacgaccgagctggtctcatcaagtggcgtccaacaaggggctcaaacccgggttgaggggttgctggagcgacggagaacgtggaactacactggaggacaccagagtactcttaagcaatcccttggccaaaaccagcaactgatttggataccatcaagacacctgaaatcttgtcatgagccagatactgaggaagagattttgggaagaacccaaggaccccccagttgcagccatgtcaagactgacaataaggaagacatcagtcccagcaagcaacattcatcgggcacagccacccatgtggggccagatcaagaagttgacacagatggcggaagaaaatctgaagaaagcggatgaccagctacaatgagtaatctaatggtagctatgatggctgtgctcaccattgccatgagtattcccccagcacctgctgaaacaaaaaacattatacttattgggcatatattccttttccaccagtttcatggccagtgacatggttagaccccccagtggaggtatacactaatgatagcttttggatacctggttctacagatgatagaggcccatctcacccccaaaaggagggaacaattatgaatatttcgttgggatttgagcatttaactacttgcttgggaaaagccaacaggtgcttacctcccagtcatcaatcttggctggcaatagtgcctgaaggtaacatctctgtggcacaattacatatgctttctgaccttagtatttattacaatgattatgcccctgtaaccaaagtttaccgccctcaaaaacctatctgtatagtggattgnacatgttcagaaaaaaatgaagatatttacttgggaagattgtattgcagggcaagcaaaggtgttgtgtaatgattcatatggagtcactattgattggtcccctaaaggggcatttataaggctcacttctcaatctgtaggtaatggtcaccctgcatctaaagaaaatgatcagatggtagacactataaaaaatacaacaaaagttcctattatttggacatatggtgatatggtggaacctcgaccccaaatgatacgacctgctgtaggagctaaacataaggaattgtggaaaatattaatggcactgaaaaagataaaagatttgggaagggaaatatactaagccatcccaatataatcctaattacatgttagaattggctcacaatgattcagtctggatacatagttgtgtctgtcctccctttctgcttgtagtgagtgatttaaaacttgatctccctaatcatcatgtgactgtcaagaatgtagattgttttcttgtgtgaattcttccttgtataatactgatcattctatcttagtggtaagagcccgagaaggagtatggatacctgtaaagctttcccgtccttgagaagcctctccttctgtgcatattattactgaaattcttcaaaagattttgaggcactctcagggtttcattgctactttaatcattatgggattgattgctgtcacagctactgccacggtagctggagttgctttaccaacacagtacaaacagcagattatgtaaataattggcagaaaaattctactttgctgtggaattcccaaactaatatacaccagaaattaaccaatcagattaatgatctccgacaaactatcgtatggttgggagatcatgtagttagtttaaaatatagaatgcagttaacaatgtgattgaaatacttctgatttttgcattactcctcacctgtataatgaaacagagcatgagtgggaaagagttaagagacatttaaaggatcatactggaaatttatctttggatattgcaaaactgaaggaacacatatttcaagcctctgaggcacatctgacattaatgacaggaactaaagtgcttgaaggagctgcagatggattagcagctattcacccatacaagtggatcaagacacttggagactttgtgatttcaatgatgattgtgcctttaatctgtattgtttgtctttgtgtagtctgcagatgtggatcccgaatcctgcgagaagtagcccaccatgacgaagctgcctttgcttttatcgctttgcaaaaacagaaaaggggacatgctgggaacaggccctaagcctgtcataaacaggccttaaactgaccatgaacaggatttctgcacgaatgtgacgtgctcctgatggctatgacgcccactgctagaagttgttagtttactggagcagggtagggaacacctggcccacccggagcggaaaactgctcaaaccacaaacaacagcatgagtggcctgagccttaacaacatgtttttgctgcagataatcggccagagactgtttctctactcctctctaagtatgctttgtttttcgtaaggaatgcttttagctaatctgtaacctatagaaacaatgcttatcactggcttgctgtcaataaacatgtgggtcaaactctg

SEQ ID NO: 295368 - DNA, 2160 bp, Homo sapiens
ggcacgaggccgcatttcaccctgctccaggcagcgtggtctgtatggctccgccctgggcaggaggagaaagaagagggccaggcaccacgtgcctgcactctccctggatgctggaggctgctccgccgtgggcaggaggagaaggaagagaactgggtgccgcctgcctgcactctctccggatgctggaggctggaggcagtgaggcagcaacagcgcgagggcgaggcgactttggagctgcctcatgcagcgacctcgccttccgctgcgcctcctcccagaacccaagaagcctggaacctgtggcgtccagccctgaaaggaggagacggcaacccagccgcgcttttgcctgcactctccctggatgctggaggctggaggcagtgacgcagcaacagcgcgaggcgactttggagcggcctcatatagcgacctcgccttccgctgcgcgtcctcccagagcccaagaagcccggaacctgtggcatccatctctgaaaggagaagacggcaacccagccgaggcactactgggttggggtctccacgaccgagctggtctcatcaagtggcgtccaacaaggggctcaaacccgggttgaggggttgctggagcgacggagaacgtggaactacactggaggacaccagagtactcttaagcaatcccttggccaaaaccagcaactgatttggataccatcaagacacctgaaatcttgtcatgagccagatactgaggaagagattttgggaagaacccaaggaccccccagttgcagccatgtcaagactgacaataaggaagacatcagtcccagcaagcaacattcatcgggcacagccacccatgtggggccagatcaagaagttgacacagatggcggaagaaaatctgaagaaagcggatgaccagctacaatgagtaatctaatgtctgcagatgtggatcccgaatcctgcgagaagtagcccaccatgacgaagctgcctttgcttttatcgctttgcaaaaacagaaaaggggacatgctgggaacaggccctaagcctgtcataaacaggccttaaactgaccatgaacaggatttctgcacgaatgtgacgtgctcctgatggctatgacgcccactgctagaagttgttagtttactggagcagggtagggaacacctggcccacccggagcggaaaactgctcaaaccacaaacaacagcatgagtggcctgagccttaacaacatgtttttgctgcagataatcggccagagactgtttctctactcctctctaagtatgctttgtttttcgtaaggaatgcttttagctaatctgtaacctatagaaacaatgcttatcactggcttgctgtcaataaacatgtgggtcaaactctgtttgtggctctcagctctcaaggctgttttccccctgattcccactttgcactttatttctgtgtgtttgtcttcattcctctagcaccactgggttggggtctccttgaccaagctggtctcggcacatatgcatgtatgcccaggtcctgaaatcagccttgtggagcctgtgggtaggaaaagtcaaccctctgtgcatgtaggcctggaacctgaccaatactgtattttcctaccacgtttggtttcaaatgtggaaactgcccatacggacctactgcatttgtttttaaaaatcctctgtaagtggacctgcacagttcaggcccagattgttccaggatcaaccctacagtagaaatcaagtatctttttcattgtctcttgggatctgccttttcaccaataaaatatgagggctgttgggagcaggcccccccaaatctggccataaactgtccccaaaactggccataaacaaaatctctgcagcactataacatgttcataatggccataacgcccaagttggaaggttgtggatttacaggaatgagggcaaggaacacctggcctgcccagggtggaaaaccacttaaaggcattcttaagccacaaacaatagcatgagtgatctgtgccttaagaacatgctcctgctgcagttaactagcccaacatattcctttaattcagtccatcccttcgtttcccataagggatacttttagttaatttaatatctatagaa

SEQ ID NO: 295369 - DNA, 289 bp, Homo sapiens
caagaagcccggaacctgtggcatccatctctgaaaggagaagacggcaacccagccgagggtgagtccgggagtctggggtgccggcagcggaggaaggacaagcaggagtctcggcctcccggggagaatttcacaaaattctctgattatcttgttataatactgttacgtaggctgttgttttgattctgatactggtctcttgtgttctttaatcttttttccttaatcagttttgctagtggtttattaactatgttgtttataaaaacaacttttagccttg

SEQ ID NO: 295370 - DNA, 1143 bp, Homo sapiens
ggcacgaggccgcatttcaccctgctccaggcagcgtggtctgtatggctccgccctgggcaggaggagaaagaagagggccaggcaccacgtgcctgcactctccctggatgctggaggctgctccgccgtgggcaggaggagaaggaagagaactgggtgccgcctgcctgcactctctccggatgctggaggctggaggcagtgaggcagcaacagcgcgagggcgaggcgactttggagctgcctcatgcagcgacctcgccttccgctgcgcctcctcccagaacccaagaagcctggaacctgtggcgtccagccctgaaaggaggagacggcaacccagccgcgcttttgcctgcactctccctggatgctggaggctggaggcagtgacgcagcaacagcgcgaggcgactttggagcggcctcatatagcgacctcgccttccgctgcgcgtcctcccagagcccaagaagcccggaacctgtggcatccatctctgaaaggagaagacggcaacccagccgaggcactactgggttggggtctccacgaccgagctggtctcatcaagtggcgtccaacaaggggctcaaacccgggttgaggggttgctggagcgacggagaacgtggaactacactggaggacaccagagtactcttaagcaatcccttgtctgcagatgtggatcccgaatcctgcgagaagtagcccaccatgacgaagctgcctttgcttttatcgctttgcaaaaacagaaaaggggacatgctgggaacaggccctaagcctgtcataaacaggccttaaactgaccatgaacaggatttctgcacgaatgtgacgtgctcctgatggctatgacgcccactgctagaagttgttagtttactggagcagggtagggaacacctggcccacccggagcggaaaactgctcaaaccacaaacaacagcatgagtggcctgagccttaacaacatgtttttgctgcagataatcggccagagactgtttctctactcctctctaagtatgctttgtttttcgtaaggaatgcttttagctaatctgtaacctatagaaacaatgcttatcactggcttgctgtcaataaacatgtgggtcaaactctg

SEQ ID NO: 295371 - DNA, 1406 bp, Homo sapiens
ggcacgaggccgcatttcaccctgctccaggcagcgtggtctgtatggctccgccctgggcaggaggagaaagaagagggccaggcaccacgtgcctgcactctccctggatgctggaggctgctccgccgtgggcaggaggagaaggaagagaactgggtgccgcctgcctgcactctctccggatgctggaggctggaggcagtgaggcagcaacagcgcgagggcgaggcgactttggagctgcctcatgcagcgacctcgccttccgctgcgcctcctcccagaacccaagaagcctggaacctgtggcgtccagccctgaaaggaggagacggcaacccagccgcgcttttgcctgcactctccctggatgctggaggctggaggcagtgacgcagcaacagcgcgaggcgactttggagcggcctcatatagcgacctcgccttccgctgcgcgtcctcccagagcccaagaagcccggaacctgtggcatccatctctgaaaggagaagacggcaacccagccgaggcactactgggttggggtctccacgaccgagctggtctcatcaagtggcgtccaacaaggggctcaaacccgggttgaggggttgctggagcgacggagaacgtggaactacactggaggacaccagagtactcttaagcaatcccttggccaaaaccagcaactgatttggataccatcaagacacctgaaatcttgtcatgagccagatactgaggaagagattttgggaagaacccaaggaccccccagttgcagccatgtcaagactgacaataaggaagacatcagtcccagcaagcaacattcatcgggcacagccacccatgtggggccagatcaagaagttgacacagatggcggaagaaaatctgaagaaagcggatgaccagctacaatgagtaatctaatgtctgcagatgtggatcccgaatcctgcgagaagtagcccaccatgacgaagctgcctttgcttttatcgctttgcaaaaacagaaaaggggacatgctgggaacaggccctaagcctgtcataaacaggccttaaactgaccatgaacaggatttctgcacgaatgtgacgtgctcctgatggctatgacgcccactgctagaagttgttagtttactggagcagggtagggaacacctggcccacccggagcggaaaactgctcaaaccacaaacaacagcatgagtggcctgagccttaacaacatgtttttgctgcagataatcggccagagactgtttctctactcctctctaagtatgctttgtttttcgtaaggaatgcttttagctaatctgtaacctatagaaacaatgcttatcactggcttgctgtcaataaacatgtgggtcaaactctg

SEQ ID NO: 295372 - DNA, 745 bp, Homo sapiens
gggtggctccagctccgccactgcgcgcgctccagcgccccagaaggcagggggcagcccggggaccggggtcccggagccccgtgggaggcgggcaacacctgtcgggacccgagggcgtgtctgagattgtggcctgaggtgctgcgccttccgatccggggcagcgggcgtcctgtagctgcgccttccgaatccagcccagattctcctaccagctgcttgggtcacgtcggtggaactcctaaagggatgccttcaaaatgtgtgaataagcttcaatcagactgcccttcccaaagaaaataactataaatgctggaaaaactacaaaacagccacctgaaggcactggcgagtgacaaaagcaagcaaattctggagaagagtcaacacttggaagaagggagctgcactgggtacatggggaaggaacagtgtctctgcatgagaatggccaaagaacaagatacatttccccgtggagagcaatcctagagagagggaagcatgggtcagaataaggtgtactggccccagggtaatagcatgtatttctgttgcattggtgtttccaaaataatgcttcggttccaagtttcaggaattggttgggggagcatggggatcatacagtgattcaggagcttccttgcaagtaagtgagtgagccaatcaaataatttatgtttaaatctttcactgtgttaaatgttgaaaaataaagcaagtgaattccaaacta

SEQ ID NO: 295373 - DNA, 1120 bp, Homo sapiens
gggtggctccagctccgccactgcgcgcgctccagcgccccagaaggcagggggcagcccggggaccggggtcccggagccccgtgggaggcgggcaacacctgtcgggacccgagggcgtgtctgagattgtggcctgaggtgctgcgccttccgatccggggcagcgggcgtcctgtagctgcgccttccgaatccagcccagattctcctaccagctgcttgggtcacgtcggtggaactcctaaagggatgccttcaaaatgtgtgaataagcttcaatcagactgcccttcccaaagaaaataactataaatgctggaaaaactacaaaacagccacctgaaggcactggcgagtgacaaaagcaagcaaattctggagaagagtcaacacttggaagaagggagctgcactgggtacatggggaaggaacagtgtctctgcatgagaatggccaaagaacaagatacatttccccgtggagagcaatcctagagagagggaagcatgggtcagaataaggtgtactggccccaggtagagacagggtttcaccatgttggcccggctgacctcgaactcctgacctcaggtgatctgcccaccttggcttctcaaagtgctggtattacaaatgagcccattccttgcttgtggtagacctgcaagaacaaacccattgagatggctacagaatgagaagggaagctaatacatggtgtaagaccgtaagcacacacatgcatcaggacaggaactctgtgggataacggcgcacacgacaaacctacataggagaacatcattggcagtgcaggagcatcagacacaacggctctctggcaacttacgggactccataactatgcctggagacaaacctagaacacaaaactcatcctacatggaccacaatacaatgggctttcgggaaccataaacccacacggggcacaaaaatcctgggtagaaagaatgcgaccacgtagaacacggagactcaaaatttacacggtggacttgcgctcactgccattgaaagggatttacaaactatgagtcatatccatttcggaacttgggataacacttacgggagatggcttattaattcaac

SEQ ID NO: 295374 - DNA, 410 bp, Homo sapiens
aaggaaagaaacccaagtatatctttttctatgcaaaggctactggaataagctttttattattttattgagagatctctcacaataatgtgaggctaatttctctgaacaatggcttgttttaataaatattttgcaaatacagctaatacactgtgtggctgactctggtcctcaactctagctgcacattcaaatcacttatggagttcaagaatatataaaatcttgtgtctaaaacctagagattccgatctgtgagtgtggcctggagtggaggctggaggctgattttttacagagcttcacaggtccttctatggacacccaggattgagaatcagtgatccaactcatacttgttaaagaatttggtgatatcatatgcattacaagagtgattgaatgaa

SEQ ID NO: 295375 - DNA, 1051 bp, Homo sapiens
gccagcctaccggcgactaggatgctttcgctttcgctctcgctttccaatactcgggactggggaaaccgggagaatagaagcaggcaaggaccgccgtgggcacggggtgtccccagcgcagccaatcggcttccgaagtaggtgagttgctgcctgaagagaaaagacaaactccagtatctttcattccattggccagacgcgccattccccaagtgagttctgttctccaaccaaagtgctggattccaagggactggaagggaaagtccctaaaaatcacgagttcaggcgtctgagacttggtgggaacggaccttcctcttagtgcccaagcctgttctaatttttaaaaactgatgtctattaagacccaatgttaactttatgaaaatggttcctaaggagattcacatctctgtgtccgaattctgtgtgcagcaaacatcatctcaagtgcgttttcccaactacgcttctttccaggataaaatactctaagtgacaaatgttgagtacattatcaggtatgttcactattgtgagaactgaagccatctacactcacatagcttgccaactacattaacctgacttcttattccattattttcatcaacatacatttactatttcaagaaacttttgccagggaccggaaagttgcaaatatctttattgcttaatccagtatcttcttcaaagatccaaccactcttcaatggaaaacatcaaagaacagtttacattctaagactttgaacctttacctcaaaatcctagccttgttttatctaccaatcctaaacttttacccgtagctgactcaattctaaccaattcccctcattaaatattagacttacaatgggacttcaaaatctcaatacatatagcccaaacttgctcttccctctctgagacaccacttaaattctgtcaagttattgttctccattacctaagtgagcaagaaacttagctttgtcttatcaacaggttgctttgatattactgggagccaacatttgacattcttggaggctcc

SEQ ID NO: 295376 - DNA, 1028 bp, Homo sapiens
gccagcctaccggcgactaggatgctttcgctttcgctctcgctttccaatactcgggactggggaaaccgggagaatagaagcaggtgtccccagcgcagccaatcggcttccgaagtaggtgagttgctgcctgaagagaaaagacaaactccagtatctttcattccattggccagacgcgccattccccaagtgagttctgttctccaaccaaagtgctggattccaagggactggaagggaaagtccctaaaaatcacgagttcaggcgtctgagacttggtgggaacggaccttcctcttagtgcccaagcctgttctaatttttaaaaactgatgtctattaagacccaatgttaactttatgaaaatggttcctaaggagattcacatctctgtgtccgaattctgtgtgcagcaaacatcatctcaagtgcgttttcccaactacgcttctttccaggataaaatactctaagtgacaaatgttgagtacattatcaggtatgttcactattgtgagaactgaagccatctacactcacatagcttgccaactacattaacctgacttcttattccattattttcatcaacatacatttactatttcaagaaacttttgccagggaccggaaagttgcaaatatctttattgcttaatccagtatcttcttcaaagatccaaccactcttcaatggaaaacatcaaagaacagtttacattctaagactttgaacctttacctcaaaatcctagccttgttttatctaccaatcctaaacttttacccgtagctgactcaattctaaccaattcccctcattaaatattagacttacaatgggacttcaaaatctcaatacatatagcccaaacttgctcttccctctctgagacaccacttaaattctgtcaagttattgttctccattacctaagtgagcaagaaacttagctttgtcttatcaacaggttgctttgatattactgggagccaacatttgacattcttggaggctcc

SEQ ID NO: 295377 - DNA, 1220 bp, Homo sapiens
gccagcctaccggcgactaggatgctttcgctttcgctctcgctttccaatactcgggactggggaaaccgggagaatagaagcaggtgtccccagcgcagccaatcggcttccgaagtaggtgagttgctgcctgaagagaaaagacaaactccagtatctttcattccattggccagacgcgccattccccaagtgagttctgttctccaaccaaagtgctggattccaagggactggaagggaaagtccctaaaaatcacgagttcaggcgtctgagacttggtgggaacggaccttcctcttaggtgagttactctttggttctggggctgacctggagttttgccaggattcattggccgcagcaggatgctggtggggacagggtaaataaaatctgcactcctgcgggcttttattgttgaaaggggcactgacgctctccctggaaacttaaaaagaacagccaagtgaacggatgtgtctttcttttgcagtgcccaagcctgttctaatttttaaaaactgatgtctattaagacccaatgttaactttatgaaaatggttcctaaggagattcacatctctgtgtccgaattctgtgtgcagcaaacatcatctcaagtgcgttttcccaactacgcttctttccaggataaaatactctaagtgacaaatgttgagtacattatcaggtatgttcactattgtgagaactgaagccatctacactcacatagcttgccaactacattaacctgacttcttattccattattttcatcaacatacatttactatttcaagaaacttttgccagggaccggaaagttgcaaatatctttattgcttaatccagtatcttcttcaaagatccaaccactcttcaatggaaaacatcaaagaacagtttacattctaagactttgaacctttacctcaaaatcctagccttgttttatctaccaatcctaaacttttacccgtagctgactcaattctaaccaattcccctcattaaatattagacttacaatgggacttcaaaatctcaatacatatagcccaaacttgctcttccctctctgagacaccacttaaattctgtcaagttattgttctccattacctaagtgagcaagaaacttagctttgtcttatcaacaggttgctttgatattactgggagccaacatttgacattcttggaggctcc

SEQ ID NO: 295378 - DNA, 544 bp, Homo sapiens
tttttttgaaaaagaaaaatatttattttcagcaagaccaaagtcccaagtgggggcaggtgccaaatttgcccccgccaccagagggcctaggcccacaggaagcctgaagccaaattcaggcgtggaaggaggggagccaccagtggggcgggacagtcacttgtactgaggagagagcggggggacaagtggagcagtgcagacactcagcatcttgtcgatgtccacctgggttgacttatccacctcggccttgtggtcactcacccccaagctgggcaagcccccaggctcctctccagcctcctctccgaggggagccagggcatgggtgggggtcactagtggactgggacagggcaaagcgaggcctgggcccagctcacctgccaagggcagcaaggcctgcagttgctccacacctccctcctcgggaaccggggccagctctgcctctgcctccacctcagcctccccgtcccccttccctgcctggttcagctcagggttgcaatagttgacgtactggtacagcggccgc

SEQ ID NO: 295379 - DNA, 1309 bp, Homo sapiens
ggacaagagcactaacacttcttagtttcagggtaaaaacttccaaagttggaaaactcctatgcctaaggctttggaagggaaagtctatgtttctcttctttcctcagccttattcctaaggctttgagagcttttcaggtgccctggaaggcagccttatgctccagccttgggaggtagtatagctgagcacttaagcaagctctggactcagacaattctgggcttcaatctcagatttgtgaccctgggctttacctctgtttttgtatctgtaacgtggaaacagtcttcagaagaacaggaagaactaaatgagataacatgtacagttcttactacacaaaaagctcatagtacttaatagtagcttttttttttttgagatggaatctcactctgttggctaggctggagtgcagtggcacaatctcgactcactgcaacctccacctcctaggttcaagcaattctcagcctcagcctcctgagtagctgggattacaggcacataccaccacatctggctaattttttgtatttttagtagagacgggtttcaccatattggccaggctggtcttaaactcctggcctcatgtgatccgcctgccttggcctcccaaagtgtgattacaggcgtgagccaccacacttggcccaatagtagcttattctaatcccagctctgccactgacttgctatggcactgctgttccttaagtatctctcatctaatgggatcagttatctgtgttcaccaaacagaactaagcgcaagactgaattttaaaattcccatgcaaaggctttgaaagatacagtcctccacttccccatacccaggcctgagagttattcattgagtttcttgtacactgcttctctaccccagctcatatactcataaccttccccctaccctcaggtgtgggttttgctaccaggcaggtggccagcatgaccaagcctaccacaatcatcgaaaagaatggggacattctcaccctaaaaacacacagcaccttcaagaacacagagatcagctttaagttgggggtggagttcgatgagacaacagcagatgacaggaaggtcaaggtaagtcagggaaacaggggtggggaatggagagtgctgagactctaaaagagaataggctggtagtcttggctccctggtattgcaccctgaggggcagactatcatggggaatttaaatgaaacaagattcataaagcctgtgtagtgctggaatgccactgatgctaaatacatgtcagttctgtcctcttgttttcttcc

SEQ ID NO: 295380 - DNA, 692 bp, Homo sapiens
cagtccgttcgtcggagcccttgcacgcctgctctcttgtagcttctctcagcctagcccagcatcactatggtggacgctttcctgggcacctggaagctagtggacagcaagaatttcgatgactacatgaagtcactcgatggaaaaactgcaactcagaaatgtaaagtgagtcgaccaaggctaaagcggcaaaaccactatactttataacacagagtttggcactatttccactttgttctctctcaaagatgaaggctcaggaggagggaagataaaaacaaatcactggagagtcctggcatgctggaacatggactctagctagcaagaagggctcaaggaggtggccttctcctagacctcaactttgatgcaaaagctgttttgcagcctgaacaaagacaatccaatcctccagcaaatggcgtcattttccctacgtgtctagccttgagctacagaacaaaagaacaatcacatccgaagttgtagttcgcctggttgcggtggctcacgcctgtgatcccagcactttgggaggccaaggtgggtggatcacctgaggtcaggaggtcgagactagcctgaccaacatgaagaaaccccatctctactaaaaatacaaaattagctgggcgtggtggcacatgcctgtaatcccagctactcgggaggctgaggca

SEQ ID NO: 295381 - DNA, 450 bp, Homo sapiens
caacgtcacgactgggaaaacttgatggggcttccccaggtttggctattgaactgtcacttcaggcccatcctacactgaaagctcttgggtctggctgttctctgtgaaatgctgtagtctctccctttccagaattcaggttcagggcacagaacccaggcttgtaccatggtggtgggagaaaatgaccactggccaagaggactgctgacctgtgcaccaggctagtacttatgactacaaattcttactgcttctctaatcaactctgagggaagagggcatctgatcattacaaaagggagggcttataagtgatctcccaagaaggcagtgatctgctagtgcctttggctctgtacctctgctgggcatctctccaaggtctaaggtaacatattaaatgtttttgtcagctaatgcaggctcagtgactttaagtctgta

SEQ ID NO: 295382 - DNA, 1377 bp, Homo sapiens
cagtccgttcgtcggagcccttgcacgcctgctctcttgtagcttctctcagcctagcccagcatcactatggtggacgctttcctgggcacctggaagctagtggacagcaagaatttcgatgactacatgaagtcactcggtgtgggttttgctaccaggcaggtggccagcatgaccaagcctaccacaatcatcgaaaagaatggggacattctcaccctaaaaacacacagcaccttcaagaacacagagatcagctttaagttgggggtggagttcgatgagacaacagcagatgacaggaaggtcaagtccattgtgacactggatggagggaaacttgttcacctgcagaaatgggacgggcaagagaccacacttgtgcgggagctaattgatggaaaactcatcctgacactcacccacggcactgcagtttgcactcgcacttatgagaaagaggcatgacctgactgcactgttgctgactactactctgccaatcggctacccctcgactcagcaccacattgcctcatttcttcctctgcattttgtacaaatccacgaattcttctggggtcaggtgccactgaccgggatccagttccagttcccatggtgtatgtggttttttttttttttttttaactgcactcatagggtgctctgaggtcaataaagcagagccaaggccacccagttgcctttttgcctttggtaacataactctgggagtcttggtttatcctgtgtgtcagagagtgggcagaaataacggcctgaaggttactgaggaagaagcactggatgggagactgaaatggacagtctcggagcctgttaatcagctgatcaccttacacatttaataataaaagagctgtacctacacgttgcctttacactgccccccctccatggtcaaatgacctagttcagtcagtgatggggcttccccaggtttggctattgaactgtcacttcaggcccatcctacactgaaagctcttgggtctggctgttctctgtgaaatgctgtagtctctccctttccagaattcaggttcagggcacagaacccaggcttgtaccatggtggtgggagaaaatgaccactggccaagaggactgctgacctgtgcaccaggctagtacttatgactacaaattcttactgcttctctaatcaactctgagggaagagggcatctgatcattacaaaagggagggcttataagtgatctcccaagaaggcagtgatctgctagtgcctttggctctgtacctctgctgggcatctctccaaggtctaaggtaacatattaaatgtttttgtcagctaatgcaggctcagtgactttaagtctgta

SEQ ID NO: 295383 - DNA, 2167 bp, Homo sapiens
ggacaagagcactaacacttcttagtttcagggtaaaaacttccaaagttggaaaactcctatgcctaaggctttggaagggaaagtctatgtttctcttctttcctcagccttattcctaaggctttgagagcttttcaggtgccctggaaggcagccttatgctccagccttgggaggtagtatagctgagcacttaagcaagctctggactcagacaattctgggcttcaatctcagatttgtgaccctgggctttacctctgtttttgtatctgtaacgtggaaacagtcttcagaagaacaggaagaactaaatgagataacatgtacagttcttactacacaaaaagctcatagtacttaatagtagcttttttttttttgagatggaatctcactctgttggctaggctggagtgcagtggcacaatctcgactcactgcaacctccacctcctaggttcaagcaattctcagcctcagcctcctgagtagctgggattacaggcacataccaccacatctggctaattttttgtatttttagtagagacgggtttcaccatattggccaggctggtcttaaactcctggcctcatgtgatccgcctgccttggcctcccaaagtgtgattacaggcgtgagccaccacacttggcccaatagtagcttattctaatcccagctctgccactgacttgctatggcactgctgttccttaagtatctctcatctaatgggatcagttatctgtgttcaccaaacagaactaagcgcaagactgaattttaaaattcccatgcaaaggctttgaaagatacagtcctccacttccccatacccaggcctgagagttattcattgagtttcttgtacactgcttctctaccccagctcatatactcataaccttccccctaccctcaggtgtgggttttgctaccaggcaggtggccagcatgaccaagcctaccacaatcatcgaaaagaatggggacattctcaccctaaaaacacacagcaccttcaagaacacagagatcagctttaagttgggggtggagttcgatgagacaacagcagatgacaggaaggtcaagtccattgtgacactggatggagggaaacttgttcacctgcagaaatgggacgggcaagagaccacacttgtgcgggagctaattgatggaaaactcatcctgacactcacccacggcactgcagtttgcactcgcacttatgagaaagaggcatgacctgactgcactgttgctgactactactctgccaatcggctacccctcgactcagcaccacattgcctcatttcttcctctgcattttgtacaaatccacgaattcttctggggtcaggtgccactgaccgggatccagttccagttcccatggtgtatgtggttttttttttttttttttaactgcactcatagggtgctctgaggtcaataaagcagagccaaggccacccagttgcctttttgcctttggtaacataactctgggagtcttggtttatcctgtgtgtcagagagtgggcagaaataacggcctgaaggttactgaggaagaagcactggatgggagactgaaatggacagtctcggagcctgttaatcagctgatcaccttacacatttaataataaaagagctgtacctacacgttgcctttacactgccccccctccatggtcaaatgacctagttcagtcagtgatggggcttccccaggtttggctattgaactgtcacttcaggcccatcctacactgaaagctcttgggtctggctgttctctgtgaaatgctgtagtctctccctttccagaattcaggttcagggcacagaacccaggcttgtaccatggtggtgggagaaaatgaccactggccaagaggactgctgacctgtgcaccaggctagtacttatgactacaaattcttactgcttctctaatcaactctgagggaagagggcatctgatcattacaaaagggagggcttataagtgatctcccaagaaggcagtgatctgctagtgcctttggctctgtacctctgctgggcatctctccaaggtctaaggtaacatattaaatgtttttgtcagctaatgcaggctcagtgactttaagtctgta

SEQ ID NO: 295384 - DNA, 1397 bp, Homo sapiens
gaaggtcgctagcactagtcgtccggcgcgcgggtccattctctcagtgaacctgcatcatcgactgtggcgtagcgctatcctggtcattgagtagatgtttgtggtctgcaccaataacgatggctccggtgaaagatcagtcggtgctggagtcaagtccaccatggcagttcgtgacggtcatgtacctggactctatcaaaaatggtgtccaaagcagagctgcgactttctcatcctgacccacgaaccggcacttcaagaacacagagatcagctttaagttgggggtggagttcgatgagacaacagcagatgacaggaaggtcaagtccattgtgacactggatggagggaaacttgttcacctgcagaaatgggacgggcaagagaccacacttgtgcgggagctaattgatggaaaactcatcctgacactcacccacggcactgcagtttgcactcgcacttatgagaaagaggcatgacctgactgcactgttgctgactactactctgccaatcggctacccctcgactcagcaccacattgcctcatttcttcctctgcattttgtacaaatccacgaattcttctggggtcaggtgccactgaccgggatccagttccagttcccatggtgtatgtggttttttttttttttttttaactgcactcatagggtgctctgaggtcaataaagcagagccaaggccacccagttgcctttttgcctttggtaacataactctgggagtcttggtttatcctgtgtgtcagagagtgggcagaaataacggcctgaaggttactgaggaagaagcactggatgggagactgaaatggacagtctcggagcctgttaatcagctgatcaccttacacatttaataataaaagagctgtacctacacgttgcctttacactgccccccctccatggtcaaatgacctagttcagtcagtgatggggcttccccaggtttggctattgaactgtcacttcaggcccatcctacactgaaagctcttgggtctggctgttctctgtgaaatgctgtagtctctccctttccagaattcaggttcagggcacagaacccaggcttgtaccatggtggtgggagaaaatgaccactggccaagaggactgctgacctgtgcaccaggctagtacttatgactacaaattcttactgcttctctaatcaactctgagggaagagggcatctgatcattacaaaagggagggcttataagtgatctcccaagaaggcagtgatctgctagtgcctttggctctgtacctctgctgggcatctctccaaggtctaaggtaacatattaaatgtttttgtcagctaatgcaggctcagtgactttaagtctgta

SEQ ID NO: 295385 - DNA, 1109 bp, Homo sapiens
agtggggggtggagggggcgagggacagggagatgacaggaaggtcatccattgtgacactggatggagggaaacttgttcacctgcagaaatgggacgggcaagagaccacacttgtgcgggagctaattgatggaaaactcatcctgacactcacccacggcactgcagtttgcactcgcacttatgagaaagaggcatgacctgactgcactgttgctgactactactctgccaatcggctacccctcgactcagcaccacattgcctcatttcttcctctgcattttgtacaaatccacgaattcttctggggtcaggtgccactgaccgggatccagttccagttcccatggtgtatgtggttttttttttttttttttaactgcactcatagggtgctctgaggtcaataaagcagagccaaggccacccagttgcctttttgcctttggtaacataactctgggagtcttggtttatcctgtgtgtcagagagtgggcagaaataacggcctgaaggttactgaggaagaagcactggatgggagactgaaatggacagtctcggagcctgttaatcagctgatcaccttacacatttaataataaaagagctgtacctacacgttgcctttacactgccccccctccatggtcaaatgacctagttcagtcagtgatggggcttccccaggtttggctattgaactgtcacttcaggcccatcctacactgaaagctcttgggtctggctgttctctgtgaaatgctgtagtctctccctttccagaattcaggttcagggcacagaacccaggcttgtaccatggtggtgggagaaaatgaccactggccaagaggactgctgacctgtgcaccaggctagtacttatgactacaaattcttactgcttctctaatcaactctgagggaagagggcatctgatcattacaaaagggagggcttataagtgatctcccaagaaggcagtgatctgctagtgcctttggctctgtacctctgctgggcatctctccaaggtctaaggtaacatattaaatgtttttgtcagctaatgcaggctcagtgactttaagtctgta

SEQ ID NO: 295386 - DNA, 967 bp, Homo sapiens
cagtccgttcgtcggagcccttgcacgcctgctctcttgtagcttctctcagcctagcccagcatcactatggtggacgctttcctgggcacctggaagctagtggacagcaagaatttcgatgactacatgaagtcactcggtgtgggttttgctaccaggcaggtggccagcatgaccaagcctaccacaatcatcgaaaagaatggggacattctcaccctaaaaacacacagcaccttcaagaacacagagatcagctttaagttgggggtggagttcgatgagacaacagcagatgacaggaaggtcaagtccattgtgacactggatggagggaaacttgttcacctgcagaaatgggacgggcaagagaccacacttgtgcgggagctaattgatggaaaactcatcctgatggaaaaactgcaactcagaaatgtaaagtgagtcgaccaaggctaaagcggcaaaaccactatactttataacacagagtttggcactatttccactttgttctctctcaaagatgaaggctcaggaggagggaagataaaaacaaatcactggagagtcctggcatgctggaacatggactctagctagcaagaagggctcaaggaggtggccttctcctagacctcaactttgatgcaaaagctgttttgcagcctgaacaaagacaatccaatcctccagcaaatggcgtcattttccctacgtgtctagccttgagctacagaacaaaagaacaatcacatccgaagttgtagttcgcctggttgcggtggctcacgcctgtgatcccagcactttgggaggccaaggtgggtggatcacctgaggtcaggaggtcgagactagcctgaccaacatgaagaaaccccatctctactaaaaatacaaaattagctgggcgtggtggcacatgcctgtaatcccagctactcgggaggctgaggca

SEQ ID NO: 295387 - DNA, 230 bp, Homo sapiens
ttcataaagcctgtgtagtgctggaatgccactgatgctaaatacatgtcagttctgtcctcttgttttcttccctcccttcttgggattcatctattgtctgcctcggaatgggcagcacagagccaggatgttcttctgacctcagtatctactccagctccagctgggtgaccctgtgcaaggtatgcagtagctctaggtttctttccccttccatagatggcaga

SEQ ID NO: 295388 - DNA, 1410 bp, Homo sapiens
cagtccgttcgtcggagcccttgcacgcctgctctcttgtagcttctctcagcctagcccagcatcactatggtggacgctttcctgggcacctggaagctagtggacagcaagaatttcgatgactacatgaagtcactcgctcatatactcataaccttccccctaccctcaggtgtgggttttgctaccaggcaggtggccagcatgaccaagcctaccacaatcatcgaaaagaatggggacattctcaccctaaaaacacacagcaccttcaagaacacagagatcagctttaagttgggggtggagttcgatgagacaacagcagatgacaggaaggtcaagtccattgtgacactggatggagggaaacttgttcacctgcagaaatgggacgggcaagagaccacacttgtgcgggagctaattgatggaaaactcatcctgacactcacccacggcactgcagtttgcactcgcacttatgagaaagaggcatgacctgactgcactgttgctgactactactctgccaatcggctacccctcgactcagcaccacattgcctcatttcttcctctgcattttgtacaaatccacgaattcttctggggtcaggtgccactgaccgggatccagttccagttcccatggtgtatgtggttttttttttttttttttaactgcactcatagggtgctctgaggtcaataaagcagagccaaggccacccagttgcctttttgcctttggtaacataactctgggagtcttggtttatcctgtgtgtcagagagtgggcagaaataacggcctgaaggttactgaggaagaagcactggatgggagactgaaatggacagtctcggagcctgttaatcagctgatcaccttacacatttaataataaaagagctgtacctacacgttgcctttacactgccccccctccatggtcaaatgacctagttcagtcagtgatggggcttccccaggtttggctattgaactgtcacttcaggcccatcctacactgaaagctcttgggtctggctgttctctgtgaaatgctgtagtctctccctttccagaattcaggttcagggcacagaacccaggcttgtaccatggtggtgggagaaaatgaccactggccaagaggactgctgacctgtgcaccaggctagtacttatgactacaaattcttactgcttctctaatcaactctgagggaagagggcatctgatcattacaaaagggagggcttataagtgatctcccaagaaggcagtgatctgctagtgcctttggctctgtacctctgctgggcatctctccaaggtctaaggtaacatattaaatgtttttgtcagctaatgcaggctcagtgactttaagtctgta

SEQ ID NO: 295389 - DNA, 1444 bp, Homo sapiens
cagtccgttcgtcggagcccttgcacgcctgctctcttgtagcttctctcagcctagcccagcatcactatggtggacgctttcctgggcacctggaagctagtggacagcaagaatttcgatgactacatgaagtcactcggtgtgggttttgctaccaggcaggtggccagcatgaccaagcctaccacaatcatcgaaaagaatggggacattctcaccctaaaaacacacagcaccttcaagaacacagagatcagctttaagttgggggtggagttcgatgagacaacagcagatgacaggaaggtcaagcacagagccaggatgttcttctgacctcagtatctactccagctccagctgggtgaccctgtgcaagtccattgtgacactggatggagggaaacttgttcacctgcagaaatgggacgggcaagagaccacacttgtgcgggagctaattgatggaaaactcatcctgacactcacccacggcactgcagtttgcactcgcacttatgagaaagaggcatgacctgactgcactgttgctgactactactctgccaatcggctacccctcgactcagcaccacattgcctcatttcttcctctgcattttgtacaaatccacgaattcttctggggtcaggtgccactgaccgggatccagttccagttcccatggtgtatgtggttttttttttttttttttaactgcactcatagggtgctctgaggtcaataaagcagagccaaggccacccagttgcctttttgcctttggtaacataactctgggagtcttggtttatcctgtgtgtcagagagtgggcagaaataacggcctgaaggttactgaggaagaagcactggatgggagactgaaatggacagtctcggagcctgttaatcagctgatcaccttacacatttaataataaaagagctgtacctacacgttgcctttacactgccccccctccatggtcaaatgacctagttcagtcagtgatggggcttccccaggtttggctattgaactgtcacttcaggcccatcctacactgaaagctcttgggtctggctgttctctgtgaaatgctgtagtctctccctttccagaattcaggttcagggcacagaacccaggcttgtaccatggtggtgggagaaaatgaccactggccaagaggactgctgacctgtgcaccaggctagtacttatgactacaaattcttactgcttctctaatcaactctgagggaagagggcatctgatcattacaaaagggagggcttataagtgatctcccaagaaggcagtgatctgctagtgcctttggctctgtacctctgctgggcatctctccaaggtctaaggtaacatattaaatgtttttgtcagctaatgcaggctcagtgactttaagtctgta

SEQ ID NO: 295390 - DNA, 989 bp, Homo sapiens
cgggtcggtggcgtctggcgtggagagtttggggatctacagcagccaaaggcttgtccctgactttatatggctgcgcctggcgagcgactgagtcgtccgtgaggaaaaagaggcgaggcttttccgagatcgtctcagcgatggcgcttcggtcgcagttttgggggttctcggtttgcaggaaccctgggtgcaggttcgcagccctgtcaaccagctccgagccggcagcgaaacctgaagtggaccctgtggaaaatgaagctgtcgccccagaattcaccaaccggaacccccggaacctggagcttttatctgtagccaggaaagagcggggctggcggacggtgtttccctcccgtgagttctggcacaggttgcgagttataaggactcagcatcatgtagaagcacttgtggagcatcagaatggcaaggttgtggtttcggcctccactcgtgagtgggctattaaaaagcacctttatagtaccagaaatgtggtggcttgtgagagtataggacgagtgctggcacagagatgcttagaggcgggaatcaacttcatggtctaccaaccaaccccgtgggaggcagcctcagactcgatgaaacgactacaaagtgccatgacagaaggtggtgtggttctacgggaacctcagagaatctatgaataaatggaagcattaattgttttgaacatgtaaatataaatctgtcagccactacagccatcaaaagagagcatctggaagaacagccagcttggaagttttacagcaataatgttgcagtggaatattatttgtagttaaggtcatcctcctcccctttctgtttttttaaatcaagaactacgttctgcccctctcttgggcttcagaagcatctaagaaaagcagtcatcaattataattaactttcaaagggcaagtcagaagttgtttataaattacaaaataaaggcatattatgaactctta

SEQ ID NO: 295391 - DNA, 818 bp, Homo sapiens
cgggtcggtggcgtctggcgtggagagtttggggatctacagcagccaaaggcttgtccctgactttatatggctgcgcctggcgagcgactgagtcgtccgtgaggaaaaagaggcgaggcttttccgagatcgtctcagcgatggcgcttcggtcgcagttttgggggttctcggtttgcaggaaccctgggtgcaggttcgcagccctgtcaaccagctccgagccggcagcgaaacctgaagtggaccctgtggaaaatgaagctgtcgccccagaattcaccaaccggaacccccggaacctggagcttttatctgtagccaggaaagagcggggctggcggacggtgtttccctcccgtgagttctggcacaggttgcgagttataaggactcagcatcatgtagaagcacttgtggagcatcagaatggcaagatgaaacgactacaaagtgccatgacagaaggtggtgtggttctacgggaacctcagagaatctatgaataaatggaagcattaattgttttgaacatgtaaatataaatctgtcagccactacagccatcaaaagagagcatctggaagaacagccagcttggaagttttacagcaataatgttgcagtggaatattatttgtagttaaggtcatcctcctcccctttctgtttttttaaatcaagaactacgttctgcccctctcttgggcttcagaagcatctaagaaaagcagtcatcaattataattaactttcaaagggcaagtcagaagttgtttataaattacaaaataaaggcatattatgaactctta

SEQ ID NO: 295392 - DNA, 762 bp, Homo sapiens
cctcacatcagtccatagggtagggactagtactctcattctatacagaaataaactgaggcttacttgcccagagtcagtgtatggtggatttcaaacccagggtgactgattctgtagtccatgatgtcagccactgtatttcctgttcatatattgacatcttgtccatataatattttgaaatgctgctgaaccttgacatctctacatttcctttttacttacatcattattaagatcactttctgaaaaaccgttgtaggctgggaagttagcaagaacaaatcaatttatttctgtcttttggaaggtgaaagtattttcagcctactcgtgctgctgacttaatcttttccttttttttctgattttcaaaaccagatgaaacgactacaaagtgccatgacagaaggtggtgtggttctacgggaacctcagagaatctatgaataaatggaagcattaattgttttgaacatgtaaatataaatctgtcagccactacagccatcaaaagagagcatctggaagaacagccagcttggaagttttacagcaataatgttgcagtggaatattatttgtagttaaggtcatcctcctcccctttctgtttttttaaatcaagaactacgttctgcccctctcttgggcttcagaagcatctaagaaaagcagtcatcaattataattaactttcaaagggcaagtcagaagttgtttataaattacaaaataaaggcatattatgaactctta

SEQ ID NO: 295393 - DNA, 685 bp, Homo sapiens
gatggacctactctttttctggtaaatggtcctaaaataaaacctggcgtttaacatggacactcagggggtcgccctgaaacaaaagggggtgcgaggcgtggcccgcacgtgcgagcccgggaggcccgctttcccgcggagggcgcgtttccaacgccgccccggacaccacatccacgcgttgccggtctcaaaaccctgccgcgcgcggcggggctcctcctcgctgtgggaaaagtggggccacagcgccctgccccagagaacggcgggtgggctgggtccggctgcggggccccgaggccctttctgcggaggtaaaggagagaaacgagggcagccggggtccggtcgcggtgggactcggccctccccggccgcaaacccgacccaggcccggcccgcccttaccgttttgggagcggatcgtttccccagtgctgcggtcaccgaacacggacaaaggcccctccatcttgacggcagcgatacacgtcgaattctgcttacaccgcgggcaaccagtatcgcggcccctcggccgaccggcgaccacagcagtggctgcgacggcgtggagcgtacccgagcgatgtcccaggagctactgggtaacacaccaccccacccgcttcccggctgccccggcccggccgcggggcacggcgggaaggaaaaagag

SEQ ID NO: 295394 - DNA, 1004 bp, Homo sapiens
tttttgactactctttcgcctactcctactatgctgcgagaagacgacagaatgggggagctggggtgtaactggaggggcgggcccttctccaagttagagttggggttctgagcgagtcgtgcgttttaggtttagtgtcttttccttgtccctgctcggggagcgtgaggcagatcggccggctttgctccaggcctcaggagtggtgcaggttcgcagccctgtcaaccagctccgagccggcagcgaaacctgaagtggaccctgtggaaaatgaagctgtcgccccagaattcaccaaccggaacccccggaacctggagcttttatctgtagccaggaaagagcggggctggcggacggtgtttccctcccgtgagttctggcacaggttgcgagttataaggactcagcatcatgtagaagcacttgtggagcatcagaatggcaaggttgtggtttcggcctccactcgtgagtgggctattaaaaagcacctttatagtaccagaaatgtggtggcttgtgagagtataggacgagtgctggcacagagatgcttagaggcgggaatcaacttcatggtctaccaaccaaccccgtgggaggcagcctcagactcgatgaaacgactacaaagtgccatgacagaaggtggtgtggttctacgggaacctcagagaatctatgaataaatggaagcattaattgttttgaacatgtaaatataaatctgtcagccactacagccatcaaaagagagcatctggaagaacagccagcttggaagttttacagcaataatgttgcagtggaatattatttgtagttaaggtcatcctcctcccctttctgtttttttaaatcaagaactacgttctgcccctctcttgggcttcagaagcatctaagaaaagcagtcatcaattataattaactttcaaagggcaagtcagaagttgtttataaattacaaaataaaggcatattatgaactctta

SEQ ID NO: 295395 - DNA, 1411 bp, Homo sapiens
gatggacctactctttttctggtaaatggtcctaaaataaaacctggcgtttaacatggacactcagggggtcgccctgaaacaaaagggggtgcgaggcgtggcccgcacgtgcgagcccgggaggcccgctttcccgcggagggcgcgtttccaacgccgccccggacaccacatccacgcgttgccggtctcaaaaccctgccgcgcgcggcggggctcctcctcgctgtgggaaaagtggggccacagcgccctgccccagagaacggcgggtgggctgggtccggctgcggggccccgaggccctttctgcggaggtaaaggagagaaacgagggcagccggggtccggtcgcggtgggactcggccctccccggccgcaaacccgacccaggcccggcccgcccttaccgttttgggagcggatcgtttccccagtgctgcggtcaccgaacacggacaaaggcccctccatcttgacggcagcgatacacgtcgaattctgcttacaccgcgggcaaccagtatcgcggcccctcggccgaccggcgaccacagcagtggctgcgacggcgtggagcgtacccgagcgatgtcccaggagctactggggtgcaggttcgcagccctgtcaaccagctccgagccggcagcgaaacctgaagtggaccctgtggaaaatgaagctgtcgccccagaattcaccaaccggaacccccggaacctggagcttttatctgtagccaggaaagagcggggctggcggacggtgtttccctcccgtgagttctggcacaggttgcgagttataaggactcagcatcatgtagaagcacttgtggagcatcagaatggcaaggttgtggtttcggcctccactcgtgagtgggctattaaaaagcacctttatagtaccagaaatgtggtggcttgtgagagtataggacgagtgctggcacagagatgcttagaggcgggaatcaacttcatggtctaccaaccaaccccgtgggaggcagcctcagactcgatgaaacgactacaaagtgccatgacagaaggtggtgtggttctacgggaacctcagagaatctatgaataaatggaagcattaattgttttgaacatgtaaatataaatctgtcagccactacagccatcaaaagagagcatctggaagaacagccagcttggaagttttacagcaataatgttgcagtggaatattatttgtagttaaggtcatcctcctcccctttctgtttttttaaatcaagaactacgttctgcccctctcttgggcttcagaagcatctaagaaaagcagtcatcaattataattaactttcaaagggcaagtcagaagttgtttataaattacaaaataaaggcatattatgaactctta

SEQ ID NO: 295396 - DNA, 1166 bp, Homo sapiens
gctgggaagaggttgaaccttcgcctcaaacgatgttgcgcagacgcagtgggccattctagtgccttctagaaaaggttgtaagaagggtggagcttggagctggggtgtaactggaggggcgggcccttctccaagttagagttggggttctgagcgagtcgtgcgttttaggtttagtgtcttttccttgtccctgctcggggagcgtgaggcagatcggccggctttgctccaggcctcaggagtgtcactcgcctgggcttgcacagtacattggaacgtgcgggttctattttgtattcgacgtgccggatcgaaatagagctcgcggcactgcgaagaccacagtaggaagttaaggacgggggtgcaggttcgcagccctgtcaaccagctccgagccggcagcgaaacctgaagtggaccctgtggaaaatgaagctgtcgccccagaattcaccaaccggaacccccggaacctggagcttttatctgtagccaggaaagagcggggctggcggacggtgtttccctcccgtgagttctggcacaggttgcgagttataaggactcagcatcatgtagaagcacttgtggagcatcagaatggcaaggttgtggtttcggcctccactcgtgagtgggctattaaaaagcacctttatagtaccagaaatgtggtggcttgtgagagtataggacgagtgctggcacagagatgcttagaggcgggaatcaacttcatggtctaccaaccaaccccgtgggaggcagcctcagactcgatgaaacgactacaaagtgccatgacagaaggtggtgtggttctacgggaacctcagagaatctatgaataaatggaagcattaattgttttgaacatgtaaatataaatctgtcagccactacagccatcaaaagagagcatctggaagaacagccagcttggaagttttacagcaataatgttgcagtggaatattatttgtagttaaggtcatcctcctcccctttctgtttttttaaatcaagaactacgttctgcccctctcttgggcttcagaagcatctaagaaaagcagtcatcaattataattaactttcaaagggcaagtcagaagttgtttataaattacaaaataaaggcatattatgaactctta

SEQ ID NO: 295397 - DNA, 935 bp, Homo sapiens
cgggtcggtggcgtctggcgtggagagtttggggatctacagcagccaaaggcttgtccctgactttatatggctgcgcctggcgagcgactgagtcgtccgtgaggaaaaagaggcgaggcttttccgagatcgtctcagcgatggcgcttcggtcgcagttttgggggttctcggtttgcaggaaccctgggtgcaggttcgcagccctgtcaaccagctccgagccggcagcgaaacctgaagtggaccctgtggttttatctgtagccaggaaagagcggggctggcggacggtgtttccctcccgtgagttctggcacaggttgcgagttataaggactcagcatcatgtagaagcacttgtggagcatcagaatggcaaggttgtggtttcggcctccactcgtgagtgggctattaaaaagcacctttatagtaccagaaatgtggtggcttgtgagagtataggacgagtgctggcacagagatgcttagaggcgggaatcaacttcatggtctaccaaccaaccccgtgggaggcagcctcagactcgatgaaacgactacaaagtgccatgacagaaggtggtgtggttctacgggaacctcagagaatctatgaataaatggaagcattaattgttttgaacatgtaaatataaatctgtcagccactacagccatcaaaagagagcatctggaagaacagccagcttggaagttttacagcaataatgttgcagtggaatattatttgtagttaaggtcatcctcctcccctttctgtttttttaaatcaagaactacgttctgcccctctcttgggcttcagaagcatctaagaaaagcagtcatcaattataattaactttcaaagggcaagtcagaagttgtttataaattacaaaataaaggcatattatgaactctta

SEQ ID NO: 295398 - DNA, 1470 bp, Homo sapiens
cgggtcggtggcgtctggcgtggagagtttggggatctacagcagccaaaggcttgtccctgactttatatggctgcgcctggcgagcgactgagtcgtccgtgaggaaaaagaggcgaggcttttccgagatcgtctcagcgatggcgcttcggtcgcagttttgggggttctcggtttgcaggaaccctgggtgcaggttcgcagccctgtcaaccagctccgagccggcagcgaaacctgaagtggaccctgtggaaaatgaagctgtcgccccagaattcaccaaccggaacccccggaacctggagcttttatctgtagccaggaaagagcggggctggcggacggtgtttccctcccgtgagttctggcacaggttgcgagttataaggactcagcatcatgtagaagcacttgtggagcatcagaatggcaaggttgtggtttcggcctccactcgtgagtgggctattaaaaagcacctttatagtaccagaaatgtggtggcttgtgagagtataggacgagtgctggcacagagatgcttagaggcgggaatcaacttcatggtctaccaaccaaccccgtgggaggcagcctcagactcgatgaaacgactacaaagtgccatgacagaaggtggtgtggttctacgggaacctcagagaatctatgaataaatggaagcattaattgttttgaacatgtaaatataaatctgtcagccactacagccatcaaaagagagcatctggaagaacagccagcttggaagttttacagcaataatgttgcagtggaatattatttgtagttaaggtcatcctcctcccctttctgtttttttaaatcaagaactacgttctgcccctctcttgggcttcagaagcatctaagaaaagcagtcatcaattataattaactttcaaagggcaagtcagaagttgtttataaattacaaaataaaggcatattatgaactcttattttctggttatatgacattgtctgagctcactgtggcagtggagcacatatgaggttgatgtaaagcacttattactgtgtctagttcatggcgagtgatctcagtgaatgacagttgtttgctgctcggagtgtggggtgttttttaaaataggaaatgtcagtatcaatctaatattatagaacagtcagtatgtgaaaatgaaaggaccaaatgccaacctcacttggactcttggttcccaacagtaagagaaacaaatttgaaagaggaaggaggtggcatcaggagctgaaagcagaggtggaaatggttggggttagtgggcgctcaatttgccatgaagtgaacattttattagataggagatgaaacttgaaatgcatgcaagttaatctaaaatttgagcttgggtagatgggaatcatggcagttctctgaaaggagctgattaaggtgttaatttttggctatttgat

SEQ ID NO: 295399 - DNA, 552 bp, Homo sapiens
agttcgacggagactctcacaagctcacagtgggctattaaaaagcacctttatagtaccagaaatgtggtggcttgtgagagtataggacgagtgctggcacagagatgcttagaggcgggaatcaacttcatggtctaccaaccaaccccgtgggaggcagcctcagactcgatgaaacgactacaaagtgccatgacagaaggtggtgtggttctacgggaacctcagagaatctatgaataaatggaagcattaattgttttgaacatgtaaatataaatctgtcagccactacagccatcaaaagagagcatctggaagaacagccagcttggaagttttacagcaataatgttgcagtggaatattatttgtagttaaggtcatcctcctcccctttctgtttttttaaatcaagaactacgttctgcccctctcttgggcttcagaagcatctaagaaaagcagtcatcaattataattaactttcaaagggcaagtcagaagttgtttataaattacaaaataaaggcatattatgaactctta

SEQ ID NO: 295400 - DNA, 923 bp, Homo sapiens
cgggtcggtggcgtctggcgtggagagtttggggatctacagcagccaaaggcttgtccctgactttatatggctgcgcctggcgagcgactgagtcgtccgtgaggaaaaagaggcgaggcttttccgagatcgtctcagcgatggcgcttcggtcgcagttttgggggttctcggtttgcaggaaccctgggtgcaggttcgcagccctgtcaaccagctccgagccggcagcgaaacctgaagtggaccctgtggaaaatgaagctgtcgccccagaattcaccaaccggaacccccggaacctggagcttttatctgtagccaggaaagagcggggctggcggacggtgtttccctcccgtgagttctggcacaggttgcgagttataaggactcagcatcatgtagaagcacttgtggagcatcagaatggcaaggttgtggtttcggcctccactcgtgtgctggcacagagatgcttagaggcgggaatcaacttcatggtctaccaaccaaccccgtgggaggcagcctcagactcgatgaaacgactacaaagtgccatgacagaaggtggtgtggttctacgggaacctcagagaatctatgaataaatggaagcattaattgttttgaacatgtaaatataaatctgtcagccactacagccatcaaaagagagcatctggaagaacagccagcttggaagttttacagcaataatgttgcagtggaatattatttgtagttaaggtcatcctcctcccctttctgtttttttaaatcaagaactacgttctgcccctctcttgggcttcagaagcatctaagaaaagcagtcatcaattataattaactttcaaagggcaagtcagaagttgtttataaattacaaaataaaggcatattatgaactctta

SEQ ID NO: 295401 - DNA, 757 bp, Homo sapiens
cgggtcggtggcgtctggcgtggagagtttggggatctacagcagccaaaggcttgtccctgactttatatggctgcgcctggcgagcgactgagtcgtccgtgaggaaaaagaggcgaggcttttccgagatcgtctcagcgatggcgcttcggtcgcagttttgggggttctcggtttgcaggaaccctgggtgcaggttcgcagccctgtcaaccagctccgagccggcagcgaaacctgaagtggaccctgtggaaaatgaagctgtcgccccagaattcaccaaccggaacccccggaacctggagcttttatctgtagccaggaaagagcggggctggcggacggtgtttccctcccgtgagttctggcacagatgaaacgactacaaagtgccatgacagaaggtggtgtggttctacgggaacctcagagaatctatgaataaatggaagcattaattgttttgaacatgtaaatataaatctgtcagccactacagccatcaaaagagagcatctggaagaacagccagcttggaagttttacagcaataatgttgcagtggaatattatttgtagttaaggtcatcctcctcccctttctgtttttttaaatcaagaactacgttctgcccctctcttgggcttcagaagcatctaagaaaagcagtcatcaattataattaactttcaaagggcaagtcagaagttgtttataaattacaaaataaaggcatattatgaactctta

SEQ ID NO: 295402 - DNA, 858 bp, Homo sapiens
tttttgactactctttcgcctactcctactatgctgcgagaagacgacagaatgggggagctggggtgtaactggaggggcgggcccttctccaagttagagttggggttctgagcgagtcgtgcgttttaggtttagtgtcttttccttgtccctgctcggggagcgtgaggcagatcggccggctttgctccaggcctcaggagtggtgcaggttcgcagccctgtcaaccagctccgagccggcagcgaaacctgaagtggaccctgtggaaaatgaagctgtcgccccagaattcaccaaccggaacccccggaacctggagcttttatctgtagccaggaaagagcggggctggcggacggtgtttccctcccgtgagttctggcacaggttgcgagttataaggactcagcatcatgtagaagcacttgtggagcatcagaatggcaaggttgtggtttcggcctccactcgtgatgaaacgactacaaagtgccatgacagaaggtggtgtggttctacgggaacctcagagaatctatgaataaatggaagcattaattgttttgaacatgtaaatataaatctgtcagccactacagccatcaaaagagagcatctggaagaacagccagcttggaagttttacagcaataatgttgcagtggaatattatttgtagttaaggtcatcctcctcccctttctgtttttttaaatcaagaactacgttctgcccctctcttgggcttcagaagcatctaagaaaagcagtcatcaattataattaactttcaaagggcaagtcagaagttgtttataaattacaaaataaaggcatattatgaactctta

SEQ ID NO: 295403 - DNA, 833 bp, Homo sapiens
tttttgactactctttcgcctactcctactatgctgcgagaagacgacagaatgggggagctggggtgtaactggaggggcgggcccttctccaagttagagttggggttctgagcgagtcgtgcgttttaggtttagtgtcttttccttgtccctgctcggggagcgtgaggcagatcggccggctttgctccaggcctcaggagtggtgcaggttcgcagccctgtcaaccagctccgagccggcagcgaaacctgaagtggaccctgtggaaaatgaagctgtcgccccagaattcaccaaccggaacccccggaacctggagcttttatctgtagccaggaaagagcggggctggcggacggtgtttccctcccgtgagttctggcacaggttgcgagttataaggactcagcatcatgtagaagcacttgtggagcatcagaatggcaagatgaaacgactacaaagtgccatgacagaaggtggtgtggttctacgggaacctcagagaatctatgaataaatggaagcattaattgttttgaacatgtaaatataaatctgtcagccactacagccatcaaaagagagcatctggaagaacagccagcttggaagttttacagcaataatgttgcagtggaatattatttgtagttaaggtcatcctcctcccctttctgtttttttaaatcaagaactacgttctgcccctctcttgggcttcagaagcatctaagaaaagcagtcatcaattataattaactttcaaagggcaagtcagaagttgtttataaattacaaaataaaggcatattatgaactctta

SEQ ID NO: 295404 - DNA, 843 bp, Homo sapiens
cgggtcggtggcgtctggcgtggagagtttggggatctacagcagccaaaggcttgtccctgactttatatggctgcgcctggcgagcgactgagtcgtccgtgaggaaaaagaggcgaggcttttccgagatcgtctcagcgatggcgcttcggtcgcagttttgggggttctcggtttgcaggaaccctgggtgcaggttcgcagccctgtcaaccagctccgagccggcagcgaaacctgaagtggaccctgtggaaaatgaagctgtcgccccagaattcaccaaccggaacccccggaacctggagcttttatctgtagccaggaaagagcggggctggcggacggtgtttccctcccgtgagttctggcacaggttgcgagttataaggactcagcatcatgtagaagcacttgtggagcatcagaatggcaaggttgtggtttcggcctccactcgtgatgaaacgactacaaagtgccatgacagaaggtggtgtggttctacgggaacctcagagaatctatgaataaatggaagcattaattgttttgaacatgtaaatataaatctgtcagccactacagccatcaaaagagagcatctggaagaacagccagcttggaagttttacagcaataatgttgcagtggaatattatttgtagttaaggtcatcctcctcccctttctgtttttttaaatcaagaactacgttctgcccctctcttgggcttcagaagcatctaagaaaagcagtcatcaattataattaactttcaaagggcaagtcagaagttgtttataaattacaaaataaaggcatattatgaactctta

SEQ ID NO: 295405 - DNA, 874 bp, Homo sapiens
gctgggaagaggttgaaccttcgcctcaaacgatgttgcgcagacgcagtgggccattctagtgccttctagaaaagggtgcaggttcgcagccctgtcaaccagctccgagccggcagcgaaacctgaagtggaccctgtggaaaatgaagctgtcgccccagaattcaccaaccggaacccccggaacctggagcttttatctgtagccaggaaagagcggggctggcggacggtgtttccctcccgtgagttctggcacaggttgcgagttataaggactcagcatcatgtagaagcacttgtggagcatcagaatggcaaggttgtggtttcggcctccactcgtgagtgggctattaaaaagcacctttatagtaccagaaatgtggtggcttgtgagagtataggacgagtgctggcacagagatgcttagaggcgggaatcaacttcatggtctaccaaccaaccccgtgggaggcagcctcagactcgatgaaacgactacaaagtgccatgacagaaggtggtgtggttctacgggaacctcagagaatctatgaataaatggaagcattaattgttttgaacatgtaaatataaatctgtcagccactacagccatcaaaagagagcatctggaagaacagccagcttggaagttttacagcaataatgttgcagtggaatattatttgtagttaaggtcatcctcctcccctttctgtttttttaaatcaagaactacgttctgcccctctcttgggcttcagaagcatctaagaaaagcagtcatcaattataattaactttcaaagggcaagtcagaagttgtttataaattacaaaataaaggcatattatgaactctta

SEQ ID NO: 295406 - DNA, 1055 bp, Homo sapiens
cgggtcggtggcgtctggcgtggagagtttggggatctacagcagccaaaggcttgtccctgactttatatggctgcgcctggcgagcgactgagtcgtccgtgaggaaaaagaggcgaggcttttccgagatcgtctcagcgatggcgcttcggtcgcagttttgggggttctcggtttgcaggaaccctgggtgcaggttcgcagccctgtcaaccagctccgagccggcagcgaaacctgaagtggaccctgtggaaaatgaagctgtcgccccagaattcaccaaccggaacccccggaacctggagcttttatctgtagccaggaaagagcggggctggcggacggtgtttccctcccgtgagttctggcacaggttgcgagttataaggactcagcatcatgtagaagcacttgtggagcatcagaatggcaaggttgtggtttcggcctccactcgtgagtgggctattaaaaagcacctttatagtaccagaaatgtggtggcttgtgagagtataggacgagtgctggcacagagatgcttagaggcgggaatcaacttcatggtctaccaaccaaccccgtgggaggcagcctcagactcgatgaaacgactacaaagtgccatgacagaaggtggtgtggttctacgggaacctcagagaatctatgaataaatggaagcattaattgttttgaacatgtaaatataaatctgtcagccactacagccatcaaaagagagcatctggaagaacagccagcttggaagttttacagcaataatgttgcagtggaatattatttgtagttaaggtcatcctcctcccctttctgtttttttaaatcaagaactacgttctgcccctctcttgggcttcagaagcatctaagaaaagcagtcatcaattataattaactttcaaagggcaagtcagaagttgtttataaattacaaaataaaggcatattatgaactcttaaaaaaaaaaagaaaaaggaaataaaaattgtttgggggcatgcgcctggagaaagttattaaaagt

SEQ ID NO: 295407 - DNA, 1501 bp, Homo sapiens
cgggtcggtggcgtctggcgtggagagtttggggatctacagcagccaaaggcttgtccctgactttatatggctgcgcctggcgagcgactgagtcgtccgtgaggaaaaagaggcgaggcttttccgagatcgtctcagcgatggcgcttcggtcgcagttttgggggttctcggtttgcaggaaccctgggtgcaggttcgcagccctgtcaaccagctccgagccggcagcgaaacctgaagtggaccctgtggaaaatgaagctgtcgccccagaattcaccaaccggaacccccggaacctggagcttttatctgtagccaggaaagagcggggctggcggacggtgtttccctcccgtgagttctggcacaggttgcgagttataaggactcagcatcatgtagaagcacttgtggagcatcagaatggcaaggttgtggtttcggcctccactcgtgagtgggctattaaaaagcacctttatagtaccagaaatgtggtggcttgtgagagtataggacgagtgctggcacagagatgcttagaggcgggaatcaacttcatggtctaccaaccaaccccgtgggaggcagcctcagactcggtatttttgttttcatgtacttattgaaaagatgaaacgactacaaagtgccatgacagaaggtggtgtggttctacgggaacctcagagaatctatgaataaatggaagcattaattgttttgaacatgtaaatataaatctgtcagccactacagccatcaaaagagagcatctggaagaacagccagcttggaagttttacagcaataatgttgcagtggaatattatttgtagttaaggtcatcctcctcccctttctgtttttttaaatcaagaactacgttctgcccctctcttgggcttcagaagcatctaagaaaagcagtcatcaattataattaactttcaaagggcaagtcagaagttgtttataaattacaaaataaaggcatattatgaactcttattttctggttatatgacattgtctgagctcactgtggcagtggagcacatatgaggttgatgtaaagcacttattactgtgtctagttcatggcgagtgatctcagtgaatgacagttgtttgctgctcggagtgtggggtgttttttaaaataggaaatgtcagtatcaatctaatattatagaacagtcagtatgtgaaaatgaaaggaccaaatgccaacctcacttggactcttggttcccaacagtaagagaaacaaatttgaaagaggaaggaggtggcatcaggagctgaaagcagaggtggaaatggttggggttagtgggcgctcaatttgccatgaagtgaacattttattagataggagatgaaacttgaaatgcatgcaagttaatctaaaatttgagcttgggtagatgggaatcatggcagttctctgaaaggagctgattaaggtgttaatttttggctatttgat

SEQ ID NO: 295408 - DNA, 5171 bp, Homo sapiens
agaccttctgtccaccagctgagaaggacaagggcggaaggcagctgcacagagcagggccacggccttgcacacagtccagggagcttttgtgcaggagccaggcctccccctgggtccccatgatgagagaatgggttctgctcatgtccgtgctgctctgtggcctggctggccccacacacctgttccagccaagcctggtgctggacatggccaaggtcctcttggataactactgcttcccggagaacctgctgggcatgcaggaagccatccagcaggccatcaagagccatgagattctgagcatctcagacccgcagacgctggccagtgtgctgacagccggggtgcagagctccctgaacgatcctcgcctggtcatctcctatgagcccagcacccccgagcctcccccacaagtcccagcactcaccagcctctcagaagaggaactgcttgcctggctgcaaaggggcctccgccatgaggttctggagggtaatgtgggctacctgcgggtggacagcgtcccgggccaggaggtgctgagcatgatgggggagttcctggtggcccacgtgtgggggaatctcatgggcacctccgccttagtgctggatctccggcactgcacaggaggccaggtctctggcattccctacatcatctcctacctgcacccagggaacaccatcctgcacgtggacactatctacaaccgcccctccaacaccaccacggagatctggaccttgccccaggtcctgggagaaaggtacggtgccgacaaggatgtggtggtcctcaccagcagccagaccaggggcgtggccgaggacatcgcgcacatccttaagcagatgcgcagggccatcgtggtgggcgagcggactgggggaggggccctggacctccggaagctgaggataggcgagtctgacttcttcttcacggtgcccgtgtccaggtccctggggccccttggtggaggcagccagacgtgggagggcagcggggtgctgccctgtgtggggactccggccgagcaggccctggagaaagccctggccatcctcactctgcgcagcgcccttccaggggtagtccactgcctccaggaggtcctgaaggactactacacgctggtggaccgtgtgcccaccctgctgcagcacttggccagcatggacttctccacggtggtctccgaggaagatctggtcaccaagctcaatgccggcctgcaggctgcgtctgaggatcccaggctcctggtgcgagccatcgggcccacagaaactccttcttggcccgcgcccgacgctgcagccgaagactcaccaggggtggccccagagttgcctgaggacgaggctatccggcaagcactggtggactctgtgttccaggtgtcggtgctgccaggcaatgtgggctacctgcgcttcgatagttttgctgacgcctccgtcctgggtgtgttggccccatatgtcctgcgccaggtgtgggagccgctacaggacacggagcacctcatcatggacctgcgccacaaccctggagggccatcctctgctgtgcccctgctcctgtcctacttccagggccctgaggccggccccgtgcacctcttcaccacctatgatcgccgcaccaacatcacgcaggagcacttcagccacatggagctcccgggcccacgctacagcacccaacgtggggtgtatctgctcaccagccaccgcaccgccacggccgcggaggagttcgccttccttatgcagtcgctgggctgggccacactggtaggtgagatcaccgcgggcaacctgctgcacacccgcacggtgccgctgctggacacacccgaaggcagcctcgcgctcaccgtgccggtcctcaccttcatcgacaatcacggcgaggcctggctgggtggtggagtggtgcccgatgccatcgtgctggccgaggaggccctggacaaagcccaggaagtgctggagttccaccaaagcctgggggccttggtggagggcacagggcacctgctggaggcccactatgctcggccagaggtcgtggggcagaccagtgccctcctgcgggccaagctggcccagggcgcctaccgcacagctgtggacttggagtctctggcctctcagctcacagcagacctccaggaggtgtctggggaccaccgcttgctagtgttccacagccctggcgagctggtggtagaggaagcacccccaccaccccctgctgtcccctctccagaggagctcacctaccttattgaggccctgttcaagacagaggtgctgcccggccagctgggctacctgcgttttgacgccatggctgaactggagacagtgaaggccgtggggccacagctggtgcggctggtatggcaacagctggtggacacggctgcgctggtgatcgacctgcgctacaaccctggcagctactccacggccatcccgctgctctgctcctacttctttgaggcagagccccgccagcacctgtattctgtctttgacagggccacctcaaaagtcacggaggtgtggaccttgccccaggtcgccggccagcgctacggctcacacaaggacctctacatcctgatgagccacaccagtggctctgcggccgaggcctttgcacacaccatgcaggacctgcagcgggccacggtcattggggagcccacggccggaggcgcactctctgtgggcatctaccaggtgggcagcagccccttatatgcatccatgcccacccagatggccatgagtgccaccacaggcaaggcctgggacctggctggtgtggagcccgacatcactgtgcccatgagcgaagccctttccatagcccaggacatagtggctctgcgtgccaaggtgcccacggtgctgcagacggccgggaagctggtggctgataactatgcctctgccgagctgggggccaagatggccaccaaactgagcggtctgcagagccgctactccagggtgacctcagaagtggccctagccgagatcctgggggctgacctgcagatgctctccggagacccacacctgaaggcagcccatatccctgagaatgccaaggaccgcattcctggaattgtgcccatgcagatcccttcccctgaagtatttgaagagctgatcaagttttccttccacactaacgtgcttgaggacaacattggctacttgaggtttgacatgtttggggacggtgagctgctcacccaggtctccaggctgctggtggagcacatctggaagaagatcatgcacacggatgccatgatcatcgacatgaggttcaacatcggtggccccacatcctccattcccatcttgtgctcctacttctttgatgaaggccctccagttctgctggacaagatctacagccggcctgatgactctgtcagtgaactctggacacacgcccaggttgtaggtgaacgctatggctccaagaagagcatggtcattctgaccagcagtgtgacggccggcaccgcggaggagttcacctatatcatgaagaggctgggccgggccctggtcattggggaggtgaccagtgggggctgccagccaccacagacctaccacgtggatgacaccaacctctacctcactatccccacggcccgttctgtgggggcctcggatggcagctcctgggaaggggtgggggtgacaccccatgtggttgtccctgcagaagaggctctcgccagggccaaggagatgctccagcacaaccagctgagggtgaagcggagcccaggcctgcaggaccacctgtagggaagggccccataggcagagccccagggcagacagaacctctgggacacacaccaagggcactcctgcaggtggcccggcctgaggttcccaggagcagcaaaggggcctgctgagctctggttaggttacagctggaggtgtgtatatatacacacacacacatgtatatacacatatatatgtgtatgtatatatatgtatatatatatggctttccaataaccacctaaattttaacaaaggttccttctaagtggtagaacttggggtggtatttttaccttccttcttcatactttgctctttttcttaaatactcattaatgtgcatatatcattattttcagatgcagctatcattattccaaaatacaaaataaagaagataaaataaattatatacccgagccattaaccacaatttagtgatcactagtggttgttaaatctcttcttttcatgagttctccattcacattatttagatcttctggatctgccctgctgacctctatggacagctgattttatttaagatgtggtgcaagatgctgtggggtcagcaggtggcaaagatcttgtggatcttaaatagggaaagggctggtgcggcccttctgctggtgatgtacatacactggctgtgtctcttctgagcctcatgccggctgcatagctggccactctcatcttctacccaggagccagctgagacacagacaaactccgcagctcacccaaggtcacacatccagcatggtggacctgtgtcctcctttgggccacccagcatttgcagcacctttggatgatcagagaatcactgcccataggaatcagtaggaaacagtgatgtcagccttgcctgggtgggaaaccagcccagccacttccccagctgagtggttctgggcaatttgtttcacttctttgggcctcagtttgttcacctgttcaatgggagaaataatactacacttggagttgtgagaatgaagtgagttaatctagtgtccagccaatgttagctgtcataatttctccaccacaaagctgaacactctggaagccccacttttccagcccttctggcagtagggcatgggcatgtgatcctgccttggtcaaccagaagctcctgtgcaagatgtttaatctggagcaagtggccagggagcctgggcagcggccatctgccagaagcctagtgtacagggacagcacagccatgccctgtgcttagcagggacagcagcagcaccctcaacaggtgcttcctcgacttcctggtgtgactttggc

SEQ ID NO: 295409 - DNA, 728 bp, Homo sapiens
aatagggccagaaaagcacaagccaaatggcatgtcacaatgtgatctgtaaagagtgtctcacttagaggggttttagtgcgtgcactgctctatcccgtgttgcgggtgcatggcattggtggaacgcatcatgggtcttccgtgttttttccttggagtttgttttcttagttcagaccatggtaaattgtaaaagaaaatctgtgataaagtataatgattgtaccatattggcccagataacattttctgtgttttcattagcttcaaattttaggaactgtatttagccgtactgactttgggaacatagtagaagattctgttttttttttttaacctcttattattacttggaatgtttttccttaacttttttcacatttttattagtttggcacaaactatgaagaccctaaggctaagaaagaacactgtgaaattttcattatatagacattttaaaaatactctgatctttgctgtgctgggtaagctatttaatttttcttacagtaaattatcttagtattgttatattccttcaaaggtgactttttgtgtgtttcagcttctatagtgtttatggggtggacaactaagacatttagaattgcaaaatgccaatcagtaagtataacctacctatttcacaatcgcccctgggagtcattgtggctggttgggcctatgggcctgcaggctgtgtttgatgtggtgacgca

SEQ ID NO: 295410 - DNA, 752 bp, Homo sapiens
tagtcccggtggggaccgatctgtcagtatgtgtcctagatggagttctggagagtactgtatacgaggtagtctataatataggagctctgatagcgagactctgatatcaaattcatctgaccacatcctgtagaaaataccaccttttccccttgtattacagtacaatgtttacattactatactgtcaagctgaaagtataaaaaatgtacatatacattttgagttatgtatcctttttttaaaaaaaagttcgagtctgttgcactaggctgtacatgactaaagttgacagatgctatgctagatttataatcactagttctggtacttgtgtctttgtatgatcaaagcatgcaataagcaatacaaaataccaagccttatacttaaaagaagtttaacatattggttaatatactggttaatatactggttaaacatattgaatgtatataagtggcaaaactagatttttaaggaagtgtacattataatattggagctcagtactgcatgaagagacttcattaaaactaagaaaacatttatttggggagaaattttaggcatttaagaacttgtatttttctattttaaaaagttaaattattccgtaatttggaagaagtttcgttgaatgtaggacataaccgtttgaagggttttcatttgaaaaattgatgtattttgtgccttaatattttgttcttttaataaaaatgctctgaatttgaaaaaaaaaatc

SEQ ID NO: 295411 - DNA, 595 bp, Homo sapiens
gggaaatgaacttacatttaaagatttaagactgactgttaattaactctctcttcttctctatcctagtttctctttctatgattgggcctcatggatatatctctgcatcagattggcccctaatgattgtgagtatttctcatcattttttcctttttaaaaaatgaattttataccctaagagctttgtggtagtaattcctcagtagttaatgctttgacatatcctgtatttctggttccagagtgactggaaaatgaagggttggatacttgaatgtagaagtgccaactttcaaatgaccaaaaggcttaactgactaaaattgcttctcttcctacagttttacatggtgatgtgtattgtttatatattatatggcatactctggctgacgtggtctgcctgttattggaaagatatattaagaatccagttctggattgcagctgttatttttttgggaatgcttgaaaaagcagttttttatagtgaataccaaaacatcagcaacactggactgtcaagtaagttttgactgtctctgtaaatatagtatgatctaagagttccccagtatttatgagcaga

SEQ ID NO: 295412 - DNA, 5203 bp, Homo sapiens
agccctcccttgcacgttccggctcctcctctatcttcacgcccacgctaggccctgagcccacctctacgtctcgccgccaactccacatcctggctcctatctctgccttccaggcatctcccagctgcacgctcgggcccggctcagagccctaagccctgcctcccggtcctggccgggtttcccagaactgcacggcgcctctccgcccaggcccaagcgcgagcccctcctccacacccgagtcccagccccgcgtcccggattcggacccgcctgcctggggcggtgctgcaccaggtgcgggtgtggcaggcgtctcggagcgccaggtgcagcttcctgatcaagatggtcgccgcctgccgctcggtagccgggctcctgccacgccgccgccgctgctttcccgcccgggccccgctgctgcgcgtcgccctctgcctcctgtgctggaccccggcggctgtgcgcgcggtccctgagctcgggctctggttagagacagtcaacgacaaatcaggacctttgatatttaggaaaactatgtttaactctacagatatcaagttatctgttaagtcattccattgttctgggcctgtgaagtttaccatagtgtggcatttgaagtatcatacctgtcacaatgagcattctaatctggaagagctgttccaaaaacataaacttagtgttgatgaagacttttgtcattatttgaagaatgacaactgttggacaacaaaaaatgaaaacttagattgcaacagtgattcacaggtgtttccctctttgaataataaagaactaataaatatcagaaatgtttcaaaccaggaaagatcaatggatgttgtagccagaacacaaaaagatgggtttcatatctttattgtttctattaaaacggagaatacagatgcaagctggaatttgaatgtttctctttctatgattgggcctcatggatatatctctgcatcagattggcccctaatgattttttacatggtgatgtgtattgtttatatattatatggcatactctggctgacgtggtctgcctgttattggaaagatatattaagaatccagttctggattgcagctgttatttttttgggaatgcttgaaaaagcagttttttatagtgaataccaaaacatcagcaacactggactgtcaacccaaggcttattgatatttgcggagttgatttctgcgattaagaggacgttggctcgccttctcgtgatcattgtgagcctgggctatggcattgtgaagcctcgtttaggaacagtcatgcaccgggtgatcggactggggcttctatacttaatctttgcagctgttgaaggcgtgatgagagtcattgggggttctaaccatttagctgttgttcttgatgacattattttagcagttattgactccatttttgtgtggttcatttttattagtttggcacaaactatgaagaccctaaggctaagaaagaacactgtgaaattttcattatatagacattttaaaaatactctgatctttgctgtgctggcttctatagtgtttatggggtggacaactaagacatttagaattgcaaaatgccaatcagattggatggaacgctgggttgacgatgcattttggagcttccttttttcgcttatccttattgtaatcatgtttttgtggagaccatcagcaaacaatcagagatatgccttcatgcccttaatagatgattctgatgatgaaattgaggaattcatggtaacttctgaaaatttaaccgaaggaataaaattaagagcctcaaaatcagtttccaatggaacagctaagcctgccacttctgagaactttgatgaagatttgaagtgggtagaagaaaatattccctcttcattcacagatgtagctcttccagtgttagtggattcagatgaggaaatcatgaccagatctgaaatggctgaaaaaatgttctcttcagaaaagataatgtgattggaacccgtataagaaatgtagttaagcctgaaggactatccttcatcaagactgaaagtgagctttgatttgatattgcctaaaaatttttattgtgttatcttggaagtctgtgtatcaaaatgaagaattcagatggtaggaggttctatagtccttttaaagctgactcttgagtgtcagttgaatatccattaaattggatttggaaataacctgaggaaagtattatgataaagatctgcacagatgcctcttagctgataggtggcaggcctgtgggtttgggttctccctcttttctctggaacatatgacaattccagattaaagaaaaatgttttttaataaatacccttggtctttcttctagtcacctttgaggtagatattgtgattttctggagtatagtatatccgtgtctctgtgtcttaggtttactagatgcaataatacttctctttgacatttgtactgaagtgatttgatattaagtaaaacagttaatgtttgaatataggcatatttataggttttttccgctcccccccaacccaccctttttaaaaaatctatacaaagcccttgtttgagtctcatcatgcacatcaaatcatggagttaggtcttctctgagctcaggggaacacaagtgcacagagagagatgtcttgagggtcactaccaaagaattaccctcattgtccctcactcaggccatgtgtacatgcgatgctgctgagtgtgctggggtgggtggtggccacgtggctcccccagagcacttcctaactggcaagctgggagacccattactggtgaactttgtggaaattagaactgtatcttttacataatcttggcatattacatttcataataaaaacatacatttagttgcatgctacatcactattgattttataattaatttcttaagcttcaaccatgttttataccttatttcgttacatcatatatttgtaatgtgtaatatgaaatcttttgctttaatgtctttttttaaaatgtagaatgttctaaacttgaaaggcaattgaatgtagtatgatgaaaatgtgaatgttttgctgctttcatgaccaaagatacagggctagtggacatttagaataataattaaagctagagtcttgtatgtcttttctttgaaggagttctaaccttgtaaattgagaatgacttcagagaattttgattaagaaaacattaaaatcttaaccggcacaaacactccaatttttttcactgtgaagccgcaagcaattttttttctttttctttcaaaagcctgccttctgaatttatttcttgtttactcatttcagagagggtagtaaagaagatctatttctggtagtcatatcgcttgaaaggtattggtaaatgtgttttcagtcgtgaccatgtggaaagtgaacagtgttggcaaacattaccgagaaaatcatgcttttcaagatgcccttgctttgggatatccttcctagggagaaaaaaaaaaagtagtttaacaattgtgaattccatttcttatttcagtttctgctgcagtaatgggttcccacccactataattcccagcatttatgttctgttgtattctccccttagcccagtaacatttttatctaataccccattccccaagttttgagacagattgaccccctactcattatgtggctctagttgaattttaaaatgtggaatattgggcttgcaggcagtaggagctgcaaatctggtagagtgggagtgtggagttaatggtgagtatgttaataaagggaaactgtctctgacagaatctcagtaatgtttaccaaaacatgtctttctacagctggtaggataaatgatgctaccctgtagctcagctacaggctgcagtgcaaacttttcttccatccagagaaagcagaattccctcctagtaacctcattacaaatactgttactagaagggcatgtgctgtctgtcaccttcagtaatatttgtgccatctcttgatgactgatgacctggatcgagtatttctatgaagggtcttcttaggccccttacatacgcaagaggggtgctctagtgccatagctgtagttcacaggaaggacaccaggagaagttatacctagggctactgagcagctcatcatccctgtttctgcacagtttcctgaaactggccatcagggcctctgaggcactcaaatcagtttacttttagcatgcccccatcagggtgggtctcactgttagtgaggatacgggtctggtttgatgtttttctaggcaaaatgcttaagtgttctggttatgccattcattcatacgatgtgtgaaatttgcttaaaagggaattttcatgatttgatttagattagtatttaaatatctgctttagatagcaattaattttattgtaaaaataaggaaaaatatgtgaatatgtgaattttttaagcctgagagatgatagaatgttcccatatttttcttgtaaagaaaataatattttaacttacacatcctgtagaaaataccaccttttccccttgtattacagtacaatgtttacattactatactgtcaagctgaaagtataaaaaatgtacatatacattttgagttatgtatcctttttttaaaaaaaagttcgagtctgttgcactaggctgtacatgactaaagttgacagatgctatgctagatttataatcactagttctggtacttgtgtctttgtatgatcaaagcatgcaataagcaatacaaaataccaagccttatacttaaaagaagtttaacatattggttaatatactggttaatatactggttaaacatattgaatgtatataagtggcaaaactagatttttaaggaagtgtacattataatattggagctcagtactgcatgaagagacttcattaaaactaagaaaacatttatttggggagaaattttaggcatttaagaacttgtatttttctattttaaaaagttaaattattccgtaatttggaagaagtttcgttgaatgtaggacataaccgtttgaagggttttcatttgaaaaattgatgtattttgtgccttaatattttgttcttttaataaaaatgctctgaatttgaaaaaaaaaatc

SEQ ID NO: 295413 - DNA, 2586 bp, Homo sapiens
aaatttctttactatctacactattctaccctaagatgccaatgtctactgagactctccaaaacaggcacagattatccagcatttccccagcttagatggtcatttttttgtgggatgcctgttaacatctcccctggatgttaatgttctgaggagcatggtttgggaaaggacctcgtgggacttacaggaagtagaaagatgtcacccattaaaggccaccacggtaagaacattcctctccttttagcagttgcttaagctgcacaagttggagtaagatgtcaccctttttatccaggtcattgggttagctgacagggagccaagattgaaatctaagatctttgccctgcaggattcagggctaatggacatcctgagatgggaggaaggagctttcattacagccttgtgggtcttgactcaccagtccctgcaggagccagtggagttcctgccatggtgtccctgaggaggtgtagcttctcacctaccctgccgccaagcccctcagtctgggtcttcttttcccatgcagcctccagcccaggctgcatactatggctgtggcccagtgacacccacccagcctgcccccaggtggacatcccagccacctagaccttcctgtgagtgacccagccccttccactctcagactggcctattggtgtgggccccgtgaggcagtcataacacagggatgaaacctggctctgccacttcccaaggtgggtgacttcacttctctgagcctcagtttcctcttctgagcatgggcctgaatgagacgtgtgtaaagtaccaagcacagtggtgagccaatggaagacacgcagctagccaccagcagtcatcaccaaagatgcctctgatttgtgactctgaaaattcttgcaaagctgagaaggtgaaattcctctggctatattgttgaccaaaggccctcctctgtaagagtgaattgcacgctcacttgaaactatcttgagggactaaggtgtacaatcctggtgcttatgcagtttggggctctaggtagacacgagctggctttgaaattgtagattcctacactccccctttctggagttctgggtctaagtgaattgactcctatttctgttgtgaatgttgtagtttcccttcccattctcttggtggccctggaagcttctaggcacagtgtgccaccctgattattcccaccactccatccaacttttctctctctgtggtgtctgcaccacaagctgcctaccctccaggtgcctcaatggtccggccaccagttgtgcctcggcgccccccggcccacatcagcagtgtcaggcaggcctccacccaggtgccacgcacggtgcctcatacccagagagtagccaacattggtactcagaccacaggacccagtggggtaggatgctgtacaccaggccggccgctcctgccgtgcaaatgttcctcagcagcacatagcacctatcgggtccaggagccggctgtgcacatcccaggacaggagcccctgaccgcgtccatgctggctgcggcgcccctgcatgagcaaaagcagatgattggggagcgtctctacccccttatccatgatgtccacacccagctggctggcaagatcacgggcatgctgctggagattgacaactcagagctgttgctcatgctggagtctccagaatccctccatgccaagatttcagcttaaaatgccacccagagaccaagttcattctgtcaactgatctccagcacctggcccagagacggaaagtacaaagactagtaaaatacatccttgcccttaaggagctaagtacccaaaacctgtaatccatcttgagtcaccagagtacggttgctcagaaacagcagtggtgcggtggaaagggcatcaaccctgcgatccggacaagtcactccatccctctgatcatgcgtgcccacctaccacatgaggatatcacttcatagacttgctggaagggttcattgtgttagcctgttccctgagctctcttcgtgatcaagaagactgatcagataaatcaagagacttgcccaaaattacctaggaaatctgtagcagcagcagaaccaaactccggtccttgctaaatctagataccaggctagcttttctatggacccagaattaacccatacaaatgtacaagcttttccagaccagctggggtgagatgaatgaaaatggcagcaacatcaatacctcagcttcttcagcaacttcatcaagtaaggctgccatgaggaagtgggcctaaaggagagttttctagaacaaagaagggggcaaaggagtggcttgaaactgcaaaaagtgcagacaaaaaaaaaaaaaaaaagaatgaaatctggagaggatgtgaggagaggtctagcaaaatgattaaaaatttggacttagcatcaaagtcaaacagatccatattcaaatcgtggctcttccatgtcttcactatgtaaccccgagggagccaatttaactctcttggactcctcctttctaagcattttatccacagggccataataaagatc

SEQ ID NO: 295414 - DNA, 1788 bp, Homo sapiens
  misc_feature (1249)..(1249): n is a, c, g, or t
cttacaggcacatgccaccatgaccagctaagttttgtatttttattagagatggggtttcaccatgttggccaggctggtttcaaactcctgatctcaggtgatccacccacctcagcctcccaaagtactgtgattacaggtgtgagccaccatgcctggcctcacccagaaacattttgaatgagcttaatggaagtagaagtctttgttagtagttctctgtaaacattttcactttcttcatgggacgatcctttccgcccccacttaaggcacccagtcctggctgggccctggacacattgctgagatgggctgaccaccaataccaggcccagtcattaaaagtacctgatgttagaagatcaagtgttaaatgtcatagcctagaaggagcagttctgggagaagaacccagatgtcctcagtgctccactccatacgagccctgggatgctggggtgtgagctaggccgtgcacaagccattagaaggtgttccacacgggagcgtctctacccccttatccatgatgtccacacccagctggctggcaagatcacgggcatgctgctggagattgacaactcagagctgttgctcatgctggagtctccagaatccctccatgccaaggtaagcaggagcccgggcagcagggagcccgagggggcaggaggagagctaacgacaagggctctcctagtggagccagtggatagctgtttggccagataaagtgtttcttcttgctaatacctgaaggcctgctgaatcttaagagtggaaggggccttaggtaagggtttgctacttcagcccttccgtagactaattctgtgttgttctgtaggtaggtcttttggtacaaggaagtgtgttgtgactcagtgtaagggttaagatttttccagctgtccagcaatgtacctctgtgtcaaaggtgacagacagggccatgggatcttgcaagcagtggtggatgggagggttccacagaaaccctgtggatggaggaggatcctgtatccaggatggtgagcgagggggagatcaaggctcttctgtgacctgctaagatagctgcactaagcccccccgccactcatgtctcacagatagacgaggcagtggccgtgctgcaggcacaccaggctatggagcagccgaaggcgtacatgcactgaaaccaggtgggtggaatggtgacagaagcagctgagcccgggagaagctgtaaggaaanaggcagggactgactttcacaaacactgagaattgcgccgtgttcctggctttctctgaagcaccaaagagtttggaggaagttgtgagaatcagaggagatgattaactgtgatcggaatggggggtggtggagggtgaaggaggtgccctcttgccagctgccctgcctggcttcatgcagaatagtttgggctttcccagggccctgcctggctccattctgcctgcctgaaggcctggccaggatgtaaccaccttctttattgaagactgggtgtctgccatactttaaaaacacttatttttacctttttgtcctcagaaaaggaaatcctcgcttccatggctgccaaaaggacagtgtttctggctctcagccctaaggccctgcaaactctaacttatttcccaattagtctgtatctatacttgggctctgtatgtgaatgaaggttggtcacccatccagcctattaccttttgctttgtgtattaaaagtgctgcaaaatctgcgtggggtcccaggaggccctttt

SEQ ID NO: 295415 - DNA, 854 bp, Homo sapiens
cttacaggcacatgccaccatgaccagctaagttttgtatttttattagagatggggtttcaccatgttggccaggctggtttcaaactcctgatctcaggtgatccacccacctcagcctcccaaagtactgtgattacaggtgtgagccaccatgcctggcctcacccagaaacattttgaatgagcttaatggaagtagaagtctttgttagtagttctctgtaaacattttcactttcttcatgggacgatcctttccgcccccacttaaggcacccagtcctggctgggccctggacacattgctgagatgggctgaccaccaataccaggcccagtcattaaaagtacctgatgttagaagatcaagtgttaaatgtcatagcctagaaggagcagttctgggagaagaacccagatgtcctcagtgctccactccatacgagccctgggatgctggggtgtgagctaggccgtgcacaagccattagaaggtgttccacacgggagcgtctctacccccttatccatgatgtccacacccagctggctggcaagatcacgggcatgctgctggagattgacaactcagagctgttgctcatgctggagtctccagaatccctccatgccaagaaaaggaaatcctcgcttccatggctgccaaaaggacagtgtttctggctctcagccctaaggccctgcaaactctaacttatttcccaattagtctgtatctatacttgggctctgtatgtgaatgaaggttggtcacccatccagcctattaccttttgctttgtgtattaaaagtgctgcaaaatctgcgtggggtcccaggaggccctttt

SEQ ID NO: 295416 - DNA, 710 bp, Homo sapiens
gaacgcttaccggaatagctatacaggaagcagctatatagggaacagcatctacgagcaaatggtataagcacgtagatacaccaatgccggccgatccatgctcagttgaccagtgattccatcagttagacacagtaacacctatctgagtccaggagccggctgtgcacatcccaggacaggagcccctgaccgcgtccatgctggctgcggcgcccctgcatgagcaaaagcagatgattggggagcgtctctacccccttatccatgatgtccacacccagctggctggcaagatcacgggcatgctgctggagattgacaactcagagctgttgctcatgctggagtctccagaatccctccatgccaagatagacgaggcagtggccgtgctgcaggcacaccaggctatggagcagccgaaggcgtacatgcactgaaaccagaaaaggaaatcctcgcttccatggctgccaaaaggacagtgtttctggctctcagccctaaggccctgcaaactctaacttatttcccaattagtctgtatctatacttgggctctgtatggactttcggcgtgtgcatgcacacgccgaataacaaactgccacgccgagcctccatgtacttctgaagagatctgatggagaagttgttgccacgcgagaatcaaatgaaaagcagatacagatcgagagtgtggg

SEQ ID NO: 295417 - DNA, 2010 bp, Homo sapiens
aaatttctttactatctacactattctaccctaagatgccaatgtctactgagactctccaaaacaggcacagattatccagcatttccccagcttagatggtcatttttttgtgggatgcctgttaacatctcccctggatgttaatgttctgaggagcatggtttgggaaaggacctcgtgggacttacaggaagtagaaagatgtcacccattaaaggccaccacggtaagaacattcctctccttttagcagttgcttaagctgcacaagttggagtaagatgtcaccctttttatccaggtcattgggttagctgacagggagccaagattgaaatctaagatctttgccctgcaggattcagggctaatggacatcctgagatgggaggaaggagctttcattacagccttgtgggtcttgactcaccagtccctgcaggagccagtggagttcctgccatggtgtccctgaggaggtgtagcttctcacctaccctgccgccaagcccctcagtctgggtcttcttttcccatgcagcctccagcccaggctgcatactatggctgtggcccagtgacacccacccagcctgcccccaggtggacatcccagccacctagaccttcctgtgagtgacccagccccttccactctcagactggcctattggtgtgggccccgtgaggcagtcataacacagggatgaaacctggctctgccacttcccaaggtgggtgacttcacttctctgagcctcagtttcctcttctgagcatgggcctgaatgagacgtgtgtaaagtaccaagcacagtggtgagccaatggaagacacgcagctagccaccagcagtcatcaccaaagatgcctctgatttgtgactctgaaaattcttgcaaagctgagaaggtgaaattcctctggctatattgttgaccaaaggccctcctctgtaagagtgaattgcacgctcacttgaaactatcttgagggactaaggtgtacaatcctggtgcttatgcagtttggggctctaggtagacacgagctggctttgaaattgtagattcctacactccccctttctggagttctgggtctaagtgaattgactcctatttctgttgtgaatgttgtagtttcccttcccattctcttggtggccctggaagcttctaggcacagtgtgccaccctgattattcccaccactccatccaacttttctctctctgtggtgtctgcaccacaagctgcctaccctccaggtgcctcaatggtccggccaccagttgtgcctcggcgccccccggcccacatcagcagtgtcaggcaggcctccacccaggtgccacgcacggtgcctcatacccagagagtagccaacattggtactcagaccacaggacccagtggggtaggatgctgtacaccaggccggccgctcctgccgtgcaaatgttcctcagcagcacatagcacctatcgggtccaggagccggctgtgcacatcccaggacaggagcccctgaccgcgtccatgctggctgcggcgcccctgcatgagcaaaagcagatgattggggagcgtctctacccccttatccatgatgtccacacccagctggctggcaagatcacgggcatgctgctggagattgacaactcagagctgttgctcatgctggagtctccagaatccctccatgccaagatagacgaggcagtggccgtgctgcaggcacaccaggctatggagcagccgaaggcgtacatgcactgaaaccagaaaaggaaatcctcgcttccatggctgccaaaaggacagtgtttctggctctcagccctaaggccctgcaaactctaacttatttcccaattagtctgtatctatacttgggctctgtatgtgaatgaaggttggtcacccatccagcctattaccttttgctttgtgtattaaaagtgctgcaaaatctgcgtggggtcccaggaggccctttt

SEQ ID NO: 295418 - DNA, 1224 bp, Homo sapiens
ttaacacctattatgccatgaattcatagggaataggttccagcagctcaggctccttcccattggttctcacaaagtgtgcttctctgggtggagcaggctggcgctttagttgaacccaggtacctttctctttggcttctttctttttctgatcattttccttcacacgtttcaggaagctatctcggctcacttgaaactatcttgagggactaaggtgtacaatcctggtgcttatgcagtttggggctctaggtagacacgagctggctttgaaattgtagattcctacactccccctttctggagttctgggtctaagtgaattgactcctatttctgttgtgaatgttgtagtttcccttcccattctcttggtggccctggaagcttctaggcacagtgtgccaccctgattattcccaccactccatccaacttttctctctctgtggtgtctgcaccacaagctgcctaccctccaggtgcctcaatggtccggccaccagttgtgcctcggcgccccccggcccacatcagcagtgtcaggcaggcctccacccaggtgccacgcacggtgcctcatacccagagagtagccaacattggtactcagaccacaggacccagtggggtaggatgctgtacaccaggccggccgctcctgccgtgcaaatgttcctcagcagcacatagcacctatcgggtccaggagccggctgtgcacatcccaggacaggagcccctgaccgcgtccatgctggctgcggcgcccctgcatgagcaaaagcagatgattggggagcgtctctacccccttatccatgatgtccacacccagctggctggcaagatcacgggcatgctgctggagattgacaactcagagctgttgctcatgctggagtctccagaatccctccatgccaagatagacgaggcagtggccgtgctgcaggcacaccaggctatggagcagccgaaggcgtacatgcactgaaaccagaaaaggaaatcctcgcttccatggctgccaaaaggacagtgtttctggctctcagccctaaggccctgcaaactctaacttatttcccaattagtctgtatctatacttgggctctgtatgtgaatgaaggttggtcacccatccagcctattaccttttgctttgtgtattaaaagtgctgcaaaatctgcgtggggtcccaggaggccctttt

SEQ ID NO: 295419 - DNA, 2093 bp, Homo sapiens
aaatttctttactatctacactattctaccctaagatgccaatgtctactgagactctccaaaacaggcacagattatccagcatttccccagcttagatggtcatttttttgtgggatgcctgttaacatctcccctggatgttaatgttctgaggagcatggtttgggaaaggacctcgtgggacttacaggaagtagaaagatgtcacccattaaaggccaccacggtaagaacattcctctccttttagcagttgcttaagctgcacaagttggagtaagatgtcaccctttttatccaggtcattgggttagctgacagggagccaagattgaaatctaagatctttgccctgcaggattcagggctaatggacatcctgagatgggaggaaggagctttcattacagccttgtgggtcttgactcaccagtccctgcaggagccagtggagttcctgccatggtgtccctgaggaggtgtagcttctcacctaccctgccgccaagcccctcagtctgggtcttcttttcccatgcagcctccagcccaggctgcatactatggctgtggcccagtgacacccacccagcctgcccccaggtggacatcccagccacctagaccttcctgtgagtgacccagccccttccactctcagactggcctattggtgtgggccccgtgaggcagtcataacacagggatgaaacctggctctgccacttcccaaggtgggtgacttcacttctctgagcctcagtttcctcttctgagcatgggcctgaatgagacgtgtgtaaagtaccaagcacagtggtgagccaatggaagacacgcagctagccaccagcagtcatcaccaaagatgcctctgatttgtgactctgaaaattcttgcaaagctgagaaggtgaaattcctctggctatattgttgaccaaaggccctcctctgtaagagtgaattgcacgctcacttgaaactatcttgagggactaaggtgtacaatcctggtgcttatgcagtttggggctctaggtagacacgagctggctttgaaattgtagattcctacactccccctttctggagttctgggtctaagtgaattgactcctatttctgttgtgaatgttgtagtttcccttcccattctcttggtggccctggaagcttctaggcacagtgtgccaccctgattattcccaccactccatccaacttttctctctctgtggtgtctgcaccacaagctgcctaccctccaggtgcctcaatggtccggccaccagttgtgcctcggcgccccccggcccacatcagcagtgtcaggcaggcctccacccaggtgccacgcacggtgcctcatacccagagagtagccaacattggtactcagaccacaggacccagtggggtaggatgctgtacaccaggccggccgctcctgccgtgcaaatgttcctcagcagcacatagcacctatcgggtccaggagccggctgtgcacatcccaggacaggagcccctgaccgcgtccatgctggctgcggcgcccctgcatgagcaaaagcagatgattggcacctgttatcttgtcttaaaacgctggtcagactggatggtcctgagctttcttccactgctgctgtcctgtgactttgaggggagcgtctctacccccttatccatgatgtccacacccagctggctggcaagatcacgggcatgctgctggagattgacaactcagagctgttgctcatgctggagtctccagaatccctccatgccaagatagacgaggcagtggccgtgctgcaggcacaccaggctatggagcagccgaaggcgtacatgcactgaaaccagaaaaggaaatcctcgcttccatggctgccaaaaggacagtgtttctggctctcagccctaaggccctgcaaactctaacttatttcccaattagtctgtatctatacttgggctctgtatgtgaatgaaggttggtcacccatccagcctattaccttttgctttgtgtattaaaagtgctgcaaaatctgcgtggggtcccaggaggccctttt

SEQ ID NO: 295420 - DNA, 1598 bp, Homo sapiens
aaatttctttactatctacactattctaccctaagatgccaatgtctactgagactctccaaaacaggcacagattatccagcatttccccagcttagatggtcatttttttgtgggatgcctgttaacatctcccctggatgttaatgttctgaggagcatggtttgggaaaggacctcgtgggacttacaggaagtagaaagatgtcacccattaaaggccaccacggtaagaacattcctctccttttagcagttgcttaagctgcacaagttggagtaagatgtcaccctttttatccaggtcattgggttagctgacagggagccaagattgaaatctaagatctttgccctgcaggattcagggctaatggacatcctgagatgggaggaaggagctttcattacagccttgtgggtcttgactcaccagtccctgcaggagccagtggagttcctgccatggtgtccctgaggaggtgtagcttctcacctaccctgccgccaagcccctcagtctgggtcttcttttcccatgcagcctccagcccaggctgcatactatggctgtggcccagtgacacccacccagcctgcccccaggtggacatcccagccacctagaccttcctgtgagtgacccagccccttccactctcagactggcctattggtgtgggccccgtgaggcagtcataacacagggatgaaacctggctctgccacttcccaaggtgggtgacttcacttctctgagcctcagtttcctcttctgagcatgggcctgaatgagacgtgtgtaaagtaccaagcacagtggtgagccaatggaagacacgcagctagccaccagcagtcatcaccaaagatgcctctgatttgtgactctgtcggcgccccccggcccacatcagcagtgtcaggcaggcctccacccaggtgccacgcacggtgcctcatacccagagagtagccaacattggtactcagaccacaggacccagtggggtaggatgctgtacaccaggccggccgctcctgccgtgcaaatgttcctcagcagcacatagcacctatcgggtccaggagccggctgtgcacatcccaggacaggagcccctgaccgcgtccatgctggctgcggcgcccctgcatgagcaaaagcagatgattggggagcgtctctacccccttatccatgatgtccacacccagctggctggcaagatcacgggcatgctgctggagattgacaactcagagctgttgctcatgctggagtctccagaatccctccatgccaagatagacgaggcagtggccgtgctgcaggcacaccaggctatggagcagccgaaggcgtacatgcactgaaaccagaaaaggaaatcctcgcttccatggctgccaaaaggacagtgtttctggctctcagccctaaggccctgcaaactctaacttatttcccaattagtctgtatctatacttgggctctgtatgtgaatgaaggttggtcacccatccagcctattaccttttgctttgtgtattaaaagtgctgcaaaatctgcgtggggtcccaggaggccctttt

SEQ ID NO: 295421 - DNA, 2258 bp, Homo sapiens
aaatttctttactatctacactattctaccctaagatgccaatgtctactgagactctccaaaacaggcacagattatccagcatttccccagcttagatggtcatttttttgtgggatgcctgttaacatctcccctggatgttaatgttctgaggagcatggtttgggaaaggacctcgtgggacttacaggaagtagaaagatgtcacccattaaaggccaccacggtaagaacattcctctccttttagcagttgcttaagctgcacaagttggagtaagatgtcaccctttttatccaggtcattgggttagctgacagggagccaagattgaaatctaagatctttgccctgcaggattcagggctaatggacatcctgagatgggaggaaggagctttcattacagccttgtgggtcttgactcaccagtccctgcaggagccagtggagttcctgccatggtgtccctgaggaggtgtagcttctcacctaccctgccgccaagcccctcagtctgggtcttcttttcccatgcagcctccagcccaggctgcatactatggctgtggcccagtgacacccacccagcctgcccccaggtggacatcccagccacctagaccttcctgtgagtgacccagccccttccactctcagactggcctattggtgtgggccccgtgaggcagtcataacacagggatgaaacctggctctgccacttcccaaggtgggtgacttcacttctctgagcctcagtttcctcttctgagcatgggcctgaatgagacgtgtgtaaagtaccaagcacagtggtgagccaatggaagacacgcagctagccaccagcagtcatcaccaaagatgcctctgatttgtgactctgaaaattcttgcaaagctgagaaggtgaaattcctctggctatattgttgaccaaaggccctcctctgtaagagtgaattgcacgctcacttgaaactatcttgagggactaaggtgtacaatcctggtgcttatgcagtttggggctctaggtagacacgagctggctttgaaattgtagattcctacactccccctttctggagttctgggtctaagtgaattgactcctatttctgttgtgaatgttgtagtttcccttcccattctcttggtggccctggaagcttctaggcacagtgtgccaccctgattattcccaccactccatccaacttttctctctctgtggtgtctgcaccacaagctgcctaccctccaggtgcctcaatggtccggccaccagttgtgcctcggcgccccccggcccacatcagcagtgtcaggcaggcctccacccaggtgccacgcacggtgcctcatacccagagagtagccaacattggtactcagaccacaggacccagtggggtaggatgctgtacaccaggccggccgctcctgccgtgcaaatgttcctcagcagcacatagcacctatcgggtccaggagccggctgtgcacatcccaggacaggagcccctgaccgcgtccatgctggctgcggcgcccctgcatgagcaaaagcagatgattgtggtgagtggctggttctcctactgtggagcaagaagaggagggctgcgagctggctagcctgctgggaaacacctcacctggtggtccaacgtgaggtcaaattccagctttgtcaccgacccccctactgggtgaccgtggccaagctggctctattctctaggcacctgttatcttgtcttaaaacgctggtcagactggatggtcctgagctttcttccactgctgctgtcctgtgactttgaggggagcgtctctacccccttatccatgatgtccacacccagctggctggcaagatcacgggcatgctgctggagattgacaactcagagctgttgctcatgctggagtctccagaatccctccatgccaagatagacgaggcagtggccgtgctgcaggcacaccaggctatggagcagccgaaggcgtacatgcactgaaaccagaaaaggaaatcctcgcttccatggctgccaaaaggacagtgtttctggctctcagccctaaggccctgcaaactctaacttatttcccaattagtctgtatctatacttgggctctgtatgtgaatgaaggttggtcacccatccagcctattaccttttgctttgtgtattaaaagtgctgcaaaatctgcgtggggtcccaggaggccctttt

SEQ ID NO: 295422 - DNA, 2393 bp, Homo sapiens
aaatttctttactatctacactattctaccctaagatgccaatgtctactgagactctccaaaacaggcacagattatccagcatttccccagcttagatggtcatttttttgtgggatgcctgttaacatctcccctggatgttaatgttctgaggagcatggtttgggaaaggacctcgtgggacttacaggaagtagaaagatgtcacccattaaaggccaccacggtaagaacattcctctccttttagcagttgcttaagctgcacaagttggagtaagatgtcaccctttttatccaggtcattgggttagctgacagggagccaagattgaaatctaagatctttgccctgcaggattcagggctaatggacatcctgagatgggaggaaggagctttcattacagccttgtgggtcttgactcaccagtccctgcaggagccagtggagttcctgccatggtgtccctgaggaggtgtagcttctcacctaccctgccgccaagcccctcagtctgggtcttcttttcccatgcagcctccagcccaggctgcatactatggctgtggcccagtgacacccacccagcctgcccccaggtggacatcccagccacctagaccttcctgtgagtgacccagccccttccactctcagactggcctattggtgtgggccccgtgaggcagtcataacacagggatgaaacctggctctgccacttcccaaggtgggtgacttcacttctctgagcctcagtttcctcttctgagcatgggcctgaatgagacgtgtgtaaagtaccaagcacagtggtgagccaatggaagacacgcagctagccaccagcagtcatcaccaaagatgcctctgatttgtgactctgaaaattcttgcaaagctgagaaggtgaaattcctctggctatattgttgaccaaaggccctcctctgtaagagtgaattgcacgctcacttgaaactatcttgagggactaaggtgtacaatcctggtgcttatgcagtttggggctctaggtagacacgagctggctttgaaattgtagattcctacactccccctttctggagttctgggtctaagtgaattgactcctatttctgttgtgaatgttgtagtttcccttcccattctcttggtggccctggaagcttctaggcacagtgtgccaccctgattattcccaccactccatccaacttttctctctctgtggtgtctgcaccacaagctgcctaccctccaggtgcctcaatggtccggccaccagttgtgcctcggcgccccccggcccacatcagcagtgtcaggcaggcctccacccaggtgccacgcacggtgcctcatacccagagagtagccaacattggtactcagaccacaggacccagtggggtaggatgctgtacaccaggccggccgctcctgccgtgcaaatgttcctcagcagcacatagcacctatcgggtccaggagccggctgtgcacatcccaggacaggagcccctgaccgcgtccatgctggctgcggcgcccctgcatgagcaaaagcagatgattggcccagagacggaaagtacaaagactagtaaaatacatccttgcccttaaggagctaagtacccaaaacctgtaatccatcttgagtcaccagagtacggttgctcagaaacagcagtggtgcggtggaaagggcatcaaccctgcgatccggacaagtcactccatccctctgatcatgcgtgcccacctaccacatgaggatatcacttcatagacttgctggaagggttcattgtgttagcctgttccctgagctctcttcgtgatcaagaagactgatcagataaatcaagagacttgcccaaaattacctaggaaatctgtagcagcagcagaaccaaactccggtccttgctaaatctagataccaggctagcttttctatggacccagaattaacccatacaaatgtacaagcttttccagaccagctggggtgagatgaatgaaaatggcagcaacatcaatacctcagcttcttcagcaacttcatcaagtaaggctgccatgaggaagtgggcctaaaggagagttttctagaacaaagaagggggcaaaggagtggcttgaaactgcaaaaagtgcagacaaaaaaaaaaaaaaaaagaatgaaatctggagaggatgtgaggagaggtctagcaaaatgattaaaaatttggacttagcatcaaagtcaaacagatccatattcaaatcgtggctcttccatgtcttcactatgtaaccccgagggagccaatttaactctcttggactcctcctttctaagcattttatccacagggccataataaagatc

SEQ ID NO: 295423 - DNA, 2018 bp, Homo sapiens
aaatttctttactatctacactattctaccctaagatgccaatgtctactgagactctccaaaacaggcacagattatccagcatttccccagcttagatggtcatttttttgtgggatgcctgttaacatctcccctggatgttaatgttctgaggagcatggtttgggaaaggacctcgtgggacttacaggaagtagaaagatgtcacccattaaaggccaccacggtaagaacattcctctccttttagcagttgcttaagctgcacaagttggagtaagatgtcaccctttttatccaggtcattgggttagctgacagggagccaagattgaaatctaagatctttgccctgcaggattcagggctaatggacatcctgagatgggaggaaggagctttcattacagccttgtgggtcttgactcaccagtccctgcaggagccagtggagttcctgccatggtgtccctgaggaggtgtagcttctcacctaccctgccgccaagcccctcagtctgggtcttcttttcccatgcagcctccagcccaggctgcatactatggctgtggcccagtgacacccacccagcctgcccccaggtggacatcccagccacctagaccttcctgtgagtgacccagccccttccactctcagactggcctattggtgtgggccccgtgaggcagtcataacacagggatgaaacctggctctgccacttcccaaggtgggtgacttcacttctctgagcctcagtttcctcttctgagcatgggcctgaatgagacgtgtgtaaagtaccaagcacagtggtgagccaatggaagacacgcagctagccaccagcagtcatcaccaaagatgcctctgatttgtgactctgaaaattcttgcaaagctgagaaggtgaaattcctctggctatattgttgaccaaaggccctcctctgtaagagtgaattgcacgctcacttgaaactatcttgagggactaaggtgtacaatcctggtgcttatgcagtttggggctctaggtagacacgagctggctttgaaattgtagattcctacactccccctttctggagttctgggtctaagtgaattgactcctatttctgttgtgaatgttgtagtttcccttcccattctcttggtggccctggaagcttctaggcacagtgtgccaccctgattattcccaccactccatccaacttttctctctctgtggtgtctgcaccacaagctgcctaccctccaggtgcctcaatggtccggccaccagttgtgcctcggcgccccccggcccacatcagcagtgtcaggcaggcctccacccaggtgccacgcacggtgcctcatacccagagagtagccaacattggtactcagaccacaggacccagtggggtaggatgctgtacaccaggccggccgctcctgccgtgcaaatgttcctcagcagcacatagcacctatcgggtccaggagccggctgtgcacatcccaggacaggagcccctgaccgcgtccatgctggctgcggcgcccctgcatgagcaaaagcagatgattggcacctgttatcttgtcttaaaacgctggtcagactggatggtcctgagctttcttccactgctgctgtcctgtgactttgaggggagcgtctctacccccttatccatgatgtccacacccagctggctggcaagatcacgggcatgctgctggagattgacaactcagagctgttgctcatgctggagtctccagaatccctccatgccaagaaaaggaaatcctcgcttccatggctgccaaaaggacagtgtttctggctctcagccctaaggccctgcaaactctaacttatttcccaattagtctgtatctatacttgggctctgtatgtgaatgaaggttggtcacccatccagcctattaccttttgctttgtgtattaaaagtgctgcaaaatctgcgtggggtcccaggaggccctttt

SEQ ID NO: 295424 - DNA, 1935 bp, Homo sapiens
aaatttctttactatctacactattctaccctaagatgccaatgtctactgagactctccaaaacaggcacagattatccagcatttccccagcttagatggtcatttttttgtgggatgcctgttaacatctcccctggatgttaatgttctgaggagcatggtttgggaaaggacctcgtgggacttacaggaagtagaaagatgtcacccattaaaggccaccacggtaagaacattcctctccttttagcagttgcttaagctgcacaagttggagtaagatgtcaccctttttatccaggtcattgggttagctgacagggagccaagattgaaatctaagatctttgccctgcaggattcagggctaatggacatcctgagatgggaggaaggagctttcattacagccttgtgggtcttgactcaccagtccctgcaggagccagtggagttcctgccatggtgtccctgaggaggtgtagcttctcacctaccctgccgccaagcccctcagtctgggtcttcttttcccatgcagcctccagcccaggctgcatactatggctgtggcccagtgacacccacccagcctgcccccaggtggacatcccagccacctagaccttcctgtgagtgacccagccccttccactctcagactggcctattggtgtgggccccgtgaggcagtcataacacagggatgaaacctggctctgccacttcccaaggtgggtgacttcacttctctgagcctcagtttcctcttctgagcatgggcctgaatgagacgtgtgtaaagtaccaagcacagtggtgagccaatggaagacacgcagctagccaccagcagtcatcaccaaagatgcctctgatttgtgactctgaaaattcttgcaaagctgagaaggtgaaattcctctggctatattgttgaccaaaggccctcctctgtaagagtgaattgcacgctcacttgaaactatcttgagggactaaggtgtacaatcctggtgcttatgcagtttggggctctaggtagacacgagctggctttgaaattgtagattcctacactccccctttctggagttctgggtctaagtgaattgactcctatttctgttgtgaatgttgtagtttcccttcccattctcttggtggccctggaagcttctaggcacagtgtgccaccctgattattcccaccactccatccaacttttctctctctgtggtgtctgcaccacaagctgcctaccctccaggtgcctcaatggtccggccaccagttgtgcctcggcgccccccggcccacatcagcagtgtcaggcaggcctccacccaggtgccacgcacggtgcctcatacccagagagtagccaacattggtactcagaccacaggacccagtggggtaggatgctgtacaccaggccggccgctcctgccgtgcaaatgttcctcagcagcacatagcacctatcgggtccaggagccggctgtgcacatcccaggacaggagcccctgaccgcgtccatgctggctgcggcgcccctgcatgagcaaaagcagatgattggggagcgtctctacccccttatccatgatgtccacacccagctggctggcaagatcacgggcatgctgctggagattgacaactcagagctgttgctcatgctggagtctccagaatccctccatgccaagaaaaggaaatcctcgcttccatggctgccaaaaggacagtgtttctggctctcagccctaaggccctgcaaactctaacttatttcccaattagtctgtatctatacttgggctctgtatgtgaatgaaggttggtcacccatccagcctattaccttttgctttgtgtattaaaagtgctgcaaaatctgcgtggggtcccaggaggccctttt

SEQ ID NO: 295425 - DNA, 2210 bp, Homo sapiens
aaatttctttactatctacactattctaccctaagatgccaatgtctactgagactctccaaaacaggcacagattatccagcatttccccagcttagatggtcatttttttgtgggatgcctgttaacatctcccctggatgttaatgttctgaggagcatggtttgggaaaggacctcgtgggacttacaggaagtagaaagatgtcacccattaaaggccaccacggtaagaacattcctctccttttagcagttgcttaagctgcacaagttggagtaagatgtcaccctttttatccaggtcattgggttagctgacagggagccaagattgaaatctaagatctttgccctgcaggattcagggctaatggacatcctgagatgggaggaaggagctttcattacagccttgtgggtcttgactcaccagtccctgcaggagccagtggagttcctgccatggtgtccctgaggaggtgtagcttctcacctaccctgccgccaagcccctcagtctgggtcttcttttcccatgcagcctccagcccaggctgcatactatggctgtggcccagtgacacccacccagcctgcccccaggtggacatcccagccacctagaccttcctgtgagtgacccagccccttccactctcagactggcctattggtgtgggccccgtgaggcagtcataacacagggatgaaacctggctctgccacttcccaaggtgggtgacttcacttctctgagcctcagtttcctcttctgagcatgggcctgaatgagacgtgtgtaaagtaccaagcacagtggtgagccaatggaagacacgcagctagccaccagcagtcatcaccaaagatgcctctgatttgtgactctgaaaattcttgcaaagctgagaaggtgaaattcctctggctatattgttgaccaaaggccctcctctgtaagagtgaattgcacgctcacttgaaactatcttgagggactaaggtgtacaatcctggtgcttatgcagtttggggctctaggtagacacgagctggctttgaaattgtagattcctacactccccctttctggagttctgggtctaagtgaattgactcctatttctgttgtgaatgttgtagtttcccttcccattctcttggtggccctggaagcttctaggcacagtgtgccaccctgattattcccaccactccatccaacttttctctctctgtggtgtctgcaccacaagctgcctaccctccaggtgcctcaatggtccggccaccagttgtgcctcggcgccccccggcccacatcagcagtgtcaggcaggcctccacccaggtgccacgcacggtgcctcatacccagagagtagccaacattggtactcagaccacaggacccagtggggtaggatgctgtacaccaggccggccgctcctgccgtgcaaatgttcctcagcagcacatagcacctatcgggtccaggagccggctgtgcacatcccaggacaggagcccctgaccgcgtccatgctggctgcggcgcccctgcatgagcaaaagcagatgattgtggtgagtggctggttctcctactgtggagcaagaagaggagggctgcgagctggctagcctgctgggaaacacctcacctggtggtccaacgtgaggtcaaattccagctttgtcaccgacccccctactgggtgaccgtggccaagctggctctattctctaggcacctgttatcttgtcttaaaacgctggtcagactggatggtcctgagctttcttccactgctgctgtcctgtgactttgaggttgggagacagtccagatgtggggagatcaggggacaaagggaggagtaggggtatggtcttgggtttctgctgagaaatggcttgtaggtggggggttaaagttcctcacacctctcctgaacgggaggaagctgctgttcaccagtttccagtgctcaatgcgggcaggtggggcatctgtgcgtttggtaaatacatgatgtttcccatagattctggattccttgtgcaattcatcttcacccctagtgtccatggcaggccctgataaaaatgccactaagtgaacacaagcttgttcctggttggcaggttctttactgcatggcccccgagacctccagaccctttactgaaggcccccattacc

SEQ ID NO: 295426 - DNA, 2952 bp, Homo sapiens
  misc_feature (2413)..(2413): n is a, c, g, or t
aaatttctttactatctacactattctaccctaagatgccaatgtctactgagactctccaaaacaggcacagattatccagcatttccccagcttagatggtcatttttttgtgggatgcctgttaacatctcccctggatgttaatgttctgaggagcatggtttgggaaaggacctcgtgggacttacaggaagtagaaagatgtcacccattaaaggccaccacggtaagaacattcctctccttttagcagttgcttaagctgcacaagttggagtaagatgtcaccctttttatccaggtcattgggttagctgacagggagccaagattgaaatctaagatctttgccctgcaggattcagggctaatggacatcctgagatgggaggaaggagctttcattacagccttgtgggtcttgactcaccagtccctgcaggagccagtggagttcctgccatggtgtccctgaggaggtgtagcttctcacctaccctgccgccaagcccctcagtctgggtcttcttttcccatgcagcctccagcccaggctgcatactatggctgtggcccagtgacacccacccagcctgcccccaggtggacatcccagccacctagaccttcctgtgagtgacccagccccttccactctcagactggcctattggtgtgggccccgtgaggcagtcataacacagggatgaaacctggctctgccacttcccaaggtgggtgacttcacttctctgagcctcagtttcctcttctgagcatgggcctgaatgagacgtgtgtaaagtaccaagcacagtggtgagccaatggaagacacgcagctagccaccagcagtcatcaccaaagatgcctctgatttgtgactctgaaaattcttgcaaagctgagaaggtgaaattcctctggctatattgttgaccaaaggccctcctctgtaagagtgaattgcacgctcacttgaaactatcttgagggactaaggtgtacaatcctggtgcttatgcagtttggggctctaggtagacacgagctggctttgaaattgtagattcctacactccccctttctggagttctgggtctaagtgaattgactcctatttctgttgtgaatgttgtagtttcccttcccattctcttggtggccctggaagcttctaggcacagtgtgccaccctgattattcccaccactccatccaacttttctctctctgtggtgtctgcaccacaagctgcctaccctccaggtgcctcaatggtccggccaccagttgtgcctcggcgccccccggcccacatcagcagtgtcaggcaggcctccacccaggtgccacgcacggtgcctcatacccagagagtagccaacattggtactcagaccacaggacccagtggggtaggatgctgtacaccaggccggccgctcctgccgtgcaaatgttcctcagcagcacatagcacctatcgggtccaggagccggctgtgcacatcccaggacaggagcccctgaccgcgtccatgctggctgcggcgcccctgcatgagcaaaagcagatgattggcacctgttatcttgtcttaaaacgctggtcagactggatggtcctgagctttcttccactgctgctgtcctgtgactttgaggggagcgtctctacccccttatccatgatgtccacacccagctggctggcaagatcacgggcatgctgctggagattgacaactcagagctgttgctcatgctggagtctccagaatccctccatgccaaggtaagcaggagcccgggcagcagggagcccgagggggcaggaggagagctaacgacaagggctctcctagtggagccagtggatagctgtttggccagataaagtgtttcttcttgctaatacctgaaggcctgctgaatcttaagagtggaaggggccttaggtaagggtttgctacttcagcccttccgtagactaattctgtgttgttctgtaggtaggtcttttggtacaaggaagtgtgttgtgactcagtgtaagggttaagatttttccagctgtccagcaatgtacctctgtgtcaaaggtgacagacagggccatgggatcttgcaagcagtggtggatgggagggttccacagaaaccctgtggatggaggaggatcctgtatccaggatggtgagcgagggggagatcaaggctcttctgtgacctgctaagatagctgcactaagcccccccgccactcatgtctcacagatagacgaggcagtggccgtgctgcaggcacaccaggctatggagcagccgaaggcgtacatgcactgaaaccaggtgggtggaatggtgacagaagcagctgagcccgggagaagctgtaaggaaanaggcagggactgactttcacaaacactgagaattgcgccgtgttcctggctttctctgaagcaccaaagagtttggaggaagttgtgagaatcagaggagatgattaactgtgatcggaatggggggtggtggagggtgaaggaggtgccctcttgccagctgccctgcctggcttcatgcagaatagtttgggctttcccagggccctgcctggctccattctgcctgcctgaaggcctggccaggatgtaaccaccttctttattgaagactgggtgtctgccatactttaaaaacacttatttttacctttttgtcctcagaaaaggaaatcctcgcttccatggctgccaaaaggacagtgtttctggctctcagccctaaggccctgcaaactctaacttatttcccaattagtctgtatctatacttgggctctgtatgtgaatgaaggttggtcacccatccagcctattaccttttgctttgtgtattaaaagtgctgcaaaatctgcgtggggtcccaggaggccctttt

SEQ ID NO: 295427 - DNA, 1919 bp, Homo sapiens
aaatttctttactatctacactattctaccctaagatgccaatgtctactgagactctccaaaacaggcacagattatccagcatttccccagcttagatggtcatttttttgtgggatgcctgttaacatctcccctggatgttaatgttctgaggagcatggtttgggaaaggacctcgtgggacttacaggaagtagaaagatgtcacccattaaaggccaccacggtaagaacattcctctccttttagcagttgcttaagctgcacaagttggagtaagatgtcaccctttttatccaggtcattgggttagctgacagggagccaagattgaaatctaagatctttgccctgcaggattcagggctaatggacatcctgagatgggaggaaggagctttcattacagccttgtgggtcttgactcaccagtccctgcaggagccagtggagttcctgccatggtgtccctgaggaggtgtagcttctcacctaccctgccgccaagcccctcagtctgggtcttcttttcccatgcagcctccagcccaggctgcatactatggctgtggcccagtgacacccacccagcctgcccccaggtggacatcccagccacctagaccttcctgtgagtgacccagccccttccactctcagactggcctattggtgtgggccccgtgaggcagtcataacacagggatgaaacctggctctgccacttcccaaggtgggtgacttcacttctctgagcctcagtttcctcttctgagcatgggcctgaatgagacgtgtgtaaagtaccaagcacagtggtgagccaatggaagacacgcagctagccaccagcagtcatcaccaaagatgcctctgatttgtgactctgaaaattcttgcaaagctgagaaggtgaaattcctctggctatattgttgaccaaaggccctcctctgtaagagtgaattgcacgctcacttgaaactatcttgagggactaaggtgtacaatcctggtgcttatgcagtttggggctctaggtagacacgagctggctttgaaattgtagattcctacactccccctttctggagttctgggtctaagtgaattgactcctatttctgttgtgaatgttgtagtttcccttcccattctcttggtggccctggaagcttctaggcacagtgtgccaccctgattattcccaccactccatccaacttttctctctctgtggtgtctgcaccacaagctgcctaccctccaggtgcctcaatggtccggccaccagttgtgcctcggcgccccccggcccacatcagcagtgtcaggcaggcctccacccaggtgccacgcacggtgcctcatacccagagagtagccaacattggtactcagaccacaggacccagtggggtaggatgctgtacaccaggccggccgctcctgccgtgcaaatgttcctcagcagcacatagcacctatcgggtccaggagccggctgtgcacatcccaggacaggagcccctgaccgcgtccatgctggctgcggcgcccctgcatgagcaaaagcagatgattggggagcgtctctacccccttatccatgatgtccacacccagctggctggcaagatcacgggcatgctgctggagattgacaactcagagctgttgctcatgctggagtctccagaatccctccatgccaagatttcagcttaaaatgccacccagagaccaagttcattctgtcaactgatctccagcacctggtatgtcacctagcaaccaccaaggcccaatcagttatgtgttgaatgagtgaataatgctaactgtatactttttctgctcctacaaccatgtttcctatattacaagaataaaaaccacagactgtatcactaca

SEQ ID NO: 295428 - DNA, 929 bp, Homo sapiens
cttacaggcacatgccaccatgaccagctaagttttgtatttttattagagatggggtttcaccatgttggccaggctggtttcaaactcctgatctcaggtgatccacccacctcagcctcccaaagtactgtgattacaggtgtgagccaccatgcctggcctcacccagaaacattttgaatgagcttaatggaagtagaagtctttgttagtagttctctgtaaacattttcactttcttcatgggacgatcctttccgcccccacttaaggcacccagtcctggctgggccctggacacattgctgagatgggctgaccaccaataccaggcccagtcattaaaagtacctgatgttagaagatcaagtgttaaatgtcatagcctagaaggagcagttctgggagaagaacccagatgtcctcagtgctccactccatacgagccctgggatgctggggtgtgagctaggccgtgcacaagccattagaaggtgttccacacgggagcgtctctacccccttatccatgatgtccacacccagctggctggcaagatcacgggcatgctgctggagattgacaactcagagctgttgctcatgctggagtctccagaatccctccatgccaagatagacgaggcagtggccgtgctgcaggcacaccaggctatggagcagccgaaggcgtacatgcactgaaaccagaaaaggaaatcctcgcttccatggctgccaaaaggacagtgtttctggctctcagccctaaggccctgcaaactctaacttatttcccaattagtctgtatctatacttgggctctgtatgtgaatgaaggttggtcacccatccagcctattaccttttgctttgtgtattaaaagtgctgcaaaatctgcgtggggtcccaggaggccctttt

SEQ ID NO: 295429 - DNA, 1499 bp, Homo sapiens
  misc_feature (1482)..(1482): n is a, c, g, or t
aaatttctttactatctacactattctaccctaagatgccaatgtctactgagactctccaaaacaggcacagattatccagcatttccccagcttagatggtcatttttttgtgggatgcctgttaacatctcccctggatgttaatgttctgaggagcatggtttgggaaaggacctcgtgggacttacaggaagtagaaagatgtcacccattaaaggccaccacggtaagaacattcctctccttttagcagttgcttaagctgcacaagttggagtaagatgtcaccctttttatccaggtcattgggttagctgacagggagccaagattgaaatctaagatctttgccctgcaggattcagggctaatggacatcctgagatgggaggaaggagctttcattacagccttgtgggtcttgactcaccagtccctgcaggagccagtggagttcctgccatggtgtccctgaggaggtgtagcttctcacctaccctgccgccaagcccctcagtctgggtcttcttttcccatgcagcctccagcccaggctgcatactatggctgtggcccagtgacacccacccagcctgcccccaggtggacatcccagccacctagaccttcctgtgagtgacccagccccttccactctcagactggcctattggtgtgggccccgtgaggcagtcataacacagggatgaaacctggctctgccacttcccaaggtgggtgacttcacttctctgagcctcagtttcctcttctgagcatgggcctgaatgagacgtgtgtaaagtaccaagcacagtggtgagccaatggaagacacgcagctagccaccagcagtcatcaccaaagatgcctctgatttgtgactctgaaaattcttgcaaagctgagaaggtgaaattcctctggctatattgttgaccaaaggccctcctctgtaagagtgaattgcacgctcacttgaaactatcttgagggactaaggtgtacaatcctggtgcttatgcagtttggggctctaggtagacacgagctggctttgaaattgtagattcctacactccccctttctggagttctgggtctaagtgaattgactcctatttctgttgtgaatgttgtagtttcccttcccattctcttggtggccctggaagcttctaggcacagtgtgccaccctgattattcccaccactccatccaacttttctctctctgtggtgtctgcaccacaagctgcctaccctccaggtgcctcaatggtccggccaccagttgtgcctcggcgccccccggcccacatcagcagtgtcaggcaggcctccacccaggtgccacgcacggtgcctcatacccagagagtagccaacattggtactcagaccacaggacccagtggggtaggatgctgtacaccaaatcggcaaagtgcaggaattggcgagcttcacaaaccttnattaacttcaccatgag

SEQ ID NO: 295430 - DNA, 2907 bp, Homo sapiens
ggcagagctcggcactgcgccggggcgcacggctcgggggacccaggcccagctaccttccctccgcccccgggctctgttctcactttccagcagtggaaggacgggaagcgggagccatgcagtccgaatcggggatcgtgccggatttcgaagtcggggaggagtttcatgaagagcccaaaacctattacgaactcaaaagtcaaccgctgaagagcagcagttccgccgagcatcctggggcctccaagcctccgataagctcctccagtatgacatcacgcatcttgctacgccagcaactcatgcgtgagcagatgcaggagcaggagcgcagggagcagcagcagaagctgcaggcggcccagttcatgcaacagagagtgcccgtgagtcagacaccagccataaacgtcagtgtgcccaccacccttccctctgccacgcaggtgccgatggaagtccttaaggtgcagacccacctcgaaaaccccaccaagtaccacatacagcaagcccaacggcagcaggtaaagcagtacctttctaccactttagcaaataaacatgccaaccaagtcctgagcttgccatgtccaaaccagcctggcgatcatgtcatgccaccggtgccggggagcagcgcacccaacagccccatggctatgcttacgcttaactccaactgtgaaaaagagggattttataagtttgaagagcaaaacagggcagagagcgagtgcccaggcatgaacacacattcacgagcgtcctgtatgcagatggatgatgtaatcgatgacatcattagcctagaatcaagttataatgaggaaatcttgggcttgatggatcctgctttgcaaatggcaaatacgttgcctgtctcgggaaacttgattgatctttatggaaaccaaggtctgcccccaccaggcctcaccatcagcaactcctgtccagccaaccttcccaacataaaaagggagctcacagagtctgaagcaagagcactggccaaagagaggcagaaaaaggacaatcacaacctgattgaacgaagaagaagatttaacataaatgaccgcattaaagaactaggtactttgattcccaagtcaaatgatccagacatgcgctggaacaagggaaccatcttaaaagcatccgtggactatatccgaaagttgcaacgagaacagcaacgcgcaaaagaacttgaaaaccgacagaagaaactggagcacgccaaccggcatttgttgctcagaatacaggaacttgaaatgcaggctcgagctcatggactttcccttattccatccacgggtctctgctctccagatttggtgaatcggatcatcaagcaagaacccgttcttgagaactgcagccaagacctccttcagcatcatgcagacctaacctgtacaacaactctcgatctcacggatggcaccatcaccttcaacaacaacctcggaactgggactgaggccaaccaagcctatagtgtccccacaaaaatgggatccaaactggaagacatcctgatggacgacaccctttctcccgtcggtgtcactgatccactcctttcctcagtgtcccccggagcttccaaaacaagcagccggaggagcagtatgagcatggaagagacggagcacacttgttagcgaatcctccctgcactgcattcgcacaaactgcttcctttcttgattcgtagatttaataacttacctgaaggggttttcttgataattttcctttaatatgaaattttttttcatgctttatcaatagcccaggatatattttatttttagaattttgtgaaacagacttgtatattctattttacaactacaaatgcctccaaagtattgtacaaataagtgtgcagtatctgtgaactgaattcaccacagactttagctttctgagcaagaggattttgcgtcagagaaatgtctgtccatttttattcaggggaaacttgatttgagatttttatgcctgtgacttccttggaaatcaaatgtaaagtttaattgaaagaatgtaaagcaaccaaaaagaaaaaaaaaaagaaagaaagaggaaaagaaatccatactaacccttttccattttataaatgtattgattcattggtactgccttaaagatacagtacccctctagctttgtttagtctttatactgcaaactatttaaagaaatatgtattctgtaaaagaaaaaaaaaatgcggccttttcatgaggatcgtctggttagaaaacataactgataccaaccgaaactgaagggagttagaccaaggctctgaaatataaagtctaatcttgctctcttttattctgtgctgttacagttttcttcatcaatgagtgtgatccagtttttcataagatattttattttgaaatggaaattaatgtcctctcaaagtaaaatattgaggagcactgaaagtatgttttacttttttttaatttattttggcttttgataagaaaaccgaactgggcatatttctaattgggctttactatttttatttttaaattatgttttactgttcatttgatttgtacagattctttattatcattgttcttttcaatatatttgtattaatttgtaagaatatgcatcttaaaatggcaagttttccatatttttacaactcactggtggttttccgcattctttgtacacccatgaaagaaaacttttatgcaaggtcttgcatttaaaagacagctttgcgaatattttgtaaattacagtctcactcagaactgtttttggacacatttaaggtgtagtattaataggttaaaaccaggctttctagaaagaataaacttacatatttatttttaggacatg

SEQ ID NO: 295431 - DNA, 2605 bp, Homo sapiens
gggataccttgtttatagtaccttctctttgccagtccatcttcaaattggaattatagaaagtagagggagggatagtctaccgtctctcactggattggtgccacctaaaacattgttatgctggaaatgctagaatataatcactatcaggtgcagacccacctcgaaaaccccaccaagtaccacatacagcaagcccaacggcagcaggtaaagcagtacctttctaccactttagcaaataaacatgccaaccaagtcctgagcttgccatgtccaaaccagcctggcgatcatgtcatgccaccggtgccggggagcagcgcacccaacagccccatggctatgcttacgcttaactccaactgtgaaaaagagggattttataagtttgaagagcaaaacagggcagagagcgagtgcccaggcatgaacacacattcacgagcgtcctgtatgcagatggatgatgtaatcgatgacatcattagcctagaatcaagttataatgaggaaatcttgggcttgatggatcctgctttgcaaatggcaaatacgttgcctgtctcgggaaacttgattgatctttatggaaaccaaggtctgcccccaccaggcctcaccatcagcaactcctgtccagccaaccttcccaacataaaaagggagctcacagcgtgtatttttcccacagagtctgaagcaagagcactggccaaagagaggcagaaaaaggacaatcacaacctgattgaacgaagaagaagatttaacataaatgaccgcattaaagaactaggtactttgattcccaagtcaaatgatccagacatgcgctggaacaagggaaccatcttaaaagcatccgtggactatatccgaaagttgcaacgagaacagcaacgcgcaaaagaacttgaaaaccgacagaagaaactggagcacgccaaccggcatttgttgctcagaatacaggaacttgaaatgcaggctcgagctcatggactttcccttattccatccacgggtctctgctctccagatttggtgaatcggatcatcaagcaagaacccgttcttgagaactgcagccaagacctccttcagcatcatgcagacctaacctgtacaacaactctcgatctcacggatggcaccatcaccttcaacaacaacctcggaactgggactgaggccaaccaagcctatagtgtccccacaaaaatgggatccaaactggaagacatcctgatggacgacaccctttctcccgtcggtgtcactgatccactcctttcctcagtgtcccccggagcttccaaaacaagcagccggaggagcagtatgagcatggaagagacggagcacacttgttagcgaatcctccctgcactgcattcgcacaaactgcttcctttcttgattcgtagatttaataacttacctgaaggggttttcttgataattttcctttaatatgaaattttttttcatgctttatcaatagcccaggatatattttatttttagaattttgtgaaacagacttgtatattctattttacaactacaaatgcctccaaagtattgtacaaataagtgtgcagtatctgtgaactgaattcaccacagactttagctttctgagcaagaggattttgcgtcagagaaatgtctgtccatttttattcaggggaaacttgatttgagatttttatgcctgtgacttccttggaaatcaaatgtaaagtttaattgaaagaatgtaaagcaaccaaaaagaaaaaaaaaaagaaagaaagaggaaaagaaatccatactaacccttttccattttataaatgtattgattcattggtactgccttaaagatacagtacccctctagctttgtttagtctttatactgcaaactatttaaagaaatatgtattctgtaaaagaaaaaaaaaatgcggccttttcatgaggatcgtctggttagaaaacataactgataccaaccgaaactgaagggagttagaccaaggctctgaaatataaagtctaatcttgctctcttttattctgtgctgttacagttttcttcatcaatgagtgtgatccagtttttcataagatattttattttgaaatggaaattaatgtcctctcaaagtaaaatattgaggagcactgaaagtatgttttacttttttttaatttattttggcttttgataagaaaaccgaactgggcatatttctaattgggctttactatttttatttttaaattatgttttactgttcatttgatttgtacagattctttattatcattgttcttttcaatatatttgtattaatttgtaagaatatgcatcttaaaatggcaagttttccatatttttacaactcactggtggttttccgcattctttgtacacccatgaaagaaaacttttatgcaaggtcttgcatttaaaagacagctttgcgaatattttgtaaattacagtctcactcagaactgtttttggacacatttaaggtgtagtattaataggttaaaaccaggctttctagaaagaataaacttacatatttatttttaggacatg

SEQ ID NO: 295432 - DNA, 2853 bp, Homo sapiens
ggcagagctcggcactgcgccggggcgcacggctcgggggacccaggcccagctaccttccctccgcccccgggctctgttctcactttccagcagtggaaggacgggaagcgggagccatgcagtccgaatcggggatcgtgccggatttcgaagtcggggaggagtttcatgaagagcccaaaacctattacgaactcaaaagtcaaccgctgaagagcagcagttccgccgagcatcctggggcctccaagcctccgataagctcctccagtatgacatcacgcatcttgctacgccagcaactcatgcgtgagcagatgcaggagcaggagcgcagggagcagcagcagaagctgcaggcggcccagttcatgcaacagagagtgcccgtgagtcagacaccagccataaacgtcagtgtgcccaccacccttccctctgccacgcaggtgccgatggaagtccttaaggtgcagacccacctcgaaaaccccaccaagtaccacatacagcaagcccaacggcagcaggtaaagcagtacctttctaccactttagcaaataaacatgccaaccaagtcctgagcttgccatgtccaaaccagcctggcgatcatgtcatgccaccggtgccggggagcagcgcacccaacagccccatggctatgcttacgcttaactccaactgtgaaaaagagggattttataagtttgaagagcaaaacagggcagagagcgagtgcccaggcatgaacacacattcacgagcgtcctgtatgcagatggatgatgtaatcgatgacatcattagcctagaatcaagttataatgaggaaatcttgggcttgatggatcctgctttgcaaatggcaaatacgttgcctgtctcgggaaacttgattgatctttatggaaaccaaggtctgcccccaccaggcctcaccatcagcaactcctgtccagccaaccttcccaacataaaaagggagctcacagagtctgaagcaagagcactggccaaagagaggcagaaaaaggacaatcacaacctgattgaacgaagaagaagatttaacataaatgaccgcattaaagaactaggtactttgattcccaagtcaaatgatccagacatgcgctggaacaagggaaccatcttaaaagcatccgtggactatatccgaaagttgcaacgagaacagcaacgcgcaaaagaacttgaaaaccgacagaagaaactggagcacgccaaccggcatttgttgctcagaatacaggaacttgaaatgcaggctcgagctcatggactttcccttattccatccacgggtctctgctctccagatttggtgaatcggatcatcaagcaagaacccgttcttgagaactgcagccaagacctccttcagcatcatgcagacctaacctgtacaacaactctcgatctcacggatggcaccatcaccttcaacaacaacctcggaactgggactgaggccaaccaagcctatagtgtccccacaaaaatgggatccaaactggaagacatcctgatggacgacaccctttctcccgtcggtgtcactgatccactcctttcctcagtgtcccccggagcttcctagcgaatcctccctgcactgcattcgcacaaactgcttcctttcttgattcgtagatttaataacttacctgaaggggttttcttgataattttcctttaatatgaaattttttttcatgctttatcaatagcccaggatatattttatttttagaattttgtgaaacagacttgtatattctattttacaactacaaatgcctccaaagtattgtacaaataagtgtgcagtatctgtgaactgaattcaccacagactttagctttctgagcaagaggattttgcgtcagagaaatgtctgtccatttttattcaggggaaacttgatttgagatttttatgcctgtgacttccttggaaatcaaatgtaaagtttaattgaaagaatgtaaagcaaccaaaaagaaaaaaaaaaagaaagaaagaggaaaagaaatccatactaacccttttccattttataaatgtattgattcattggtactgccttaaagatacagtacccctctagctttgtttagtctttatactgcaaactatttaaagaaatatgtattctgtaaaagaaaaaaaaaatgcggccttttcatgaggatcgtctggttagaaaacataactgataccaaccgaaactgaagggagttagaccaaggctctgaaatataaagtctaatcttgctctcttttattctgtgctgttacagttttcttcatcaatgagtgtgatccagtttttcataagatattttattttgaaatggaaattaatgtcctctcaaagtaaaatattgaggagcactgaaagtatgttttacttttttttaatttattttggcttttgataagaaaaccgaactgggcatatttctaattgggctttactatttttatttttaaattatgttttactgttcatttgatttgtacagattctttattatcattgttcttttcaatatatttgtattaatttgtaagaatatgcatcttaaaatggcaagttttccatatttttacaactcactggtggttttccgcattctttgtacacccatgaaagaaaacttttatgcaaggtcttgcatttaaaagacagctttgcgaatattttgtaaattacagtctcactcagaactgtttttggacacatttaaggtgtagtattaataggttaaaaccaggctttctagaaagaataaacttacatatttatttttaggacatg

SEQ ID NO: 295433 - DNA, 799 bp, Homo sapiens
gacgcgcatctaccattatagtatcatatagagtggtttcacaggcttaaaagtcctctgtgctctgcctatttcagtgttttatctttactcttattataggaacttgaaatgcaggctcgagctcatggactttcccttattccatccacgggtctctgctctccagatttggtgaatcggatcatcaagcaagaacccgttcttgagaactgcagccaagacctccttcagcatcatgcagacctaacctgtacaacaactctcgatctcacggatggcaccatcaccttcaacaacaacctcggaactgggactgaggccaaccaagcctatagtgtccccacaaaaatgggatccaaactggaagacatcctgatggacgacaccctttctcccgtcggtgtcactgatccactcctttcctcagtgtcccccggagcttccaaaacaagcagccggaggagcagtatgagcatggaagagacggagcacacttgttagcgaatcctccctgcactgcattcgcacaaactgcttcctttcttgattcgtagatttaataacttacctgaaggggttttcttgataattttcctttaatatgaaattttttttcatgctttatcaatagcccaggatatattttatttttagaattttgtgaaacagacttgtatattctattttacaactacaaatgcctccaaagtattgtacaaataagtgtgcagtatctgtgaactgaattcaccacagactttagctttctgagcaagaggattttgcgtcagagaaa

SEQ ID NO: 295434 - DNA, 2090 bp, Homo sapiens
gtgctgcggcgagctccgtccaaaagaaaatggggtttggtgtaaatctgggggtgtaatgttatcatatatcactctacctcgtaaaaccgacactgaaagctgccggacaacaaatcacaggtcaaaattatgagttcttcgtattatgtgaacgcgctttttagcaaatatacggcggggacttctctgttccaaaatgccgagccgacttcttgctcctttgcgcccaactcacagagaagcggctacggggcgggcgccggcgccttcgcctcgaccgttccgggcttatacaatgtcaacagccccctttatcagagcccctttgcgtccggctacggcctgggcgccgacgcctacggcaacctgccctgcgcctcctacgaccaaaacatccccgggctctgcagtgacctcgccaaaggcgcctgcgacaagacggacgagggcgcgctgcatggcgcggctgaggccaatttccgcatctacccctggatgcggtcttcaggacctgacaggaagcggggccgccagacctacacgcgctaccagacgctggagctggagaaggagttccacttcaaccgctacctgacgcggcgccgccgcattgaaatcgcccacgcgctctgcctcaccgagcgccagattaagatctggttccagaaccgccgcatgaagtggaagaaagagcataaggacgaaggtccgactgccgccgcagctcccgagggcgccgtgccctctgccgccgccactgctgccgcggacaaggccgacgaggaggacgatgatgaagaagaggaagacgaggaggaatgaggggccgatccggggccctctctgcaccggacagtcggaaaagcgtctttaagagactcactggttttacttacaaaaatgggaaaaataaaagaaaaagaaggaagggctggtcatggtggaggtgcgcaaggagaaacagttccagaaagtgatcacagaatacctgaatgcccaagagtcagcctggcgctcttggctgacctccaacattttaatctaagtggccgggacaaaattgaccaaaactagggggaggaggggaccagtagtactaatgacttactacaggtcattatgaaataagctaacaatactgaatctttggcgagaaaattttgctgctaagggcactgcactgtaatttgttagtaaaggctaatatagtagagattaaagctccgttgaggacaggtgccttgtctttaacacgttgtattcatcacatttaacataggagtaattgctgagggatgacttgattgtactacggtgagatgaagggttaagatttcttccccatcaccagtagcctccctagctggtgtccctgtctccatactctcctgaatccaccttccactattgtccgctggccctttccagcctgtaaactggacagttttcattcctctgcctaacatccagtcgtagcagcccatcccatctctttaaggataaaacccaaattcttggtatagtaaagctaaaccaagcgctctccctggaagggctcctgtgtttcaccaaagctgacttacgtactttccccatcttcccaggcatcttgtacgtcgttacatttatcatattggaaggtaataaatgatcttgttttcctcttttcctgggctccttattaagagcagggaacctaatttatatcctcagggcagaacaggtattcagaaaagaataatgcaagaggaaaaaagtttaatataaactagggagatcgtaacattggctaatcacgagcaaatatttatagaagacccactgtgtgctaaatggctcctaatatatacttaagatattctcccagcttggaaattctgctcacttcttgctcttgcttgcttctctggtgggcttccatccaaatttggccatgacatcagatcatatggttaatattaacaaatattgtataaattgttttcatacttaatatccaacaggttgtcaatttacgtactactggtgccttatctgtttttactgtcccatacactgcccatctggaataagcttagtgttaaaaa

SEQ ID NO: 295435 - DNA, 1591 bp, Homo sapiens
gtaaaaaaacaaaaactaaaacaaaaaagcaacccagtccccaacctgcactctacccacccccatcacctactccagctcccaacttttgtggactgaacggccgcagagactgggtcgccttggattccctctgcctcaccgagcgccagattaagatctggttccagaaccgccgcatgaagtggaagaaagagcataaggacgaaggtccgactgccgccgcagctcccgagggcgccgtgccctctgccgccgccactgctgccgcggacaaggccgacgaggaggacgatgatgaagaagaggaagacgaggaggaatgaggggccgatccggggccctctctgcaccggacagtcggaaaagcgtctttaagagactcactggttttacttacaaaaatgggaaaaataaaagaaaaagaaggaagggctggtcatggtggaggtgcgcaaggagaaacagttccagaaagtgatcacagaatacctgaatgcccaagagtcagcctggcgctcttggctgacctccaacattttaatctaagtggccgggacaaaattgaccaaaactagggggaggaggggaccagtagtactaatgacttactacaggtcattatgaaataagctaacaatactgaatctttggcgagaaaattttgctgctaagggcactgcactgtaatttgttagtaaaggctaatatagtagagattaaagctccgttgaggacaggtgccttgtctttaacacgttgtattcatcacatttaacataggagtaattgctgagggatgacttgattgtactacggtgagatgaagggttaagatttcttccccatcaccagtagcctccctagctggtgtccctgtctccatactctcctgaatccaccttccactattgtccgctggccctttccagcctgtaaactggacagttttcattcctctgcctaacatccagtcgtagcagcccatcccatctctttaaggataaaacccaaattcttggtatagtaaagctaaaccaagcgctctccctggaagggctcctgtgtttcaccaaagctgacttacgtactttccccatcttcccaggcatcttgtacgtcgttacatttatcatattggaaggtaataaatgatcttgttttcctcttttcctgggctccttattaagagcagggaacctaatttatatcctcagggcagaacaggtattcagaaaagaataatgcaagaggaaaaaagtttaatataaactagggagatcgtaacattggctaatcacgagcaaatatttatagaagacccactgtgtgctaaatggctcctaatatatacttaagatattctcccagcttggaaattctgctcacttcttgctcttgcttgcttctctggtgggcttccatccaaatttggccatgacatcagatcatatggttaatattaacaaatattgtataaattgttttcatacttaatatccaacaggttgtcaatttacgtactactggtgccttatctgtttttactgtcccatacactgcccatctggaataagcttagtgttaaaaa

SEQ ID NO: 295436 - DNA, 134 bp, Homo sapiens
gacgaggaggaatgaggggccgatccggggccctctctgcaccggacagtcggaaaagcgtctttaagagactcactggttttacttacaaaaatgggaaaaataaaagaaaatgtaaaaaacaaaaacaaaaa

SEQ ID NO: 295437 - DNA, 1582 bp, Homo sapiens
ctccttcctggggcagtggagcagccacagccccagttcatctcgcgtttcctggagggccagtcgggtgtgaccatcaagcacgtggcctgtggggacttcttcactgcctgcctgactgacagaggcatcatcatgacattcggcagcggcagcaatgggtgcctaggccatggcagcctcactgacatcagccagcccaccattgtggaggctttgctgggctatgaaatggtgcaggtggcctgtggggcctctcacgtgctggccctgtccactgagcgagaactatttgcctggggccgtggagacagcggcagactggggctaggcaccagggagtcccacagctgcccccagcaggtgcccatgcccccaggacaggaagctcagcgagttgtatgtggtatcgattcctccatgatcctcactgtgcctggccaagccctagcctgtgggagcaacaggttcaacaagctgggcctggaccacctctccctgggggaggagcctgtcccccaccagcaagtggaggaggccctgagcttcacactactaggctctgcacccctggaccaggagcctctgctgagtatagacctgggcactgctcactcagctgctgtgactgcctcgggtgattgctacacttttggcagcaatcagcacggacagttgggcaccaatactcgccgaggcagtcgggcaccctgtaaggtccaaggccttgagggcatcaagatggcaatggtagcctgtggggatgccttcactgtagctattggggcagagagcgaagtgtactcttggggcaaaggggcgcgaggtcgattgggaaggagggatgaggatgccggactccctcggccagtgcagttggatgagacacacccttacacggtgacttccgtgtcctgttgccatggaaacaccctcctggctgttcgatcggtcacagatgagccggtccccccctgaggcacccggattcacctctggaccaccctgatattgcttctcctctgaatgctctgaaaagtgcaggtgcccaaggcatgacttgcagctgtctcctggattgtgtcatcatggggtatcagggctggcaaaacccctgctctgcttttggccttggatatggaaacctcaaccactttgttctcctaccacctctttgcccttcctaccccttcctcccttcagtcagtgtccccagggtccagcctggctagagttagaaggcagacctagcctttggaagcagggtggcctccagagccttgccataaaaaggctgaaggcagccgggcgcagtggctcacgcctgtaatcccagcactttgggaggctgaggcgggcggatcacgaggtcaggagatcgagaccatcctggctaacgtggtgaaaccccatctctactaaaaatacaaaaattaaccaggcatggtgacgggcgcctgtaatcccagctactctggaggctaaggcaagagaatcccttgaacccgggaggtgaagtttgcagtgagccgagatcgcaccactgcactccagcctggatgacagagcaagtctccctctc

SEQ ID NO: 295438 - DNA, 1757 bp, Homo sapiens
ctccttcctggggcagtggagcagccacagccccagttcatctcgcgtttcctggagggccagtcgggtgtgaccatcaagcacgtggcctgtggggacttcttcactgcctgcctgactgacagaggcatcatcatgacattcggcagcggcagcaatgggtgcctaggccatggcagcctcactgacatcagccagcccaccattgtggaggctttgctgggctatgaaatggtgcaggtggcctgtggggcctctcacgtgctggccctgtccactgagcgagaactatttgcctggggccgtggagacagcggcagactggggctaggcaccagggagtcccacagctgcccccagcaggtgcccatgcccccaggacaggaagctcagcgagttgtatgtggtatcgattcctccatgatcctcactgtgcctggccaagccctagcctgtgggagcaacaggttcaacaagctgggcctggaccacctctccctgggggaggagcctgtcccccaccagcaagtggaggaggccctgagcttcacactactaggctctgcacccctggaccaggagcctctgctgagtatagacctgggcactgctcactcagctgctgtgactgcctcgggtgattgctacacttttggcagcaatcagcacggacagttgggcaccaatactcgccgaggcagtcgggcaccctgtaaggtccaaggccttgagggcatcaagatggcaatggtagcctgtggggatgccttcactgtagctattggggcagagagcgaagtgtactcttggggcaaaggggcgcgaggtcgattgggaaggagggatgaggatgccggactccctcggccagtgcagttggatgagacacacccttacacggtgacttccgtgtcctgttgccatggaaacaccctcctggctgttcgatcggtcacagatgagccggtccccccctgaggcacccggattcacctctggaccaccctgatattgcttctcctctgaatgctctgaaaagtgcaggtgcccaaggcatgacttgcagctgtctcctggattgtgtcatcatggggtatcagggctggcaaaacccctgctctgcttttggccttggatatggaaacctcaaccactttgttctcctaccacctctttgcccttcctaccccttcctcccttcagtcagtgtccccagggtccagcctggctagagttagaaggcagacctagcctttggaagcagggtggcctccagagccttgccataaaaaggctgaaggcagccgggcgcagtggctcacgcctgtaatcccagcactttgggaggctgaggcgggcggatcacgaggtcaggagatcgagaccatcctggctaacgtggtgaaaccccatctctactaaaaatacaaaaaaattagctgggcgtggtggcacgcgcctgtagtcccagctgctcaggaggctgaggcaggagaatggcgtaaacccctccagcctgggcgacagaaccagactccgtctcaaaaaaaaaaaaaaaacaaaaaaggctgaaggcagcctgtagctccacacagaccctaccctttcccctagcccagttagaaaataagtctgggccggcggcggtggctcacacctgcataggcagtgctttggccaggaggatcccttgatcccttgtggccaggagttgggagaccagcctggggaccatagcgagaccgctgtctccacca

SEQ ID NO: 295439 - DNA, 950 bp, Homo sapiens
ctccttcctggggcagtggagcagccacagccccagttcatctcgcgtttcctggagggccagtcgggtgtgaccatcaagcacgtggcctgtggggacttcttcactgcctgcctgactgacagaggcatcatcatgacattcggcagcggcagcaatgggtgcctaggccatggcagcctcactgacatcagccagcccaccattgtggaggctttgctgggctatgaaatggtgcaggtggcctgtggggcctctcacgtgctggccctgtccactgagcgagaactatttgcctggggccgtggagacagcggcagactggggctaggcaccagggagtcccacagctgcccccagcaggtgcccatgcccccaggacaggaagctcagcgagttgtatgtggtatcgattcctccatgatcctcactgtgcctggccaagccctagcctgtgggagcaacaggttcaacaagctgggcctggaccacctctccctgggggaggagcctgtcccccaccagcaagtggaggaggccctgagcttcacactactaggctctgcacccctggaccaggagcctctgctgagtatagacctgggcactgctcactcagctgctgtgactgcctcgggtgattgctacacttttggcagcaatcagcacggacagttgggcaccaatactcgccgaggcagtcgggcaccctgtaaggtccaaggccttgagggcatcaagatggcaatggtagcctgtggggatgccttcactgtagctccacacagaccctaccctttcccctagcccagttagaaaataagtctgggccggcggcggtggctcacacctgcataggcagtgctttggccaggaggatcccttgatcccttgtggccaggagttgggagaccagcctggggaccatagcgagaccgctgtctccacca

SEQ ID NO: 295440 - DNA, 2005 bp, Homo sapiens
tgaggacgtggggcttccgtgaatgcgcagtgggtgcgtcggccacgaccttttggccaggttagggagggggcgacgctgagatgggggcggcggcggcggaagcggatcgcactctctttgtgggcaaccttgaaacgaaagtgaccgaggagctccttttcgagcttttccaccaggctgggccagtaataaaggtgaaaattccaaaagataaggatggtaaaccaaagcagtttgcgtttgtgaatttcaaacatgaagtgtctgttccttatgcaatgaatctacttaatggaatcaaactttatggaaggcctatcaaaattcaatttagatcaggaagtagtcatgccccacaagatgtcagtttgtcatatccccaacatcatgttggaaattcaagccctacctccacatctcctagcagcaggtacgaaaggactatggataacatgacttcatcagcacagataattcagagatctttctcttctccagaaaattttcagagacaagcagtgatgaacagtgctttgagacaaatgtcatatggtggaaaatttggttcttcacctctggatcaatcaggattttcaccatcagttcaatcacacagtcatagtttcaatcagtcttcaagctcccagtggcgccaaggtacaccatcatcacagcgtaaagtcagaatgaattcttatccctacctagcagatagacattatagccgggaacagcgttacactgatcatgggtctgaccatcattacagaggaaagagagatgatttcttctatgaagacaggaatcatgatgactggagccatgactatgataacagaagagacagtagtagagatggaaaatggcgctcatctcgacactaacacatgttaaaaggacattgtttttatagggtcattttaggccctttgactaagttgatatggaaatattttgttgaaaaactgtacagagcagctttacaagttgtcacatttctttataaatttttttaaagctacagtttaatacaaaatgaattgcggttttattacattaataacctttcacctcagggttttatgaagaggaaagggttttatgcaaaagaaagtgctacaattcctaatcattttagacactttaggagggggtgaagttgtatgataaagcagatattttaattatttgttatctttttgtattgcaagaaatttcttgctagtgaatcaagaaaacatccagattgacagtctaaaatggctactggtattttagttaattcaaaaatgaaacttttcagtgattcactttactaacattctatttgagaaggcttattggtaaagtttggggataaaggcattgcttaacttcttatataatttaggtataaattctgtgacatgctcttgagctttaccctagttgaacatacatgtgtagatttacacatactgtttcattctaaaatttagaaattgttcattaaatcccatttgaggtataagtcactcaggaagttaaaatatctctacacgtatatttttacattaaaaatacagtgttagcataaatccccttttcaggaagaacaaaaatgtcagtgcatagttagataaaatggtaaaatgttttactgaaagcatacttttttggaaaatagattcatgaagcctttaagtgctgcttctgtcagtcaaacgttaaaaactttaacattttcaaagtgcccagactgtgtacaaagacacatgtaatggagattgtacaggttgtttttttgtttgaacctttgaaagagtttaatcttaacgttttctaattttaaaattttaaaatcttgtttaacaaaagcttgtattaagatactgttttcatttcattacagaattgtttataaaagttcatttgttgaaaaataaggatcctttttaataccacagcatttgtactgttcctttttaatatactgaaaatataaaaggaagggtgtgtgtta

SEQ ID NO: 295441 - DNA, 822 bp, Homo sapiens
tgaggacgtggggcttccgtgaatgcgcagtgggtgcgtcggccacgaccttttggccaggttagggagggggcgacgctgagatgggggcggcggcggcggaagcggatcgcactctctttgtgggcaaccttgaaacgaaagtgaccgaggagctccttttcgagcttttccaccaggctgggccagtaataaaggtgaaaattccaaaagataaggatggtaaaccaaagcagtttgcgtttgtgaatttcaaacatgaagtgtctgttccttatgcaatgaatctacttaatggaatcaaactttatggaaggcctatcaaaattcaatttagatcaggaagtagtcatgccccacaagatgtcagtttgtcatatccccaacatcatgttggaaattcaagccctacctccacatctcctagcagcaggtacgaaaggactatggataacatgacttcatcagcacagataattcagagatctttctcttctccagaaaattttcagagacaagcagtgattactctagtttgatgtcataatttctcatggagttaaaactggactcttcaaaatgatagagttgtctgaatttggctgcaatgcgaactactaatcgattcaagcttgttatcaagacacctagagatcaccagatgacaggattggacattgagaaggaccagattattgagatggcctgtctgataactgactctgatctcaacattttggctgaaggtcctaacctgattataaaacaaccagatgagttgctggacagcatgtcagattggtgtaaggagcatcacgggaa

SEQ ID NO: 295442 - DNA, 304 bp, Homo sapiens
gcggccgcctactactactactgctcgaattcaagcttctaacgatgtacggggacatgtaatggagattgtacaggttgtttttttgtttgaacctttgaaagagtttaatcttaacgttttctaattttaaaattttaaaatcttgtttaacaaaagcttgtattaagatactgttttcatttcattacagaattgtttataaaagttcatttgttgaaaaataaggatcctttttaataccacagcatttgtactgttcctttttaatatactgaaaatataaaaggaagggtgtgtgtta

SEQ ID NO: 295443 - DNA, 3609 bp, Homo sapiens
tgaggacgtggggcttccgtgaatgcgcagtgggtgcgtcggccacgaccttttggccaggttagggagggggcgacgctgagatgggggcggcggcggcggaagcggatcgcactctctttgtgggcaaccttgaaacgaaagtgaccgaggagctccttttcgagcttttccaccaggctgggccagtaataaaggtgaaaattccaaaagataaggatggtaaaccaaagcagtttgcgtttgtgaatttcaaacatgaagtgtctgttccttatgcaatgaatctacttaatggaatcaaactttatggaaggcctatcaaaattcaatttagatcaggaagtagtcatgccccacaagatgtcagtttgtcatatccccaacatcatgttggaaattcaagccctacctccacatctcctagcagcaggtacgaaaggactatggataacatgacttcatcagcacagataattcagagatctttctcttctccagaaaattttcagagacaagcagtgatgaacagtgctttgagacaaatgtcatatggtggaaaatttggttcttcacctctggatcaatcaggattttcaccatcagttcaatcacacagtcatagtttcaatcagtcttcaagctcccagtggcgccaaggtacaccatcatcacagcgtaaagtcagaatgaattcttatccctacctagcagatagacattatagccgggaacagcgttacactgatcatgggtctgaccatcattacagaggaaagagagatgatttcttctatgaagacaggaatcatgatgactggagccatgactatgataacagaagagacagtagtagagatggaaaatggcgctcatctcgacactaacacatgttaaaaggacattgtttttatagggtcattttaggccctttgactaagttgatatggaaatattttgttgaaaaactgtacagagcagctttacaagttgtcacatttctttataaatttttttaaagctacagtttaatacaaaatgaattgcggttttattacattaataacctttcacctcagggttttatgaagaggaaagggttttatgcaaaagaaagtgctacaattcctaatcattttagacactttaggagggggtgaagttgtatgataaagcagatattttaattatttgttatctttttgtattgcaagaaatttcttgctagtgaatcaagaaaacatccagattgacagtctaaaatggctactggtattttagttaattcaaaaatgaaacttttcagtgattcactttactaacattctatttgagaaggcttattggtaaagtttggggataaaggcattgcttaacttcttatataatttaggtataaattctgtgacatgctcttgagctttaccctagttgaacatacatgtgtagatttacacatactgtttcattctaaaatttagaaattgttcattaaatcccatttgaggtataagtcactcaggaagttaaaatatctctacacgtatatttttacattaaaaatacagtgttagcataaatccccttttcaggaagaacaaaaatgtcagtgcatagttagataaaatggtaaaatgttttactgaaagcatacttttttggaaaatagattcatgaagcctttaagtgctgcttctgtcagtcaaacgttaaaaactttaacattttcaaagtgcccagactgtgtacaaagacacatgtaatggagattgtacaggttgtttttttgtttgaacctttgaaagagtttaatcttaacgttttctaattttaaaattttaaaatcttgtttaacaaaagcttgtattaagatactgttttcatttcattacagaattgtttataaaagttcatttgttgaaaaataaggatcctttttaataccacagcatttgtactgttcctttttaatatactgaaaatataaaaggaagggtgtgtgttaaaacaaaaaaacaaaaaaaaaacaaaacaaaaaaaaaagagagagagagagagagagacacacagagagaaaataaaaaaaaaagaggacacacaaaagaaaacaaaagaaacacacaaacacacaacgagagaaaccaaaagaagagagaacaagaaaagaacagagaaacagagagtgacgtggagaggcgagacaagaaaacaggtgagcacgcacgcagacaacgacaacgacgtgctcagaacacacgggacacagcagagaggacacagaccaggacagacaaacgctagcgcacagaggaaaaacaacagaatagacacacatagcgagagaggagatgacgaagacacacaccagatacaccgctgcgagagaaacatacacactcaacacacaccacacacacaggagcagaagaaaatctcgggaacacagacgccaccacgacagagcggcgagacaccaacacactacgaacaccaacgaaactacgtgatgacaaggcaggagacgcaaaaacataacctggaggaagctcaactaaacagcgacgatcagaaacgaaagcaaggatcaacaaaagattgaagagatagtacagctagacgtcgatagtaagctaacacacagcagctataataggaagcagactaataaacaagtacgcgaatataggacactcatcgatgacaataataaaagactaaacaaaaaggctaatagaatgaataacacaagaagtggaagagacagacgagtagcactgaattataatacccaaaccacacagaagagatacaaacacaaagatacgcataacagagatacgcatacgaagagcatgaaagacgacgatacactaaacgaaaaagaagaagaaaaaatctacggatgcaacgacagagaacgagcaaaagagaagagagagaggagtgagagcaaaagaaaaagataaggaaaaagatgaggagagagagaagagaaaggcggagcaaaagaaacacaagaagaagaaacacgaagagacagcaaagagagagagagagaagaaacgacgagcaagagaaaggatcacacaggataaagaaacaagaaagcagagcaagagagacaggaaagcagaaagaagaaagcagaaagaaaagagaagagggaaagaaggaaggagaaagaggacgaggaaaacaaggaagagaaagagagagaagaaacggagagcgaacgagcaaagaagaagaaagcacggagacagaaacaaggagagtgaggcggaagcaagaacgagacagcggaggagcggagaggaggcaaagaaggatagtagatgaactaagaaatagagggagagagaaagaagaaagaggataggatgcgggagggggcaaaccgatgtacagatgaagagagaggagagcagagaggtagagagaagtgagattgagtgatgaggtgagcaacttagctgtagcagcaggacgttcgacacatagaacagtaggatagtgatcagagagattgatgacgaagcaggaagaaggagaggatgacagagacgtgaaagaacgagagtggatatgagattgcgatgagaatgaaag

SEQ ID NO: 295444 - DNA, 1989 bp, Homo sapiens
tgaggacgtggggcttccgtgaatgcgcagtgggtgcgtcggccacgaccttttggccaggttagggagggggcgacgctgagatgggggcggcggcggcggaagcggatcgcactctctttgtgggcaaccttgaaacgaaagtgaccgaggagctccttttcgagcttttccaccaggctgggccagtaataaaggtgaaaattccaaaagataaggatggtaaaccaaagcagtttgcgtttgtgaatttcaaacatgaagtgtctgttccttatgcaatgaatctacttaatggaatcaaactttatggaaggcctatcaaaattcaatttagatcaggaagtagtcatgccccacaagatgtcagtttgtcatatccccaacatcatgttggaaattcaagccctacctccacatctcctagcagcaggtacgaaaggactatggataacatgacttcatcagcacagataattcagagatctttctcttctccagaaaattttcagagacaagcagtgatgaacagtgctttgagacaaatgtcatatggtggaaaatttggttcttcacctctggatcaatcaggattttcaccatcagttcaatcacacagtcatagtttcaatcagtcttcaagctcccagtggcgccaaggtacaccatcatcacagcgtaaagtcagaatgaattcttatccctacctagcagatagacattatagccgggaacagcgttacactgatcatgggtctgaccatcattacagaggaaagagagatgatttcttctatgaagacaggaatcatgatgactggagccatgactatgataacagaagagacagtagtagagatggaaaatggcgctcatctcgacactaacacatgttaaaaggacattgtttttatagggtcattttaggccctttgactaagttgatatggaaatattttgttgaaaaactgtacagagcagctttacaagttgtcacatttctttataaatttttttaaagctacagtttaatacaaaatgaattgcggttttattacattaataacctttcacctcagggttttatgaagaggaaagggttttatgcaaaagaaagtgctacaattcctaatcattttagacactttaggagggggtgaagttgtatgataaagcagatattttaattatttgttatctttttgtattgcaagaaatttcttgctagtgaatcaagaaaacatccagattgacagtctaaaatggctactggtattttagttaattcaaaaatgaaacttttcagtgattcactttactaacattctatttgagaaggcttattggtaaagtttggggataaaggcattgcttaacttcttatataatttaggtataaattctgtgacatgctcttgagctttaccctagttgaacatacatgtgtagatttacacatactgtttcattctaaaatttagaaattgttcattaaatcccatttgaggtataagtcactcaggaagttaaaatatctctacacgtatatttttacattaaaaatacagtgttagcataaatccccttttcaggaagaacaaaaatgtcagtgcatagttagataaaatggtaaaatgttttactgaaagcatacttttttggaaaatagattcatgaagcctttaagtgctgcttctgtcagtcaaacgttaaaaactttaacattttcaaagtgcccagactgtgtacaaagacacatgtaatggagattgtacaggttgtttttttgtttgaacctttgaaagagtttaatcttaacgttttctaattttaaaattttaaaatcttgtttaacaaaagcttgtattaagatactgttttcatttcattacagaattgtttataaaagttcatttgttgaaaaataaggatcctttttaataccacagcatacgccgtgcttttaatatatgccccccccccctctct

SEQ ID NO: 295445 - DNA, 1685 bp, Homo sapiens
ccaggctgggccagtaataaaggaagtagtcatgccccacaagatgtcagtttgtcatatccccaacatcatgttggaaattcaagccctacctccacatctcctagcagcaggtacgaaaggactatggataacatgacttcatcagcacagataattcagagatctttctcttctccagaaaattttcagagacaagcagtgatgaacagtgctttgagacaaatgtcatatggtggaaaatttggttcttcacctctggatcaatcaggattttcaccatcagttcaatcacacagtcatagtttcaatcagtcttcaagctcccagtggcgccaaggtacaccatcatcacagcgtaaagtcagaatgaattcttatccctacctagcagatagacattatagccgggaacagcgttacactgatcatgggtctgaccatcattacagaggaaagagagatgatttcttctatgaagacaggaatcatgatgactggagccatgactatgataacagaagagacagtagtagagatggaaaatggcgctcatctcgacactaacacatgttaaaaggacattgtttttatagggtcattttaggccctttgactaagttgatatggaaatattttgttgaaaaactgtacagagcagctttacaagttgtcacatttctttataaatttttttaaagctacagtttaatacaaaatgaattgcggttttattacattaataacctttcacctcagggttttatgaagaggaaagggttttatgcaaaagaaagtgctacaattcctaatcattttagacactttaggagggggtgaagttgtatgataaagcagatattttaattatttgttatctttttgtattgcaagaaatttcttgctagtgaatcaagaaaacatccagattgacagtctaaaatggctactggtattttagttaattcaaaaatgaaacttttcagtgattcactttactaacattctatttgagaaggcttattggtaaagtttggggataaaggcattgcttaacttcttatataatttaggtataaattctgtgacatgctcttgagctttaccctagttgaacatacatgtgtagatttacacatactgtttcattctaaaatttagaaattgttcattaaatcccatttgaggtataagtcactcaggaagttaaaatatctctacacgtatatttttacattaaaaatacagtgttagcataaatccccttttcaggaagaacaaaaatgtcagtgcatagttagataaaatggtaaaatgttttactgaaagcatacttttttggaaaatagattcatgaagcctttaagtgctgcttctgtcagtcaaacgttaaaaactttaacattttcaaagtgcccagactgtgtacaaagacacatgtaatggagattgtacaggttgtttttttgtttgaacctttgaaagagtttaatcttaacgttttctaattttaaaattttaaaatcttgtttaacaaaagcttgtattaagatactgttttcatttcattacagaattgtttataaaagttcatttgttgaaaaataaggatcctttttaataccacagcatttgtactgttcctttttaatatactgaaaatataaaaggaagggtgtgtgtta

SEQ ID NO: 295446 - DNA, 1196 bp, Homo sapiens
gcccattaacctgcccccaagattcggcaccagagagacagtagtagagatggaaaatggcgctcatctcgacactaacacatgttaaaaggacattgtttttatagggtcattttaggccctttgactaagttgatatggaaatattttgttgaaaaactgtacagagcagctttacaagttgtcacatttctttataaatttttttaaagctacagtttaatacaaaatgaattgcggttttattacattaataacctttcacctcagggttttatgaagaggaaagggttttatgcaaaagaaagtgctacaattcctaatcattttagacactttaggagggggtgaagttgtatgataaagcagatattttaattatttgttatctttttgtattgcaagaaatttcttgctagtgaatcaagaaaacatccagattgacagtctaaaatggctactggtattttagttaattcaaaaatgaaacttttcagtgattcactttactaacattctatttgagaaggcttattggtaaagtttggggataaaggcattgcttaacttcttatataatttaggtataaattctgtgacatgctcttgagctttaccctagttgaacatacatgtgtagatttacacatactgtttcattctaaaatttagaaattgttcattaaatcccatttgaggtataagtcactcaggaagttaaaatatctctacacgtatatttttacattaaaaatacagtgttagcataaatccccttttcaggaagaacaaaaatgtcagtgcatagttagataaaatggtaaaatgttttactgaaagcatacttttttggaaaatagattcatgaagcctttaagtgctgcttctgtcagtcaaacgttaaaaactttaacattttcaaagtgcccagactgtgtacaaagacacatgtaatggagattgtacaggttgtttttttgtttgaacctttgaaagagtttaatcttaacgttttctaattttaaaattttaaaatcttgtttaacaaaagcttgtattaagatactgttttcatttcattacagaattgtttataaaagttcatttgttgaaaaataaggatcctttttaataccacagcatttgtactgttcctttttaatatactgaaaatataaaaggaagggtgtgtgtta

SEQ ID NO: 295447 - DNA, 1139 bp, Homo sapiens
aacgcgtcgaccacgcgtcgcccacgcgctcgggacactgtctcactacgggtcattttaggccctttgactaagttgatatggaaatattttgttgaaaaactgtacagagcagctttacaagttgtcacatttctttataaatttttttaaagctacagtttaatacaaaatgaattgcggttttattacattaataacctttcacctcagggttttatgaagaggaaagggttttatgcaaaagaaagtgctacaattcctaatcattttagacactttaggagggggtgaagttgtatgataaagcagatattttaattatttgttatctttttgtattgcaagaaatttcttgctagtgaatcaagaaaacatccagattgacagtctaaaatggctactggtattttagttaattcaaaaatgaaacttttcagtgattcactttactaacattctatttgagaaggcttattggtaaagtttggggataaaggcattgcttaacttcttatataatttaggtataaattctgtgacatgctcttgagctttaccctagttgaacatacatgtgtagatttacacatactgtttcattctaaaatttagaaattgttcattaaatcccatttgaggtataagtcactcaggaagttaaaatatctctacacgtatatttttacattaaaaatacagtgttagcataaatccccttttcaggaagaacaaaaatgtcagtgcatagttagataaaatggtaaaatgttttactgaaagcatacttttttggaaaatagattcatgaagcctttaagtgctgcttctgtcagtcaaacgttaaaaactttaacattttcaaagtgcccagactgtgtacaaagacacatgtaatggagattgtacaggttgtttttttgtttgaacctttgaaagagtttaatcttaacgttttctaattttaaaattttaaaatcttgtttaacaaaagcttgtattaagatactgttttcatttcattacagaattgtttataaaagttcatttgttgaaaaataaggatcctttttaataccacagcatttgtactgttcctttttaatatactgaaaatataaaaggaagggtgtgtgtta

SEQ ID NO: 295448 - DNA, 890 bp, Homo sapiens
tgaggacgtggggcttccgtgaatgcgcagtgggtgcgtcggccacgaccttttggccaggttagggagggggcgacgctgagatgggggcggcggcggcggaagcggatcgcactctctttgtgggcaaccttgaaacgaaagtgaccgaggagctccttttcgagcttttccaccaggctgggccagtaataaaggtgaaaattccaaaagataaggatggtaaaccaaagcagtttgcgtttgtgaatttcaaacatgaagtgtctgttccttatgcaatgaatctacttaatggaatcaaactttatggaaggcctatcaaaattcaatttagatcaggaagtagtcatgccccacaagatgtcagtttgtcatatccccaacatcatgttggaaattcaagccctacctccacatctcctagcagcaggtacgaaaggactatggataacatgacttcatcagcacagataattcagagatctttctcttctccagaaaattttcagagacaagcagtgatgaacagtgctttgagacaaatgtcatatggtggaaaatttggttcttcacctctggatcaatcaggattttcaccatcagttcaatcacacagtcatagtttcaatcagtcttcaagctcccagtggcgccaaggtacaccatcatcacagcgtaaagtcagaatgaattcttatccctacctagcagatagacattatagccgggaacagcgttacactgatcatgggtctgaccatcattacagaggaaagagagatgatttcttctatgaagacaggaatcatgatgactggagccatgactatgataacagatcaagtacctggattaggatgcgctcgtagagggatactctaattcag

SEQ ID NO: 295449 - DNA, 550 bp, Homo sapiens
ctatcgcttcgcagaacctactcaggcagccagctgagaagagttgagggaaagtgctgctgctgggtctgcagacgcgatggataacgtgcagccgaaaataaaacatcgccccttctgcttcagtgtgaaaggccacgtgaagatgctgcggctggatcttaccaacagtatcattacagctgtgttcctttcagtagttgccatcttggccatgcaagaaaagaaaagaaggcatttactctatgtcggggggcggtaatcgtgtgttgcatcgatgcgtttgtggtcaccacgaagatgaggaccaacttgaaaagattcctgggagtcgaagttgaaaggaagctttcccccgccaaggacgcctaccccgaaaccggccccgacgccccgcagaggcccgcctgaagccagcccggcgccctagcagatgcacgtgtctgtcgaatcgctgcctccgagcccacccccgagctcgcatgctgtcacccattccagcctaaatgtgaccataaaattagggctgctgcttttatcgagaaaaaaa

SEQ ID NO: 295450 - DNA, 1055 bp, Homo sapiens
acgctggttcccaggggagagccagccgctgccgcggcactggttcagacggccaggccctagggacccaccatggatcctgaacacgccaaacctgagtcatccgaggcaccttcagggaacttgaaacaaccggagactgccgcagccctggcaagtagcggcagcgtagtgagttctgtacccaaggcacagcgcaacatctcagcgaagaccgcaccccggaagcaccccgcagtctcaattcgcagtgcgcagtccgcagccgccgcacgtccccaaggcagtgagggcaccgcaccctcaaggaaagccaccacacgcccaccgcaaagcccacactcccaccccccacgccctctgcacacactgaatccaaactcttaaatgagatggcgatcaaagagcgcgtggagggccgagccaaagtcccgtacaaattcagggacagcctcaaacgtttctccttctcgcccactggaatgttgaagatcctgagactgagtcttatcttaggagcattagcttgtttcatcatcacccaagccaatgagtcatttataacaatcacaagtctggaaatctgcattgtcgttttttttattctaatatatgtgctaacccttcaccacttgctgacctatttacattggcccttacttgatcttaccaacagtatcattacagctgtgttcctttcagtagttgccatcttggccatgcaagaaaagaaaagaaggcatttactctatgtcggggggcggtaatcgtgtgttgcatcgatgcgtttgtggtcaccacgaagatgaggaccaacttgaaaagattcctgggagtcgaagttgaaaggaagctttcccccgccaaggacgcctaccccgaaaccggccccgacgccccgcagaggcccgcctgaagccagcccggcgccctagcagatgcacgtgtctgtcgaatcgctgcctccgagcccacccccgagctcgcatgctgtcacccattccagcctaaatgtgaccataaaattagggctgctgcttttatcgagaaaaaaa

SEQ ID NO: 295451 - DNA, 588 bp, Homo sapiens
cattgtcttcaaatctgtgagagattttctcaaaggctgctgagctctctctgtcccacagaatgccgagtacaggaagcagacaaagcaaatatgagcaactttaattgaacatgtggaagacccttttagttatggagaggtttctcaggggaaactcaaatctctgtccgtggaaattttcaagaagggaaggatcttaccaacagtatcattacagctgtgttcctttcagtagttgccatcttggccatgcaagaaaagaaaagaaggcatttactctatgtcggggggcggtaatcgtgtgttgcatcgatgcgtttgtggtcaccacgaagatgaggaccaacttgaaaagattcctgggagtcgaagttgaaaggaagctttcccccgccaaggacgcctaccccgaaaccggccccgacgccccgcagaggcccgcctgaagccagcccggcgccctagcagatgcacgtgtctgtcgaatcgctgcctccgagcccacccccgagctcgcatgctgtcacccattccagcctaaatgtgaccataaaattagggctgctgcttttatcgagaaaaaaa

SEQ ID NO: 295452 - DNA, 483 bp, Homo sapiens
atcaactcactggtaacaacagtattcatgctcatcgtatctgtgttggcactgataccagaaaccacaacattgacagttggtggaggggatcttaccaacagtatcattacagctgtgttcctttcagtagttgccatcttggccatgcaagaaaagaaaagaaggcatttactctatgtcggggggcggtaatcgtgtgttgcatcgatgcgtttgtggtcaccacgaagatgaggaccaacttgaaaagattcctgggagtcgaagttgaaaggaagctttcccccgccaaggacgcctaccccgaaaccggccccgacgccccgcagaggcccgcctgaagccagcccggcgccctagcagatgcacgtgtctgtcgaatcgctgcctccgagcccacccccgagctcgcatgctgtcacccattccagcctaaatgtgaccataaaattagggctgctgcttttatcgagaaaaaaa

SEQ ID NO: 295453 - DNA, 765 bp, Homo sapiens
acgctggttcccaggggagagccagccgctgccgcggcactggttcagacggccaggccctagggacccaccatggatcctgaacacgccaaacctgagtcatccgaggcaccttcagggaacttgaaacaaccggagactgccgcagccctggcaagtagcggcagcgtagtgagttctgtacccaaggcacagcgcaacatctcagcgaagaccgcaccccggaagcaccccgcagtctcaattcgcagtgcgcagtccgcagccgccgcacgtccccaaggcagtgagggcaccgcaccctcaaggaaagccaccacacgcccaccgcaaagcccacactcccaccccccacgccctctgcacacactgaatccaaactcttaaatgagatggcgatcaaagagcgcgtggagggccgagccaaagtcccgtacaaattcagggacagcctcaaacgtttctccttctcgcccactggaatgttgaagatcctgagactggtgagcggagagctggtgagacctagctgggcggatgtggccggcagtggcctcggggaaatgcccacggggtgccagctccagaaaccttccataattcactttgccactcacctttgttttgcctcaccatcctcaccctgaacaaccttccgctctgcccagcacctatagagcagggatcacgacgcggggtgagtgacgcagtgtcgcagtctcgcctggccttctgataatagtcgtgaatggcgtagcggatgac

SEQ ID NO: 295454 - DNA, 909 bp, Homo sapiens
acgctggttcccaggggagagccagccgctgccgcggcactggttcagacggccaggccctagggacccaccatggatcctgaacacgccaaacctgagtcatccgaggcaccttcagggaacttgaaacaaccggagactgccgcagccctggcaagtagcggcagcgtagtgagttctgtacccaaggcacagcgcaacatctcagcgaagaccgcaccccggaagcaccccgcagtctcaattcgcagtgcgcagtccgcagccgccgcacgtccccaaggcagtgagggcaccgcaccctcaaggaaagccaccacacgcccaccgcaaagcccacactcccaccccccacgccctctgcacacactgaatccaaactcttaaatgagatggcgatcaaagagcgcgtggagggccgagccaaagtcccgtacaaattcagggacagcctcaaacgtttctccttctcgcccactggaatgttgaagatcctgagactgagtcttatcttaggagcattagcttgtttcatcatcacccaagccaatgagtcatttataacaatcacaagtctggaaatctgcattgtcgttttttttattctaatatatgtgctaacccttcaccacttgctgacctatttacattggcccttacttgtaagtgttcatttttacaattcttcaaatccaagctttgccctcagccccagagtaagggctctccttaagtgaaaacaacggagctatctctctagacaaggacatagctgagctgtgacagttagggtgttgccctggtccagaaggattccttgaacccttgtgcctgcaggacagccaacacaccgctgctccagccctgagtgtaaaacccctcattatggcactagacacatggtacttt

SEQ ID NO: 295455 - DNA, 148 bp, Homo sapiens
acccctggacaaaggtggggcagggctaggggctcagggcagtatggctgagagctggtcccccttggaggtcaactgttctgtggacctagcctcagaatcacggcttgggaggatttgaagagttatccagggatcaataacatcc

SEQ ID NO: 295456 - DNA, 2307 bp, Homo sapiens
gatggttagtactataattatcccaaggattcattcactcatagaacatttgttgagcaattactacctgccagtcacttccaagtggtaagtgagatagaaatggttctttgtggcactcacaatttattggagaatggaaacacaattacaaaaaaaaagtgtgataagttctgggagaagggtggtacaggatcctgtggggtagtggtggctccatataggagggacattgggatactgatcaggaaggagtgggggacagggctagaagctgcattagtataaagttatgtcagactgccaaaacaaaacaaacacaaaaaatcagtagtctgtggtaaagaattgctataggaacagccagtaggggcagttaagctggtcttggtgaatcaggggaagcgtcctagaggaacagatgtccatgctgaggccaaatgctggacaggagttagccagacagggaaattgcattctgggcagaggagacagcaaaggtcaagaaacatgacaactttggaagactgtaacttgttcagaggcagagggtgcaaaggagaaatgaggaaaggtgaagctggagaggtgggcttggtccagctcttgctgggccttttcagccgtgttaaagatttagactgtatccagagggatgttgaactttaagcctaagactgaaaaggtgagaattgtgccttagatcactatggttgcagtgtggagactggtttggaaaggggagaaatcagaggcttttacagccatcccagggagagagaatgaacaccagaattagggtaatggaagatggaaagaagagaaatcgttttatgggttgctcaggagatagaattgacatgtcttgggattgttttgctgtgtaggggagagagacaagtcaagagtatacatcctgtttctgacttggcaactgggtgggtcatgggtctgtttcctgagacagttgtctacagccataccaccgtaagcgccctaaatctcatcagagacagtttatgcaaatggagcttggggaaagagaggtcgtggctggagacagagatttgggcatcatcaacatataggtgtggggagcagagaaggctgaggaagaaagcaggaaacatataaaaaggagagcagggaaaggagccagtgagacaggaaaaacctagtaacgtggtgtgatgaagctaggggaggaaggaaggaaggaagggcggcgtggaacgctgctgatgggtggtggcggggaaaatgaacgagtatccaccagcaacgagaggggcctccatggtcttggtgggagcatttctttggagaggtggaatcagaagccccagatgtcagagggttaaggaataatttggaggaaaagcgtaaaggcagtggaggtgaggagagaattttcaaaatgtttggcagtgattgcaatgaaagaaaaaaatggagggagcagagtatatgcagttgaggaacttttttagtttggagtgtgttaacacgatgttaggaagaaggatcaagtgaaggagaaaggtgaaaatgctggaaggtggggcttagtgatgaaacaaaccttggggacaggtgggcgtggtactgagagtcccagtgaggggagtgccctcaggcaggcgccggtggcttctgtcacaggagggaacagcgctgacattcagctggttcgcactgatacggctcaaccagtttgttaaaacatgtctgttccagtgtcagtaatatacgagtaactgcaatatgcagtaaaaattataaattctaatacaaactcagttcaagctaattaagagatcgcaacagccgttggtaaatggacttcccgctgcatttgagaagctttgcagcgccatctgccggtgtcgtagcatcactgcaggctgagaggctgctttgcgccttcatcttgaagcactctgaaattgcctgtttaaattaccttggaatcatggagttgctactgcttctgaatagtttagcttctactttgattttattgttagtgcattgtcgttcttgtgtcagtagcaagtttcagtgttttaatatttacaaatacaaaaatttttaataaaatattaaagccaaacttgaatgaagagacaacaaagtttggatatgtttctttatgtgccttttgacatatcataaatgagaatcttttgattcctcaggagaacaaagaagaaatattaatgagctgcagccaggaatgttttctgttactgtgtaaaaatcagaataatatggaaatcatttgcaactttttattttgaaaaattt

SEQ ID NO: 295457 - DNA, 384 bp, Homo sapiens
ctagaggatccccatggcaatccacgcatggccagaccatccaggtagaccatcagcaggctgaagtcttcatcgtggagcagactgtccacgcggaggagggcatccccatgtcctgccagtactacctgctctccgatgggcacctggccaagagaatacaggtgggctccccagggtgctgcatcatcaccaagatgcctatcttgagggaagaggatgagattgagccacgcccagtgtttgagaagaagccctggtatgggaggaggatatggagctctattcgaagttcctggaccggaaggaggagctccggctcggccacgccagctatctgcggcagcaccccgaagcccacgcgctcatctccgacttcctgct

SEQ ID NO: 295458 - DNA, 420 bp, Homo sapiens
gacggtggcgacgcgtgcaccggggatgtgtcctgccaccagaggaggtgtgcgtggcggggagcagaggggctttgtttcccaggtgaaggtgcggcttcttcactcttagaggtgcgtgtgtgggtgggggtgcttgctgttgaggtttatgcctgtgactgacagctgtcccccaagccatgctggcagtgtgtaggtgtcgtgccggccaccgcagaggaatcctctgggcttctgtggttcaagtggggcccagcgcagagctccatgagttgctgagcagccagccctgcagcatctcctggttttggcagcaggaggcgtcccctgtgcattcaggggccgtggggctggggcactcgcagcaggaaggagccctgctcaggcctgcgtgctccctttctgcagagggagacg

SEQ ID NO: 295459 - DNA, 769 bp, Homo sapiens
ccgcgacccgcacggcccggacacgcccgccctcaggaaacgccggacgcttgtgggggcaaccacggaccgcaggacagagacccgcgggcggcgggttctctcggtggcgccgtatccagagcagcgcccgcgtccccaggcggtgatgtcgccgcggccgaggatcctctgtgccagctccggccgcgcagcccggggaggtgcaaagagaaatccttggaactccttgagctctgagaattgggagcaacctcagggaaccaggtgctccagctgctgatagacacaggttgattccaaattggttattgtgaacagtgctgcaatgaacataggagtgcagctaagccttcaacgtattgatttcctttattttggaatccaccctgaaacagcaaactgtaactagatggaaggataaaaataaacatggcaaagcatccacccatcttgaaaacttctgctcagaggtggcatccatcactatgcctgacgtcagtggaacggaaaagtgggaccctcatgtcttggaaatgcagcacttattgactaactctcctgctggaaaagaaacaaaaaatgagcaagctgaacaaatattataagaaaatattttgaaccgacactgaaccaggcaagcggtgatgatatgagaggtcatgacccagagacgaaggaaggagcagagatatgcctgcaaactcaaaagctgcttttcccaaggaaggattttgtttacccaaaagccgtgcaaggaagactagaa

SEQ ID NO: 295460 - DNA, 5644 bp, Homo sapiens
aattaaatacctagcttttatctacttacgtagtggattcctttgccatgcatttgacctaaggctgaaagagcaggagagttccatgcagtgtgacacaggaactttagaaattttggtatgacagagttgcctgggctacaaacagaatatagtaagtaaaaaatatcaacagtagctctagaggagtgctgtcccatagaaatatgatatgagccatatatgtaatttaaatttttctagtagcagcttgatttaaaaaaataaaaagaggtgaaattaattgtaacaatatatttaccccagtatgtccaaaatattataatttcaaccagtaatgtttttacatacctatttttttgtttgtattatctttgaaatcctgtgtatattttacagttatagcacatctcaatttacactagccacatttcagatgctcagtagccacatgtggttgctagaggctactatattgaacaacacagtctattatcatcttgatattcttgttgtatagaactctgtattgggaaaaagttcacacaaatttcttgtcctttctatgcttgaaaatcaaagtcaatggatatgtactttcattacactgcacatggtcagttttgtaaataacaatataaatttgcaaatataaaatagctgtagttttaatcttcaataatttttaaaatatagttttttgaagtattatttggaaagtcagtgtttaggataattttccaattcatatacctcataaattacaactccaatttaggttgactttcttcagcaagctaataaagacctggagaagcgtatacgagagcttatggaaaccaaggaaacagtgacatctgaagtcgttaatttaagtaacaaaaatgaaaaactctgccaagaattaactgaaatagatcagttagcacagcagttggaaagacataaagaagaagtgcttgagactgctgataaagagcttggggaagcaaagaaagagattaaaagaaagctctctgaaatgcaggatcttgaagaaacaatggcaaaacttcagctggaattgaacttatgccagaaagaaaaggagagactgagtgatgaactccttgtaaaatcagacctagaaactgttgttcatcagcttgaacaagaaaagcaaagacttagcaaaaaagttgaaagttttgcagttacagaacgacaacttactctggaggttgagaggatgagactagaacatggaataaaacgtcgagacaggtcaccttctcgtttagatacatttctgaaaggtatagaagaagaacgagattattataagaaagagctagagagactccaacatataatacagcgaagatcttgctctacaagttatagcgcacgtgaaaaaagttcaatatttagaacaccagaaaagggtgattacaattcagaaattcatcagatcacaagagaaagagatgaacttcagcgtatgctagaaagatttgaaaaatatatggaagatatacagtccaatgttaaattattgacagcagaaagagataaactaagtgtcttatataatgaagctcaggaagaattatctgccctaagaaaggaatccacccaaaccacagcaccccataatattgttagtcttatggaaaaggaaaaagaacttgcgttatctgacttaagaagaattatggcagaaaaggaagctttaagagaaaaattagagcatattgaagaagtgagtctttttggaaaatcagaattagagaaaactattgaacatttgacatgtgttaatcatcagcttgaaagcgaaaaatatgaattaaagtctaaagtgttaataatgaaagaaacaatagagtcgttagagaacaaattaaaagtccaagctcaaaaatttagccatgtggctggtgactcatctcatcagaaaacagaggtgaactcacttaggatagtgaatgagcagctacagcggtcagttgatgactatcagcaccgactttccataaaaagaggtgaacttgaatcagcccaagcacaaattaaaatactggaggaaaagatagatgaactaaaccttaagatgacttcacaggatgaggaggctcatgtaatgaaaaagaccattggtgttattgataaagaaaaagactttctccaggagactgtagatgagaagacagaaaagattgcaaatttgcaagaaaacctagctaataaagaaaaagctgttgctcaaatgaagataatgatctcagagtgtgaatcatctgtgaaccagctgaaagaaacattggttaatcgagatcgtgagataaacagcctccggcgccagcttgatgcagctcacaaagaactcgatgaagtaggaagatctagagaaatcgcttttaaggaaaacagaagactgcaagatgacctggctacaatggcaagagaaaatcaagaaatctcattggaattggaagcagcagtgcaagaaaaagaagaaatgaagagcagagttcataaatacataacagaggtgtcacgatgggagagcttaatggctgccaaggaaaaagaaaatcaagatttgttagatagatttcagatgcttcataaccgtgctgaagactgggaggtcaaagcccatcaagctgagggagaaagcagctcagttcgactggaacttctttctattgacactgagaggagacatcttcgagaaagagtggagctattagaaaaagaaattcaagagcacataaatgcccatcatgcttatgaatctcagatctcatcaatggcaaaagccatgtctcgattagaagaagagctgagacatcaagaagatgagaaagcaacagtattaaatgacttgtcatctcttagagaactttgcattaaacttgattcaggcaaagatattatgacccagcaattgaattcgaaaaaccttgagtttgagagggttgtggtggaattagaaaatgtaaagtcagagtcagacctactgaaaaaacaactttcaaatgagagacatacagttaaaaacctcgaatcattgttggctacaaacagagataaagaatttcattctcacttaacctcccacgagaaggatacagaaatccagctacttaaggagaagttaaccctttctgaaagcaaattaactagtcaaagccgggaaaacaccatgcttcgagctaaagtggcacagttacaaacagattatgatgctctgaaaaggcagatctcaactgaaagatacgaacgagaacgagcaatccaagagatgcgtcgacatggtcttgctacaccaccccttagttccactctgaggtctccttcacattctcctgaacatagaaatgtgtaattatcagaaagaataatggctttcaatgagttcctatgtggatttttaaaagaacagaacagtaatgaaatatttgaagtacttgttgctgaaaatcatgaacatggacacaaattctacctctgtcaacttttatttaaatcagtgaatatgttaaaaagtttggtttaaaagaactatatctatatgtatattttcatatatatgacagaacaagaatatgtattaatagtgcctaatgtatctatatttttattattcatgaattaaattactaaaagtatgtttatactgtgaattaatataatgtattcacattattctttaataatctgtttattaataagccatgatatgtgtatgtaaatattcttacagtacttgtttttagttgtcatgcctatgtttagaccatatcttaatgtattcacaaagaattatcaactttgatgctatgctgtcatgcttaactttttcttcttaaaattattcatagatctactgtctgttgtcaaggggaatatattcaggtctagtcttcttataatagcagaggtcttggtaaaataactaccatatataacgtgttattgccatctagaagaactatgatgagaaagatacatttatatattatgtaaaatgttaactatcatcatatggactctatgtaacacaaattcaaaagcaaactaaaagctatatgcagagttttgtataaaacaatagaacagaaatttgggacatttttctaggaaataaaattcctcggtgtattaatctaaggtttcaaagtataaaagtatatggggtaggccgggtgcagtggctcacgcctgtaatcccagcactttgggaggccgaggcgagtggatttcctaaggtcaggagtttgagaccagcctgagcaatgtggtgaaaccccatctctactaaaaatacaaaaattatctgggcttggtggcgggcacctgtaatcccagccacttgggaggctgaggcaggagaattgcttgaacccgggaggtggaggctgcggtgagccaagatcatgccattgcactccagcctgggtgacagagtaacactctgtctcagaaaaaaaaaaaagaaaaatatatggggtaaatacagtaaaacgttttgttaaattccaatatacattcagtgataccactctttttcttctaagcctgtgtgttataatttaccagttccccaaaatgccatttttaacgccgaactgtgtaatatacatggaaaacagctttttacaattaattttcaaagttgtaattttaaagaatttgggtgtatacctatgttaatgaaacaacagaagtacaaaaaagaatatcagatacaaaaatcaatcgtgaagaaaatctgttcttaatatatttcattatgattgaaaaacataaaaactaacataggaaagtgaatgatcagttacttatgatatattttgtttcctcttgtggtttaataaagtgaagtgtgtgtgtgtgtgtgtgtgtgtgtgtgtgtgtatacctgggggtgggcagtgctctttttctaaaactaatatggcttatatatctgaattatgccctttttagtgtgtattaggatgtgggctggtttgcttttctaccacctttgtaattttatgtatcccatctcctttgtgtgaattcatatattatagcaaaatacaagagacatgggactgtttgcaataccatatggaaatcttttaataaatatatgtaaataaaataaaaaatatttgtctccaccttttccccaaaagcaacagcaagacatattttgttagatattttatttttaatgttttctataatttaaaaatgtatagcctgccaaatgttgttttcataaccatgatattgttttgaaaaaattttatcttaaaatactgaatgttctgaccttttatagatgtttttgattttgttttaaataattttaaattatggagcttgacctagatttgccaataaactttctagcctatttattttctctttcttacaaataaggtttttataattttatattagggatactcttaattctaaaattaagtaaagtttattcaaatcaaactttatcatggtgggatatggacaaatccctgaacataggtgccaggcacctttcttaactgacttttatttccatttagttcaaaataataagaaatgaagccaaagtttatttttgttatctgtccacaaaatggttaaacgtgtgtgtgacggg

SEQ ID NO: 295461 - DNA, 2100 bp, Homo sapiens
aatcgtccgccgctcccgttaccggggcaaccgcggcgcctcctccgtgtcggccccgatcgtccctccgcgccattttcaaactgctctagcgccggagcccgtgcctggacggaaggagctagtgggggactcgaggcctgagggcaatgcggctggaggcggaggcaacggcggctggagctgccggactttaatttttggaagtgaataaaacttgttttagaagacgagatgactacagctgtagagagaaagtatattaatattaggaaaaggctggatcagctgggataccgccagactctgacagtggagtgtttacctttggtagaaaaacttttcagcgacttagttcatacaactgagagccttcggcaatcaaaattatctgctgtgaaagctgaaaaagaaagtgccaattttgattttgttttggaaccctataaacttgaaaatgcaagattgagtagagaaaataatgaattatacctagagttaatgaaactgagagaacattcagaccaacacgttaaagagttgaaaacttcattgaagaaatgtgcacgtgaaacagctgatctgaaatttctgaataaccaatatgctcataaactcaaactgttggagaaagagagcaaagctaagaatgaaagaattcaacaacttcaagaaaagaatttgcatgctgtagtacaaactccaggtggcaagaaaagaagtattgctttcaggcgccagcgtatgcaaattgatgaaccggttcctccctctgaagtcagttcatatccagttcctcaaccagatgacccttacattgcagacctccttcaagtggctgataacaggattcaagaacttcaacaggaagtccaccagctacaagaaaagttagcaatgatggaaagtggggtgagagactatagcaagcaggtaggatttttatttacttgcatagtagggattgagataggtatgctgtgattgtaaatagaattgggttatatttgaaattgctgatactgagtttttatacagctttcctctttttcatcaggtttgttaatagagttaatagctggaatggcttaggtggctttacttacttagcctgtctcttcaaaaaatttaaaaattagccaagtgtggtggcatgtgcctatggtcccaggtacttgggaggctgaggtgggaggattaatggattgaagagcacttatttactcgattctcttcactattcattgaggtgaatagtagttttttgtttggtttttcttttagctgaatcatctatctccccaaatataattttataaccatattaccgttttcatctcaggagacattttattaagtgtgctatgttttataattgtatttttgtgatttttctactcttattatatattttgtcatattgaacaccagtctcttagaaagttactcttttgtgttgctaatttttttgtttgttttctctataagcacaagtcctcatacaacagttttctgaagaatcaggagaattagtagatgcagagttatattataaccatagcaagctttgtcttttcataatttctattgatgtcttggctaaattttgatttgggtaattataggcttgttttcttaatatgcttcttgaaggttaaattgggtaacatgtttttcattttctgcattgactgcattttttttgagtgatctgcacacacaaatatagatgtaacttaggtgttggtataactaaatctttaaagtgttttgaagattagttggataaaaatggagttaaagaaaattgaccaggcgtggtggctcatgcctgtaatcgcagcactttgggaggccgaggcgggtggatcacttgagatcagaagtttgagaccatcctggccaacatggtgaaacctcatctctactaaaaatacaaaaaattagccgggcgtagtggcgggcgcctgtagtcccagctacttgggaggctgaggcaggagaatggcgtgaacccgggaggcggagcttgcagtgagccgagatcccgccactgcactccagcctgggcgacagagcgagactccgtctcaaaaaaaa

SEQ ID NO: 295462 - DNA, 5928 bp, Homo sapiens
aatcgtccgccgctcccgttaccggggcaaccgcggcgcctcctccgtgtcggccccgatcgtccctccgcgccattttcaaactgctctagcgccggagcccgtgcctggacggaaggagctagtgggggactcgaggcctgagggcaatgcggctggaggcggaggcaacggcggctggagctgccggactttaatttttggaagtgaataaaacttgttttagaagacgagatgactacagctgtagagagaaagtatattaatattaggaaaaggctggatcagctgggataccgccagactctgacagtggagtgtttacctttggtagaaaaacttttcagcgacttagttcatacaactgagagccttcggcaatcaaaattatctgctgtgaaagctgaaaaagaaagtgccaattttgattttgttttggaaccctataaacttgaaaatgcaagattgagtagagaaaataatgaattatacctagagttaatgaaactgagagaacattcagaccaacacgttaaagagttgaaaacttcattgaagaaatgtgcacgtgaaacagctgatctgaaatttctgaataaccaatatgctcataaactcaaactgttggagaaagagagcaaagctaagaatgaaagaattcaacaacttcaagaaaagaatttgcatgctgtagtacaaactccaggtggcaagaaaagaagtattgctttcaggcgccagcgtatgcaaattgatgaaccggttcctccctctgaagtcagttcatatccagttcctcaaccagatgacccttacattgcagacctccttcaagtggctgataacaggattcaagaacttcaacaggaagtccaccagctacaagaaaagttagcaatgatggaaagtggggtgagagactatagcaagcagattgagctaagagaacgagagatagaacgactgtcagttgctttggatggtggtcggtcccctgatgtcctttctctggagtctagaaataaaaccaatgaaaagcttattgctcatttaaatattcaggttgactttcttcagcaagctaataaagacctggagaagcgtatacgagagcttatggaaaccaaggaaacagtgacatctgaagtcgttaatttaagtaacaaaaatgaaaaactctgccaagaattaactgaaatagatcagttagcacagcagttggaaagacataaagaagaagtgcttgagactgctgataaagagcttggggaagcaaagaaagagattaaaagaaagctctctgaaatgcaggatcttgaagaaacaatggcaaaacttcagctggaattgaacttatgccagaaagaaaaggagagactgagtgatgaactccttgtaaaatcagacctagaaactgttgttcatcagcttgaacaagaaaagcaaagacttagcaaaaaagttgaaagttttgcagttacagaacgacaacttactctggaggttgagaggatgagactagaacatggaataaaacgtcgagacaggtcaccttctcgtttagatacatttctgaaaggtatagaagaagaacgagattattataagaaagagctagagagactccaacatataatacagcgaagatcttgctctacaagttatagcgcacgtgaaaaaagttcaatatttagaacaccagaaaagggtgattacaattcagaaattcatcagatcacaagagaaagagatgaacttcagcgtatgctagaaagatttgaaaaatatatggaagatatacagtccaatgttaaattattgacagcagaaagagataaactaagtgtcttatataatgaagctcaggaagaattatctgccctaagaaaggaatccacccaaaccacagcaccccataatattgttagtcttatggaaaaggaaaaagaacttgcgttatctgacttaagaagaattatggcagaaaaggaagctttaagagaaaaattagagcatattgaagaagtgagtctttttggaaaatcagaattagagaaaactattgaacatttgacatgtgttaatcatcagcttgaaagcgaaaaatatgaattaaagtctaaagtgttaataatgaaagaaacaatagagtcgttagagaacaaattaaaagtccaagctcaaaaatttagccatgtggctggtgactcatctcatcagaaaacagaggtgaactcacttaggatagtgaatgagcagctacagcggtcagttgatgactatcagcaccgactttccataaaaagaggtgaacttgaatcagcccaagcacaaattaaaatactggaggaaaagatagatgaactaaaccttaagatgacttcacaggatgaggaggctcatgtaatgaaaaagaccattggtgttattgataaagaaaaagactttctccaggagactgtagatgagaagacagaaaagattgcaaatttgcaagaaaacctagctaataaagaaaaagctgttgctcaaatgaagataatgatctcagagtgtgaatcatctgtgaaccagctgaaagaaacattggttaatcgagatcgtgagataaacagcctccggcgccagcttgatgcagctcacaaagaactcgatgaagtaggaagatctagagaaatcgcttttaaggaaaacagaagactgcaagatgacctggctacaatggcaagagaaaatcaagaaatctcattggaattggaagcagcagtgcaagaaaaagaagaaatgaagagcagagttcataaatacataacagaggtgtcacgatgggagagcttaatggctgccaaggaaaaagaaaatcaagatttgttagatagatttcagatgcttcataaccgtgctgaagactgggaggtcaaagcccatcaagctgagggagaaagcagctcagttcgactggaacttctttctattgacactgagaggagacatcttcgagaaagagtggagctattagaaaaagaaattcaagagcacataaatgcccatcatgcttatgaatctcagatctcatcaatggcaaaagccatgtctcgattagaagaagagctgagacatcaagaagatgagaaagcaacagtattaaatgacttgtcatctcttagagaactttgcattaaacttgattcaggcaaagatattatgacccagcaattgaattcgaaaaaccttgagtttgagagggttgtggtggaattagaaaatgtaaagtcagagtcagacctactgaaaaaacaactttcaaatgagagacatacagttaaaaacctcgaatcattgttggctacaaacagagataaagaatttcattctcacttaacctcccacgagaaggatacagaaatccagctacttaaggagaagttaaccctttctgaaagcaaattaactagtcaaagccgggaaaacaccatgcttcgagctaaagtggcacagttacaaacagattatgatgctctgaaaaggcagatctcaactgaaagatacgaacgagaacgagcaatccaagagatgcgtcgacatggtcttgctacaccaccccttagttccactctgaggtctccttcacattctcctgaacatagaaatgtgtaattatcagaaagaataatggctttcaatgagttcctatgtggatttttaaaagaacagaacagtaatgaaatatttgaagtacttgttgctgaaaatcatgaacatggacacaaattctacctctgtcaacttttatttaaatcagtgaatatgttaaaaagtttggtttaaaagaactatatctatatgtatattttcatatatatgacagaacaagaatatgtattaatagtgcctaatgtatctatatttttattattcatgaattaaattactaaaagtatgtttatactgtgaattaatataatgtattcacattattctttaataatctgtttattaataagccatgatatgtgtatgtaaatattcttacagtacttgtttttagttgtcatgcctatgtttagaccatatcttaatgtattcacaaagaattatcaactttgatgctatgctgtcatgcttaactttttcttcttaaaattattcatagatctactgtctgttgtcaaggggaatatattcaggtctagtcttcttataatagcagaggtcttggtaaaataactaccatatataacgtgttattgccatctagaagaactatgatgagaaagatacatttatatattatgtaaaatgttaactatcatcatatggactctatgtaacacaaattcaaaagcaaactaaaagctatatgcagagttttgtataaaacaatagaacagaaatttgggacatttttctaggaaataaaattcctcggtgtattaatctaaggtttcaaagtataaaagtatatggggtaggccgggtgcagtggctcacgcctgtaatcccagcactttgggaggccgaggcgagtggatttcctaaggtcaggagtttgagaccagcctgagcaatgtggtgaaaccccatctctactaaaaatacaaaaattatctgggcttggtggcgggcacctgtaatcccagccacttgggaggctgaggcaggagaattgcttgaacccgggaggtggaggctgcggtgagccaagatcatgccattgcactccagcctgggtgacagagtaacactctgtctcagaaaaaaaaaaaagaaaaatatatggggtaaatacagtaaaacgttttgttaaattccaatatacattcagtgataccactctttttcttctaagcctgtgtgttataatttaccagttccccaaaatgccatttttaacgccgaactgtgtaatatacatggaaaacagctttttacaattaattttcaaagttgtaattttaaagaatttgggtgtatacctatgttaatgaaacaacagaagtacaaaaaagaatatcagatacaaaaatcaatcgtgaagaaaatctgttcttaatatatttcattatgattgaaaaacataaaaactaacataggaaagtgaatgatcagttacttatgatatattttgtttcctcttgtggtttaataaagtgaagtgtgtgtgtgtgtgtgtgtgtgtgtgtgtgtgtatacctgggggtgggcagtgctctttttctaaaactaatatggcttatatatctgaattatgccctttttagtgtgtattaggatgtgggctggtttgcttttctaccacctttgtaattttatgtatcccatctcctttgtgtgaattcatatattatagcaaaatacaagagacatgggactgtttgcaataccatatggaaatcttttaataaatatatgtaaataaaataaaaaatatttgtctccaccttttccccaaaagcaacagcaagacatattttgttagatattttatttttaatgttttctataatttaaaaatgtatagcctgccaaatgttgttttcataaccatgatattgttttgaaaaaattttatcttaaaatactgaatgttctgaccttttatagatgtttttgattttgttttaaataattttaaattatggagcttgacctagatttgccaataaactttctagcctatttattttctctttcttacaaataaggtttttataattttatattagggatactcttaattctaaaattaagtaaagtttattcaaatcaaactttatcatggtgggatatggacaaatccctgaacataggtgccaggcacctttcttaactgacttttatttccatttagttcaaaataataagaaatgaagccaaagtttatttttgttatctgtccacaaaatggttaaacgtgtgtgtgacggg

SEQ ID NO: 295463 - DNA, 4687 bp, Homo sapiens
aatcgtccgccgctcccgttaccggggcaaccgcggcgcctcctccgtgtcggccccgatcgtccctccgcgccattttcaaactgctctagcgccggagcccgtgcctggacggaaggagctagtgggggactcgaggcctgagggcaatgcggctggaggcggaggcaacggcggctggagctgccggactttaatttttggaagtgaataaaacttgttttagaagacgagatgactacagctgtagagagaaagtatattaatattaggaaaaggctggatcagctgggataccgccagactctgacagtggagtgtttacctttggtagaaaaacttttcagcgacttagttcatacaactgagagccttcggcaatcaaaattatctgctgtgaaagctgaaaaagaaagtgccaattttgattttgttttggaaccctataaacttgaaaatgcaagattgagtagagaaaataatgaattatacctagagttaatgaaactgagagaacattcagaccaacacgttaaagagttgaaaacttcattgaagaaatgtgcacgtgaaacagctgatctgaaatttctgaataaccaatatgctcataaactcaaactgttggagaaagagagcaaagctaagaatgaaagaattcaacaacttcaagaaaagaatttgcatgctgtagtacaaactccaggtggcaagaaaagaagtattgctttcaggcgccagcgtatgcaaattgatgaaccggttcctccctctgaagtcagttcatatccagttcctcaaccagatgacccttacattgcagacctccttcaagtggctgataacaggattcaagaacttcaacaggaagtccaccagctacaagaaaagttagcaatgatggaaagtggggtgagagactatagcaagcagattgagctaagagaacgagagatagaacgactgtcagttgctttggatggtggtcggtcccctgatgtcctttctctggagtctagaaataaaaccaatgaaaagcttattgctcatttaaatattcaggttgactttcttcagcaagctaataaagacctggagaagcgtatacgagagcttatggaaaccaaggaaacagtgacatctgaagtcgttaatttaagtaacaaaaatgaaaaactctgccaagaattaactgaaatagatcagttagcacagcagttggaaagacataaagaagaagtgcttgagactgctgataaagagcttggggaagcaaagaaagagattaaaagaaagctctctgaaatgcaggatcttgaagaaacaatggcaaaacttcagctggaattgaacttatgccagaaagaaaaggagagactgagtgatgaactccttgtaaaatcagacctagaaactgttgttcatcagcttgaacaagaaaagcaaagacttagcaaaaaagttgaaagttttgcagttacagaacgacaacttactctggaggttgagaggatgagactagaacatggaataaaacgtcgagacaggtcaccttctcgtttagatacatttctgaaaggtatagaagaagaacgagattattataagaaagagctagagagactccaacatataatacagcgaagatcttgctctacaagttatagcgcacgtgaaaaaagttcaatatttagaacaccagaaaagggtgattacaattcagaaattcatcagatcacaagagaaagagatgaacttcagcgtatgctagaaagatttgaaaaatatatggaagatatacagtccaatgttaaattattgacagcagaaagagataaactaagtgtcttatataatgaagctcaggaagaattatctgccctaagaaaggaatccacccaaaccacagcaccccataatattgttagtcttatggaaaaggaaaaagaacttgcgttatctgacttaagaagaattatggcagaaaaggaagctttaagagaaaaattagagcatattgaagaagtgagtctttttggaaaatcagaattagagaaaactattgaacatttgacatgtgttaatcatcagcttgaaagcgaaaaatatgaattaaagtctaaagtgttaataatgaaagaaacaatagagtcgttagagaacaaattaaaagtccaagctcaaaaatttagccatgtggctggtgactcatctcatcagaaaacagaggtgaactcacttaggatagtgaatgagcagctacagcggtcagttgatgactatcagcaccgactttccataaaaagaggtgaacttgaatcagcccaagcacaaattaaaatactggaggaaaagatagatgaactaaaccttaagatgacttcacaggatgaggaggctcatgtaatgaaaaagaccattggtgttattgataaagaaaaagactttctccaggagactgtagatgagaagacagaaaagattgcaaatttgcaagaaaacctagctaataaagaaaaagctgttgctcaaatgaagataatgatctcagagtgtgaatcatctgtgaaccagctgaaagaaacattggttaatcgagatcgtgagataaacagcctccggcgccagcttgatgcagctcacaaagaactcgatgaagtaggaagatctagagaaatcgcttttaaggaaaacagaagactgcaagatgacctggctacaatggcaagagaaaatcaagaaatctcattggaattggaagcagcagtgcaagaaaaagaagaaatgaagagcagagttcataaatacataacagaggtgtcacgatgggagagcttaatggctgccaaggaaaaagaaaatcaagatttgttagatagatttcagatgcttcataaccgtgctgaagactgggaggtcaaagcccatcaagctgagggagaaagcagctcagttcgactggaacttctttctattgacactgagaggagacatcttcgagaaagagtggagctattagaaaaagaaattcaagagcacataaatgcccatcatgcttatgaatctcagatctcatcaatggcaaaagccatgtctcgattagaagaagagctgagacatcaagaagatgagaaagcaacagtattaaatgacttgtcatctcttagagaactttgcattaaacttgattcaggcaaagatattatgacccagcaattgaattcgaaaaaccttgagtttgagagggttgtggtggaattagaaaatgtaaagtcagagtcagacctactgaaaaaacaactttcaaatgagagacatacagttaaaaacctcgaatcattgttggctacaaacagagataaagaatttcattctcacttaacctcccacgagaaggatacagaaatccagctacttaaggagaattgcttgaacccgggaggtggaggctgcggtgagccaagatcatgccattgcactccagcctgggtgacagagtaacactctgtctcagaaaaaaaaaaaagaaaaatatatggggtaaatacagtaaaacgttttgttaaattccaatatacattcagtgataccactctttttcttctaagcctgtgtgttataatttaccagttccccaaaatgccatttttaacgccgaactgtgtaatatacatggaaaacagctttttacaattaattttcaaagttgtaattttaaagaatttgggtgtatacctatgttaatgaaacaacagaagtacaaaaaagaatatcagatacaaaaatcaatcgtgaagaaaatctgttcttaatatatttcattatgattgaaaaacataaaaactaacataggaaagtgaatgatcagttacttatgatatattttgtttcctcttgtggtttaataaagtgaagtgtgtgtgtgtgtgtgtgtgtgtgtgtgtgtgtatacctgggggtgggcagtgctctttttctaaaactaatatggcttatatatctgaattatgccctttttagtgtgtattaggatgtgggctggtttgcttttctaccacctttgtaattttatgtatcccatctcctttgtgtgaattcatatattatagcaaaatacaagagacatgggactgtttgcaataccatatggaaatcttttaataaatatatgtaaataaaataaaaaatatttgtctccaccttttccccaaaagcaacagcaagacatattttgttagatattttatttttaatgttttctataatttaaaaatgtatagcctgccaaatgttgttttcataaccatgatattgttttgaaaaaattttatcttaaaatactgaatgttctgaccttttatagatgtttttgattttgttttaaataattttaaattatggagcttgacctagatttgccaataaactttctagcctatttattttctctttcttacaaataaggtttttataattttatattagggatactcttaattctaaaattaagtaaagtttattcaaatcaaactttatcatggtgggatatggacaaatccctgaacataggtgccaggcacctttcttaactgacttttatttccatttagttcaaaataataagaaatgaagccaaagtttatttttgttatctgtccacaaaatggttaaacgtgtgtgtgacggg

SEQ ID NO: 295464 - DNA, 424 bp, Homo sapiens
tttcttatttcacttactaagtctgtgaattgtggagtaaacctcagttttctaaacctaagaattggcagcagtacctcaaagaattttcctggggatcaaaatgcaatagtgaggtgtttcttgcacagtgtatctgagtttcaaattatttactactcagttttaaatcttgttacaaaccaactctccatgatgttgtactatattttatattgatttggggaccctttggcacagtacgtcctacctgtttgagaagctgaaagtatagaatttatgaaataacacatctagcttcgtttcttattttgtatttcttaacaaaagtgtattggcattaatttaaagtgcttttcaggattcaagaacttcaacaggaagtccaccagctacaagaaaagttagcaatgatggaaagtgg

SEQ ID NO: 295465 - DNA, 360 bp, Homo sapiens
atacagttaaaaacctcgaatcattgttggctacaaacagagataaagaatttcattctcacttaacctcccacgagaaggatacagaaatccagctacttaaggagaagttaaccctttctgaaagcaaattgtaagtgtcttaagtcaacttatgcaaagacaattgcttgtgaaggatagttttttaatttttttgaagtggaggaaaggttaagagtatgaaagataggccaggtgcagtggctcacacctgtaatcccagcactttgggaggccaaggcgggtagattgcctgagctcaggagtttgagactagcctgggcaagatggcgaaaccccgtctatactaaaaataca

SEQ ID NO: 295466 - DNA, 194 bp, Homo sapiens
aatttagaaacaattttattgtgattaaaccaggaaaaagaaaatcaagatttgttagatagatttcagatgcttcataaccgtgctgaagactgggaggtcaaagcccatcaagctgagggagaaagcagctcagttcgactggaacttctttctattgacactgagaggagacatcttcgagaaagagtgga

SEQ ID NO: 295467 - DNA, 560 bp, Homo sapiens
gcccagggtcccaaggcttttgtgagtatcattgtaggtattgaagcaacgatgttgagaaggatgctgaacatgctctttagtgggatgacgtactctgaaggctcctgacccccagatgagcatccttgtgtccgttaacttctgtgtttatgaacaggtgaggccagagacaggcagacagcagatgtattgcagggagctggatgacatggcccttggaacctgtgcacatgcctgcctttctgatgcacgtccatgttttctctgcacctccccggtggtgttggtataaaaagcaggcttacatcagcaagggatgattgtcgtctcatgcgatcctgggagatggcagaagtcccgggacacatggagtgtgggctctttcggaggctgttggatccctcctgaatgtgttgtggccatggaagtaaggccagtggctacgagggacagtcttcatcttgggagatccctagagagggcagggagccccttgacatgtggaatgtgatctctgttggtgccgatgatagcgagggatcctctagacagcccac

SEQ ID NO: 295468 - DNA, 1622 bp, Homo sapiens
tgaggcccctggacacatgtggtgtgggctcctttggaggctgttgtatcccttctgaatgtggcgtgggcatagaaggaaggccagtggccacgagggacaatcttggtcttgggagatcctggaaatgatagggagtcccttgatatgtgtggcatgggctccttcaggtgctagtggattccttaggatggtggtgttggcatgaaaggcaggcttgtatcatgaggaatgattgtcatcttgtctgattcttggagatggcaggaagcccctggaaacacatggtgtggactccttcacaggctgttgaaaccctcctgaatgtaagtgatttcattccaaagcaccctgagtttcctcatttgcagggatgaaacctgtgtgtggatcgatgatgacttccatatatacattccttggaaagctgaacaaaatgagtgaaaactctatactgtcatcctcgtcgaactgaggtccagcacattactccaacaggggctagacagagaaggccaacatccgtttgttgacatgggttatatcaaggcgtctgttcaggcttagaatgtggtctcttatgggtgatgggggtcacaggagagtggtggctcccatgtataggaaatttcttgtttgaaggactgtcagtgagggtgggtaacacatgcattgtctgcaggactaggtgaatgtccatgtggcctagcaagagttagctggtagcccgcctctggttgccaatttgttcttgagtccttgttctgggttctcaggtcccacggaggaaaacagatctgtgtggttgagaggtgggtacaaggccgcatctttgtcatttgttggctaactttgtccttggttgaggacattagagttttggtcaccaggcatagcctatgtgcctttgtgcccgtgttgtatcccacgtgttttgaggacatgtattttgcacgtaaaggtgagctcctgctccaagctggttctgataccaaaggagtccctggcttatcctaaactcatggtaggttaaagccttcctccttaggggttcagggccgcaaggcttttgtgagtggcattgcaggcgttgaagcagtgatgttgagagggatggtcaatgtcagtgctctttagcaggatggtgtactgcaggggcccccagccccgagacgagcatccctgcatccatgcatttctgcctccatgaacaggggaggccagagacaggcagatagtagataaattgcaggggactggatgacatggccctcgtgacctgtgcacctgtctgtctttctgaagcacgcctgtgttaactctgcacctcccaggtagcactggcatggagggcaggcacatgttggtgagggacaattgttaccttgtgtgagctgcggagataccaggaagcccctggacacaaatggcaaaggctccttcggaagttgttggatcccttctgaatgtaagcacttctttcccagagcactctgagtttcctcatttgcagggacaaatactgtgcgtggatcgatgatgacttccacatatacattccttggaaagctgaacaaaatgagtgaaaactctataccgtcatcctcgtcgaactgaggtcc

SEQ ID NO: 295469 - DNA, 951 bp, Homo sapiens
tgaggcccctggacacatgtggtgtgggctcctttggaggctgttgtatcccttctgaatgtggcgtgggcatagaaggaaggccagtggccacgagggacaatcttggtcttgggagatcctggaaatgatagggagtcccttgatatgtgtggcatgggctccttcaggtgctagtggattccttaggatggtggtgttggcatgaaaggcaggcttgtatcatgaggaatgattgtcatcttgtctgattcttggagatggcaggaagcccctggaaacacatggtgtggactccttcacaggctgttgaaaccctcctgaatgtaagtgatttcattccaaagcaccctgagtttcctcatttgcagggatgaaacctgtgtgtggatcgatgatgacttccatatatacattccttggaaagctgaacaaaatgagtgaaaactctatactgtcatcctcgtcgaactgaggtccagcacattgctccaacagtgggtagatagagagggaaaacttccatttgttgacgcaggttccattgaggggtttgtccaggcttaggatggggtcccctttgggcaaagggagtcacaggggagtgcggcctcctgtgcacaggagattccttgtgtgaaggatttacctctgtgagagcagggtagcacacataactatgcaggagcaggtgaatgtgcaggtggcacaggaagagttagatggcagcctgtctctgcacagcgaggtttgacttgtcctagctctgcattccctcatcccttagaggaagttggtttcttcagaagacttaaatttgtggaattcagtagaatattatccacataatgttcccagtgaatgctaggcatatcacccaagatggccaggcctctggccataaaccatagtaaataatttttaacctttacgccaatgaagatctgaggc

SEQ ID NO: 295470 - DNA, 1163 bp, Homo sapiens
tgaggcccctggacacatgtggtgtgggctcctttggaggctgttgtatcccttctgaatgtggcgtgggcatagaaggaaggccagtggccacgagggacaatcttggtcttgggagatcctggaaatgatagggagtcccttgatatgtgtggcatgggctccttcaggtgctagtggattccttaggatggtggtgttggcatgaaaggcaggcttgtatcatgaggaatgattgtcatcttgtctgattcttggagatggcaggaagcccctggaaacacatggtgtggactccttcacaggctgttgaaaccctcctgaatgtgaggccagagacaggcagacagcagatgtattgcagggagctggatgacatggcccttggaacctgtgcacatgcctgcctttctgatgcacgtccatgttttctctgcacctccccggtggtgttggtataaaaagcaggcttacatcagcaagggatgattgtcgtctcatgcgatcctgggagatggcagaagtcccgggacacatggagtgtgggctctttcggaggctgttggatccctcctgaatgtgttgtggccatggaagtaaggccagtggctacgagggacagtcttcatcttgggagatccctagagagggcagggagccccttgacatgtggaatgtgatctctgttgggtgctggtggatcccacaggtggtctggcatggaagaaggccagaggctgcgatggatcatctttgtcttgggagattcctggagatggtggggagcccctgggcacgtgcagcatatgtggcgtgggcttcttcaggtgctggtggatccctcaggatgctttccaaggtttcctatgagtcctggtcacagagtctggacatgggcgttggaagaatgcttcgattccaggatgtgggttccagagggcgggtctttggggccggccagatttctacgaagttttctttaacccaaagggcgagggggttctggcaagtttgtctcactcacatgttgtgggcggggaacccgggttttgcacccggggtttgtgtttccatcccgggggagaccccctttgggctccacggtgtgtgtcatctccgcgagaaagattatgccccccggcacaggtgcgactacggcggct

SEQ ID NO: 295471 - DNA, 616 bp, Homo sapiens
actgcatccaacgccgcatgactgcatccaacgccgcatgactgcatccaaagccgcatgactgcatccaacgccgcgtctcatgcgatcctgggagatggcagaagtcccgggacacatggagtgtgggctctttcggaggctgttggatccctcctgaatgtggtctggcatggaagaaggccagaggctgcgatggatcatctttgtcttgggagattcctggagatggtggggagcccctgggcacgtgcagcatatgtggcgtgggcttcttcaggtgctggtggatccctcaggatgctttccaaggtttcctatgagtcctggtcacagagtctggacatgggcgttggaagaatgcttcgattccaggatgtgggttccagagggcgggtctttggggccggccagatttctacgaagttttctttaacccaaagggcgagggggttctggcaagtttgtctcactcacatgttgtgggcggggaacccgggttttgcacccggggtttgtgtttccatcccgggggagaccccctttgggctccacggtgtgtgtcatctccgcgagaaagattatgccccccggcacaggtgcgactacggcggct

SEQ ID NO: 295472 - DNA, 1279 bp, Homo sapiens
ggacgcggaacccggcgcggcggcggcacgatggtcatggcgtatttcgtcgagaatttttggggggaaaaaaatagtggctttgatgtcctctaccataatatgaaacatggacagatatcaacaaaagaactagcagattttgtaagggaacgagctaccatagaggaggcatactccaggtcaatgacaaaactagcaaaatctgcaagcaattattcacaacttggaacatttgcaccagtatgggatgtattcaaaacatctacagagaaattagcaaattgtcacttggatcttgttagaaaattacaagaattaataaaggaagttcagaagtatggagaagaacaagtaaagtctcataaaaagactaaagaagaagttgcaggaactctggaagctgtccaaaccattcagagcataactcaggccctccagaaatccaaggaaaattacaatgccaagtgtgtagaacaggagcgtttgaaaaaggaaggagctacacaaagagaaatagaaaaggcagctgttaaatctaagaaagctacagatacctataaactctatgtggaaaaatatgcattagcaaaagctgatttcgaacagaaaatgacagaaacagctcagaaatttcaagatattgaagaaactcatctcattcacataaaggaaattataggatccttgtcaaatgctataaaggaaattcatttgcagataggccaggtccatgaagaatttataaataacatggctaatactacagttgaaagtttgatacaaaaatttgctgagtcaaaaggcactgggaaggaaagacctggcctcattgaatttgaagaatgtgacactgctagtgcagttgaaggtataaaaccaaggaaaagaaagacctttgctttgccaggaatcattaaaaaggaaaaagatgcagaatctgtatggagtttcactgttgttgcccaggttggaatgcaatggcgcgatcttggcttactgcattctccacctcccaggttcaagcgattctcctcctacctcagcctcccaagtagctggaattacggcgcccaccaccacatctggctaattttttgtatttttagtagagacagggtttcaccatattggccaggctggtcgcgaactcctgacctcaggtgaaccacccgcctcagcttcccaaagtgctgggattacaggcctgagccacgcgcccggcctgatttaccttcttttaaaaataaaaaattaatatacaaagaatatgtaataa

SEQ ID NO: 295473 - DNA, 590 bp, Homo sapiens
ggacgcggaacccggcgcggcggcggcacgatggtcatggcgtatttcgtcgagaatttttggggggaaaaaaatagtggctttgatgtcctctaccataatatgaaacatggacagatatcaacaaaagaactagcagattttgtaagggaacgagctaccatagaggaggcatactccaggtcaatgacaaaactagcaaaatctgcaagcaattattcacaacttggaacatttgcaccagtatgggatgtattcaaaacatctacagagaaattagcaaattgtcacttggatcttgttagaaaattacaagaattaataaaggaagttcagaagtatggagaagaacaagtaaagtctcataaaaagactaaagaagaagttgcaggaactctggaagctgtccaaaccattcagagcataactcaggccctccagaaatccaaggaaaattacaatgccaagtgtgtagaacaggagcgtttgaaaaaggaaggagctacacaaagagaaatagaaaaggcagctgttaaatctaagaaagctacagatacctataaactctatgtggaaaaatatgcattagc

SEQ ID NO: 295474 - DNA, 1126 bp, Homo sapiens
ggacgcggaacccggcgcggcggcggcacgatggtcatggcgtatttcgtcgagaatttttggggggaaaaaaatagtggctttgatgtcctctaccataatatgaaacatggacagatatcaacaaaagaactagcagattttgtaagggaacgagctaccatagaggaggcatactccaggtcaatgacaaaactagcaaaatctgcaagcaattattcacaacttggaacatttgcaccagtatgggatgtattcaaaacatctacagagaaattagcaaattgtcacttggatcttgttagaaaattacaagaattaataaaggaagttcagaagtatggagaagaacaagtaaagtctcataaaaagactaaagaagaagttgcaggaactctggaagctgtccaaaccattcagagcataactcaggccctccagaaatccaaggaaaattacaatgccaagtgtgtagaacaggagcgtttgaaaaaggaaggagctacacaaagagaaatagaaaaggcagctgttaaatctaagaaagctacagatacctataaactctatgtggaaaaatatgcattagcaaaagctgatttcgaacagaaaatgacagaaacagctcagaaatttcaagatattgaagaaactcatctcattcacataaaggaaattataggatccttgtcaaatgctataaaggaaattcatttgcagataggccaggtccatgaagaatttataaataacatggctaatactacagttgaaagtttgatacaaaaatttgctgagtcaaaaggcactgggaaggaaagacctggcctcattgaatttgaagaatgtgacactgctagtgcagttgaaggtataaaaccaaggaaaagaaagacctttgctttgccaggaatcattaaaaaggaaaaagatgcagaatctgtggaatgtcctgatgcagattcattgatgcatttttggatttacattgccagatgctttcctattaaatagaaagtatttctaaccacctttgaagagtggacattttacttttaaaattggagtggtgccatatcattctgtttttttcttgggaaacatgccagaaatcaaatctgtatac

SEQ ID NO: 295475 - DNA, 1509 bp, Homo sapiens
ggacgcggaacccggcgcggcggcggcacgatggtcatggcgtatttcgtcgagaatttttggggggaaaaaaatagtggctttgatgtcctctaccataatatgaaacatggacagatatcaacaaaagaactagcagattttgtaagggaacgagctaccatagaggaggcatactccaggtcaatgacaaaactagcaaaatctgcaagcaattattcacaacttggaacatttgcaccagtatgggatgtattcaaaacatctacagagaaattagcaaattgtcacttggatcttgttagaaaattacaagaattaataaaggaagttcagaagtatggagaagaacaagtaaagtctcataaaaagactaaagaagaagttgcaggaactctggaagctgtccaaaccattcagagcataactcaggccctccagaaatccaaggaaaattacaatgccaagtgtgtagaacaggagcgtttgaaaaaggaaggagctacacaaagagaaatagaaaaggcagctgttaaatctaagaaagctacagatacctataaactctatgtggaaaaatatgcattagcaaaagctgatttcgaacagaaaatgacagaaacagctcagaaatttcaagatattgaagaaactcatctcattcacataaaggaaattataggatccttgtcaaatgctataaaggaaattcatttgcagataggccaggtccatgaagaatttataaataacatggctaatactacagttgaaagtttgatacaaaaatttgctgagtcaaaaggcactgggaaggaaagacctggcctcattgaatttgaagaatgtgacactgctagtgcagttgaaggtataaaaccaaggaaaagaaagacctttgctttgccaggaatcattaaaaaggaaaaagatgcagaatctgtatggagtttcactgttgttgcccaggttggaatgcaatggcgcgatcttggcttactgcattctccacctcccaggttcaagcgattctcctcctacctcagcctcccaagtagctggaattacggcgcccaccaccacatctggctaattttttgtatttttagtagagacagggtttcaccatattggccaggctggtcgcgaactcctgacctcaggtgaaccacccgcctcagcttcccaaagtgctgggattacaggcctgagccacgcgcccggcctgatttaccttcttttaaaaataaaaaattaatatacaaagaatatgtaataaacatgtaagaaattgagtttagattagctaactaaagtttttgtttgtttgtttgttttttactttggctacacattagaactacctgggaaattaaaataaatacacctatgccaggtcccacctcagatcaattaaatcagattctctaagcatgaaacctcaacataggttttgctcttttttgttttaagcagcccctttgattcctaatgtatacctggggttaa

SEQ ID NO: 295476 - DNA, 872 bp, Homo sapiens
ttatttgatttttaaaatttattgctgatattttaattattaggtaacaactagaaccatttcagaacaattaaaaagatgcgttgtcaattaaaagtagaataaaaaatttaaaatgtaaaaaaaaagttttaaaatttacctaatagtttttttctactagaagtttttcaatttctttttttccaggcctcattgaatttgaagaatgtgacactgctagtgcagttgaaggtataaaaccaaggaaaagaaagacctttgctttgccaggaatcattaaaaaggaaaaagatgcagaatctgtatggagtttcactgttgttgcccaggttggaatgcaatggcgcgatcttggcttactgcattctccacctcccaggttcaagcgattctcctcctacctcagcctcccaagtagctggaattacggcgcccaccaccacatctggctaattttttgtatttttagtagagacagggtttcaccatattggccaggctggtcgcgaactcctgacctcaggtgaaccacccgcctcagcttcccaaagtgctgggattacaggcctgagccacgcgcccggcctgatttaccttcttttaaaaataaaaaattaatatacaaagaatatgtaataaacatgtaagaaattgagtttagattagctaactaaagtttttgtttgtttgtttgttttttactttggctacacattagaactacctgggaaattaaaataaatacacctatgccaggtcccacctcagatcaattaaatcagattctctaagcatgaaacctcaacataggttttgctcttttttgttttaagcagcccctttgattcctaatgtatacctggggttaa

SEQ ID NO: 295477 - DNA, 289 bp, Homo sapiens
tgcaccagtatgggatgtattcaaaacatctacagagaaattagcaaattgtcacttggatcttgttagaaaattacaagaattaataaaggaagttcagaagtatggagaagaacaagtaaagtctcataaaaaggtatcagtttttttcttgttaaataattgattggtcagatattgaatactttatagttcagtcattttgatggatcatttcatactaaacagactaaagaagaagttgcaggaactctggaagctgtccaaaccattcagagcataactcagg

SEQ ID NO: 295478 - DNA, 1325 bp, Homo sapiens
cgcggctctggagagcgctcctccgccccgcgcgccgtccctgcgccccgctccgcccgcgcctctctcccagcgccgcgcctcgggcgtaaagagcgcgcccctcgcaccgcagccagtgccgaccgcagcagcccagccccagccttcctccgcctccgcctctctctcctcctcctcctccgccgccggacacgcagccgcaggccgggaccgggacgcagctggggagtcagggacgcgcgcagccagcccttccccctccggctcccgcaccgccggccgcctcccctcgccctcctactctcccctccctgctccttcgctttttcctcctcctcctctcccggccccggctgccagcaccatgtccgcagggggagattttgggaatccactgagaaaattcaagttggtgttcttgggggagcagagcgtcgggaagacgtctctgattacgaggttcatgtacgacagcttcgacaacacataccaggcaaccattgggattgacttcttgtcaaaaaccatgtacttggaggaccgcacggtgcgactgcagctctgggacacagctggtcaggagaggttccgcagcctgatccccagctacatccgggactccacggtggctgtggtggtgtacgacatcacaaatctcaactccttccaacagacctctaagtggatcgacgacgtcaggacagagaggggcagtgatgttatcatcatgctggtgggcaacaagacggacctggctgataagaggcagataaccatcgaggagggggagcagcgcgccaaagaactgagcgtcatgttcattgagaccagtgcgaagactggctacaacgtgaagcagctttttcgacgtgtggcgtcggctctacccggaatggagaatgtccaggagaaaagcaaagaagggatgatcgacatcaagctggacaaaccccaggagcccccggccagcgagggcggctgctcctgctaatgcagagccgacctgtggcttcccatgacactccttgcttgttgtgttgcttcctattggctagcttcctaaggggggagggaaccgagttatcaagatgggaggatttttcttttctctctgtctttaggagtagggtgggatggggagggaggctgggcatcagggatcacatcactcttaacggctgttacttaaacaactattttttggtttggttgtaatatattgtactttattaagattgccaaaaactgttaaaatttaaaaaaaatttaaatcatgtgtatacaattttttgccagataaaaatgtagtcatttttatttga

SEQ ID NO: 295479 - DNA, 2778 bp, Homo sapiens
cgcggctctggagagcgctcctccgccccgcgcgccgtccctgcgccccgctccgcccgcgcctctctcccagcgccgcgcctcgggcgtaaagagcgcgcccctcgcaccgcagccagtgccgaccgcagcagcccagccccagccttcctccgcctccgcctctctctcctcctcctcctccgccgccggacacgcagccgcaggccgggaccgggacgcagctggggagtcagggacgcgcgcagccagcccttccccctccggctcccgcaccgccggccgcctcccctcgccctcctactctcccctccctgctccttcgctttttcctcctcctcctctcccggccccggctgccagcaccatgtccgcagggggagattttgggaatccactgagaaaattcaagttggtgttcttgggggagcagagcgtcgggaagacgtctctgattacgaggttcatgtacgacagcttcgacaacacataccaggcaaccattgggattgacttcttgtcaaaaaccatgtacttggaggaccgcacggtgcgactgcagctctgggacacagctggtcaggagaggttccgcagcctgatccccagctacatccgggactccacggtggctgtggtggtgtacgacatcacaaatctcaactccttccaacagacctctaagtggatcgacgacgtcaggacagagaggggcagtgatgttatcatcatgctggtgggcaacaagacggacctggctgataagaggcagataaccatcgaggagggggagcagcgcgccaaagaactgagcgtcatgttcattgagaccagtgcgaagactggctacaacgtgaagcagctttttcgacgtgtggcgtcggctctacccggaatggagaatgtccaggagaaaagcaaagaagggatgatcgacatcaagctggacaaaccccaggagcccccggccagcgagggcggctgctcctgctaatgcagagccgacctgtggcttcccatgacactccttgcttgttgtgttgcttcctattggctagcttcctaaggggggagggaaccgagttatcaagatgggaggatttttcttttctctctgtctttaggagtagggtgggatggggagggaggctgggcatcagggatcacatcactcttaacggctgttacttaaacaactattttttggtttggttgtaatatattgtactttattaagattgccaaaaactgttaaaatttaaaaaaaatttaaatcatgtgtatacaattttttgccagataaaaatgtagtcatttttatttgaaagatgtgctttttgtttttgtatatttgtaaacttatagagaaccttttccacacacctcctccttcctgttctctttgaaccattcatcacctctgccttcctcctatccccagcccaataaattaaaacaattaactgagcaaattaattaggcttcagtctggggccatctggccccactctctaggccctactccagttaaatcaaacattggttgaacacatcagcctctgaaaaggtagctctgactcttgtctttccatggccagagtgggtcgtcaacctcgtgtggagctgagaccaaggtctgtgggctctaggcagcccggcagcagcccccagaggaactgctcccacctctccttctctttccctgaaaagccttgaagggggttgagggtacaggcaaccttgtgttctctgtgccctcagggactggcagagcaagaggccatcagaaggacgaggtgctgttggcaattgcagctgcgtggtgcgtggtttatagactggggtgccatgtgtacttctgaaaatattttaaccagcccacccagcagtcagtacacatgcctgggccaagtctaagaaactcagtgtgtgatgttgggcagtgtgccatcctgaagccttcctcctggatgtcagggaagctggaccacctggagttgatcctctgtgatggggaggcggggggggggggggtgttgtctgcagaaccaccaccttgaaagatccatgttcttagagcctcagctgctaatattgttgagtgctttctggaaaagctgatttgttgctatgttttcaccccagtggcatggcgcagttgaagtctttgtggacatatctttgtggctactgtggctgcgctgtggtcacctgaggatgtggttcaggtggggtctccagaaggctgcttgcccccagagagccatctcttccatttttgattcattcctgagaatggcttagtcctgagaatctgcaaagtctctgaagagaactctctcttcccactaagtgatataacctacttggccagcattccaaatagactcagactcactgccctgagcctgcacagagccaggtgcaatgggcagtgagtctggccaaaatgtaaaccccaccctccctgctgtcattggctctccctccaggctgctgctgggcatgtcatagatgggatgaatgaccatctggggtatggtgggctgaactccacaaggtcgttggaatgaattttgaaacttctcagaaattaatctgaaatggcaggcagtaagtgcagcagaatctggcaggactgatatttgtgcagtgggcctgccacacaccctctgcctaggaggctgtatgccagagctcatctctagcaaggaatttatcttcaggtgaagaagagaggaagcaggatcccactgagcacctcttgcagaaggcaag

SEQ ID NO: 295480 - DNA, 203 bp, Homo sapiens
ttcgcactggctgtcccctcactgccgtccagtcttccctcaaatgtcatctcctcactggcccccagcactcatcttccaactccttacaggactctgccttctaggctcatcttcaaatctcctatactactcactcgtctgtctcttttacaagaacaaatctccttgagagaagaacagtgcctggaacatggcaggca

SEQ ID NO: 295481 - DNA, 384 bp, Homo sapiens
gcggccgccctggacgtgggcatgaggtgcacggtctgggtatgccccgggcagggagttggtgcatcccaggcctcgggagggggcctgtccggcggtgaccatgacccatgtgttggggaccacagcggtggccgaagtgagcgggcatctggggaaaagtttgatcaagttctgctctggagacttggggcccgagggcatcttgccggacacccacctcctggacccgctgctgaaggaggcctctactgcccccttggcacagatccccagcaagggcatggacggtgagtcaagggtgggacccctgctctatcaactggtttcctacccgcccaggccccgcccccaacttccaggccccaccccccaacctcaggc

SEQ ID NO: 295482 - DNA, 2480 bp, Homo sapiens
  misc_feature (1406)..(1406): n is a, c, g, or t
tcagctctctctgcttccccaggatgcgggctccgggtgcgggcgcggcctcggtggtctcgctggcgctgttgtggctgctggggctgccgtggacctggagcgcggcagcggcgctcggcgtgtacgtgggcagcggcggctggcgcttcctgcgcatcgtctgcaagaccgcgaggcgagacctcttcggtctctctgtgctgatccgcgtgcgcctggagctgcggcggcaccagcgtgccggccacaccatcccgcgcatctttcaggcggtagtgcagcgacagcccgagcgcctggcgctggtggatgccgggaccggcgagtgctggacctttgcgcagctggacgcctactccaatgcggtagccaacctcttccgccagctgggcttcgcgccgggcgacgtggtggccatcttcctggagggccggccggagttcgtggggctgtggctgggcctggccaaggcgggcatggaggccgcgctgctcaacgtgaacctgcggcgcgagcccctggccttctgcctgggcacctcgggcgctaaggccctgatctttggaggagaaatggtggcggcggtggccgaagtgagcgggcatctggggaaaagtttgatcaagttctgctctggagacttggggcccgagggcatcttgccggacacccacctcctggacccgctgctgaaggaggcctctactgcccccttggcacagatccccagcaagggcatggacgatcgtcttttctacatctacacgtcggggaccaccgggctgcccaaggctgccattgtcgtgcacagcaggtactaccgcatggcagccttcggccaccacgcctaccgcatgcaggcggctgacgtgctctatgactgcctgcccctgtaccactcggcaggaaacatcatcggcgtggggcagtgtctcatctatgggctgacagtcgtcctccgcaagaaattctcggccagccgcttctgggacgactgcatcaagtacaactgcacgctgtacctggcacggcccatcctggactgagaaactggaacctcagaggaacccgtgcctctctgctgccttggtgcccctgtgtctgcctcctctccctgcttttcagcctctgtctccttccatccctgtccctgtctggccttaactcttccctctttttcttttctttctttctttcttttttttttaagatagagtctcactctgctgcccgggctagagtgcagtggtgggatctcggctcactgcaacctctgcctcctggggttcaagtgatcctcccacctcagcctcctgagtagctgggattacaggcacccgccaccacgtccagctaatttttatatttttagtagagacggggtttcaccatgttggtcaggntggtcttgaactcctgacctcaggtgatccgctggcctcggcctcccagagtgctgggattataggcgtgagcctctggcccggcctttcctttttcctctcctctcctgccgagagtggaacacgcgtgtcctgggagctgcatcttgtgtagggtccagctgcttttggggactgcaggaatcatctcccctgggccctggactcggactggggcctccccacctccctctcggctgtgccttacggagccccaatccaggcctcctgtggctgttgggttccagatgctgcagctccatgtgacttccaagcaggccctccgccctccctgctgaatggaggagccgggggtcccccaggccaactggaaaatctcccaggctaggccaattgccttttgcacttccccgttcctgtcacatttccccagccccaccttcccctcctgatgccctgaaagcttccggaattgactgtgaccacttggatgtcaccactgtcagcccctgccttgatgtccccatttagccatctccatggagctcctgctggagggccctgaaccctgcactgcgtggctgcccagccagctgcctcctgtcctgggaggaggcctcctgggtgtcctcatctggtgtgtctactggagggtcccacaggagaggcagcagaggggtcaggggaggtctcctgccgggggttggcctctcaagcctcaggggttctagcctgttgaatataccccacctggtggtggcccctccgatgtccccactgatggctctgacaccgtgttggtggcgatgtcccagacaatcccaccaggacggcccagacatccctactggcttcgctggtggctcatctcgaacatccacgccagcctttctggggccggccacccaggccgcctgtccgtctgtcctccctccagcagcaccccctggcccctggagtggtggggccatggcaagagacaccgtggcgtctcatgtgaactttcctgggcactgtggttttatttcctaattgatttaagaaataaacctgaagaccgtctggtgcaagctg

SEQ ID NO: 295483 - DNA, 3385 bp, Homo sapiens
  misc_feature (2311)..(2311): n is a, c, g, or t
tcagctctctctgcttccccaggatgcgggctccgggtgcgggcgcggcctcggtggtctcgctggcgctgttgtggctgctggggctgccgtggacctggagcgcggcagcggcgctcggcgtgtacgtgggcagcggcggctggcgcttcctgcgcatcgtctgcaagaccgcgaggcgagacctcttcggtctctctgtgctgatccgcgtgcgcctggagctgcggcggcaccagcgtgccggccacaccatcccgcgcatctttcaggcggtagtgcagcgacagcccgagcgcctggcgctggtggatgccgggaccggcgagtgctggacctttgcgcagctggacgcctactccaatgcggtagccaacctcttccgccagctgggcttcgcgccgggcgacgtggtggccatcttcctggagggccggccggagttcgtggggctgtggctgggcctggccaaggcgggcatggaggccgcgctgctcaacgtgaacctgcggcgcgagcccctggccttctgcctgggcacctcgggcgctaaggccctgatctttggaggagaaatggtggcggcggtggccgaagtgagcgggcatctggggaaaagtttgatcaagttctgctctggagacttggggcccgagggcatcttgccggacacccacctcctggacccgctgctgaaggaggcctctactgcccccttggcacagatccccagcaagggcatggacgatcgtcttttctacatctacacgtcggggaccaccgggctgcccaaggctgccattgtcgtgcacagcaggtactaccgcatggcagccttcggccaccacgcctaccgcatgcaggcggctgacgtgctctatgactgcctgcccctgtaccactcggcaggaaacatcatcggcgtggggcagtgtctcatctatgggctgacagtcgtcctccgcaagaaattctcggccagccgcttctgggacgactgcatcaagtacaactgcacggtggttcagtacatcggggagatctgccgctacctgctgaagcagccggtgcgcgaggcggagaggcgacaccgcgtgcgcctggcggtggggaacgggctgcgtcctgccatctgggaggagttcacggagcgcttcggcgtacgccaaatcggggagttctacggcgccaccgagtgcaactgcagcattgccaacatggacggcaaggtcggctcctgtggtttcaacagccgcatcctgccccacgtgtaccccatccggctggtgaaggtcaatgaggacacaatggagctgctgcgggatgcccagggcctctgcatcccctgccaggccggggagcctggcctccttgtgggtcagatcaaccaacaggacccgctgcgccgcttcgatggctatgtcagcgagagcgccaccagcaagaagatcgcccacagcgtcttcagcaagggcgacagcgcctacctctcaggtgacgtgctagtgatggatgagctgggctacatgtacttccgggaccgtagcggggacaccttccgctggcgaggggagaacgtctccaccaccgaggtggagggcgtgctgagccgcctgctgggccagacagacgtggccgtctatggggtggctgttccaggcaccttcaagatccagaagacgaggctgcagcgagagggctttgacccacgccagacctcagaccggctcttcttcctggacctgaagcagggccactacctgcccttaaatgaggcagtctacactcgcatctgctcgggcgccttcgccctctgaagctgttcctctactggccacaaactctgggcctggtgggagaggccagcttgagccagacagcgctgcccaggggtggccgcctagtacacacccacctggccgagctgtacctggcacggcccatcctggactgagaaactggaacctcagaggaacccgtgcctctctgctgccttggtgcccctgtgtctgcctcctctccctgcttttcagcctctgtctccttccatccctgtccctgtctggccttaactcttccctctttttcttttctttctttctttcttttttttttaagatagagtctcactctgctgcccgggctagagtgcagtggtgggatctcggctcactgcaacctctgcctcctggggttcaagtgatcctcccacctcagcctcctgagtagctgggattacaggcacccgccaccacgtccagctaatttttatatttttagtagagacggggtttcaccatgttggtcaggntggtcttgaactcctgacctcaggtgatccgctggcctcggcctcccagagtgctgggattataggcgtgagcctctggcccggcctttcctttttcctctcctctcctgccgagagtggaacacgcgtgtcctgggagctgcatcttgtgtagggtccagctgcttttggggactgcaggaatcatctcccctgggccctggactcggactggggcctccccacctccctctcggctgtgccttacggagccccaatccaggcctcctgtggctgttgggttccagatgctgcagctccatgtgacttccaagcaggccctccgccctccctgctgaatggaggagccgggggtcccccaggccaactggaaaatctcccaggctaggccaattgccttttgcacttccccgttcctgtcacatttccccagccccaccttcccctcctgatgccctgaaagcttccggaattgactgtgaccacttggatgtcaccactgtcagcccctgccttgatgtccccatttagccatctccatggagctcctgctggagggccctgaaccctgcactgcgtggctgcccagccagctgcctcctgtcctgggaggaggcctcctgggtgtcctcatctggtgtgtctactggagggtcccacaggagaggcagcagaggggtcaggggaggtctcctgccgggggttggcctctcaagcctcaggggttctagcctgttgaatataccccacctggtggtggcccctccgatgtccccactgatggctctgacaccgtgttggtggcgatgtcccagacaatcccaccaggacggcccagacatccctactggcttcgctggtggctcatctcgaacatccacgccagcctttctggggccggccacccaggccgcctgtccgtctgtcctccctccagcagcaccccctggcccctggagtggtggggccatggcaagagacaccgtggcgtctcatgtgaactttcctgggcactgtggttttatttcctaattgatttaagaaataaacctgaagaccgtctggtgcaagctg

SEQ ID NO: 295484 - DNA, 2656 bp, Homo sapiens
  misc_feature (1582)..(1582): n is a, c, g, or t
ggtccacatgcagcatgcttccccatgcctgtaccctgggggatttaggtcccagcctctgccctcccggctccccctccccctgcaggtactaccgcatggcagccttcggccaccacgcctaccgcatgcaggcggctgacgtgctctatgactgcctgcccctgtaccactcggcaggaaacatcatcggcgtggggcagtgtctcatctatgggctgacagtcgtcctccgcaagaaattctcggccagccgcttctgggacgactgcatcaagtacaactgcacggtggttcagtacatcggggagatctgccgctacctgctgaagcagccggtgcgcgaggcggagaggcgacaccgcgtgcgcctggcggtggggaacgggctgcgtcctgccatctgggaggagttcacggagcgcttcggcgtacgccaaatcggggagttctacggcgccaccgagtgcaactgcagcattgccaacatggacggcaaggtcggctcctgtggtttcaacagccgcatcctgccccacgtgtaccccatccggctggtgaaggtcaatgaggacacaatggagctgctgcgggatgcccagggcctctgcatcccctgccaggccggggagcctggcctccttgtgggtcagatcaaccaacaggacccgctgcgccgcttcgatggctatgtcagcgagagcgccaccagcaagaagatcgcccacagcgtcttcagcaagggcgacagcgcctacctctcaggtgacgtgctagtgatggatgagctgggctacatgtacttccgggaccgtagcggggacaccttccgctggcgaggggagaacgtctccaccaccgaggtggagggcgtgctgagccgcctgctgggccagacagacgtggccgtctatggggtggctgttccaggcaccttcaagatccagaagacgaggctgcagcgagagggctttgacccacgccagacctcagaccggctcttcttcctggacctgaagcagggccactacctgcccttaaatgaggcagtctacactcgcatctgctcgggcgccttcgccctctgaagctgttcctctactggccacaaactctgggcctggtgggagaggccagcttgagccagacagcgctgcccaggggtggccgcctagtacacacccacctggccgagctgtacctggcacggcccatcctggactgagaaactggaacctcagaggaacccgtgcctctctgctgccttggtgcccctgtgtctgcctcctctccctgcttttcagcctctgtctccttccatccctgtccctgtctggccttaactcttccctctttttcttttctttctttctttcttttttttttaagatagagtctcactctgctgcccgggctagagtgcagtggtgggatctcggctcactgcaacctctgcctcctggggttcaagtgatcctcccacctcagcctcctgagtagctgggattacaggcacccgccaccacgtccagctaatttttatatttttagtagagacggggtttcaccatgttggtcaggntggtcttgaactcctgacctcaggtgatccgctggcctcggcctcccagagtgctgggattataggcgtgagcctctggcccggcctttcctttttcctctcctctcctgccgagagtggaacacgcgtgtcctgggagctgcatcttgtgtagggtccagctgcttttggggactgcaggaatcatctcccctgggccctggactcggactggggcctccccacctccctctcggctgtgccttacggagccccaatccaggcctcctgtggctgttgggttccagatgctgcagctccatgtgacttccaagcaggccctccgccctccctgctgaatggaggagccgggggtcccccaggccaactggaaaatctcccaggctaggccaattgccttttgcacttccccgttcctgtcacatttccccagccccaccttcccctcctgatgccctgaaagcttccggaattgactgtgaccacttggatgtcaccactgtcagcccctgccttgatgtccccatttagccatctccatggagctcctgctggagggccctgaaccctgcactgcgtggctgcccagccagctgcctcctgtcctgggaggaggcctcctgggtgtcctcatctggtgtgtctactggagggtcccacaggagaggcagcagaggggtcaggggaggtctcctgccgggggttggcctctcaagcctcaggggttctagcctgttgaatataccccacctggtggtggcccctccgatgtccccactgatggctctgacaccgtgttggtggcgatgtcccagacaatcccaccaggacggcccagacatccctactggcttcgctggtggctcatctcgaacatccacgccagcctttctggggccggccacccaggccgcctgtccgtctgtcctccctccagcagcaccccctggcccctggagtggtggggccatggcaagagacaccgtggcgtctcatgtgaactttcctgggcactgtggttttatttcctaattgatttaagaaataaacctgaagaccgtctggtgcaagctg

SEQ ID NO: 295485 - DNA, 2928 bp, Homo sapiens
  misc_feature (1854)..(1854): n is a, c, g, or t
gcggccgccctggacgtgggcatgaggtgcacggtctgggtatgccccgggcagggagttggtgcatcccaggcctcgggagggggcctgtccggcggtgaccatgacccatgtgttggggaccacagcggtggccgaagtgagcgggcatctggggaaaagtttgatcaagttctgctctggagacttggggcccgagggcatcttgccggacacccacctcctggacccgctgctgaaggaggcctctactgcccccttggcacagatccccagcaagggcatggacgatcgtcttttctacatctacacgtcggggaccaccgggctgcccaaggctgccattgtcgtgcacagcaggtactaccgcatggcagccttcggccaccacgcctaccgcatgcaggcggctgacgtgctctatgactgcctgcccctgtaccactcggcaggaaacatcatcggcgtggggcagtgtctcatctatgggctgacagtcgtcctccgcaagaaattctcggccagccgcttctgggacgactgcatcaagtacaactgcacggtggttcagtacatcggggagatctgccgctacctgctgaagcagccggtgcgcgaggcggagaggcgacaccgcgtgcgcctggcggtggggaacgggctgcgtcctgccatctgggaggagttcacggagcgcttcggcgtacgccaaatcggggagttctacggcgccaccgagtgcaactgcagcattgccaacatggacggcaaggtcggctcctgtggtttcaacagccgcatcctgccccacgtgtaccccatccggctggtgaaggtcaatgaggacacaatggagctgctgcgggatgcccagggcctctgcatcccctgccaggccggggagcctggcctccttgtgggtcagatcaaccaacaggacccgctgcgccgcttcgatggctatgtcagcgagagcgccaccagcaagaagatcgcccacagcgtcttcagcaagggcgacagcgcctacctctcaggtgacgtgctagtgatggatgagctgggctacatgtacttccgggaccgtagcggggacaccttccgctggcgaggggagaacgtctccaccaccgaggtggagggcgtgctgagccgcctgctgggccagacagacgtggccgtctatggggtggctgttccaggcaccttcaagatccagaagacgaggctgcagcgagagggctttgacccacgccagacctcagaccggctcttcttcctggacctgaagcagggccactacctgcccttaaatgaggcagtctacactcgcatctgctcgggcgccttcgccctctgaagctgttcctctactggccacaaactctgggcctggtgggagaggccagcttgagccagacagcgctgcccaggggtggccgcctagtacacacccacctggccgagctgtacctggcacggcccatcctggactgagaaactggaacctcagaggaacccgtgcctctctgctgccttggtgcccctgtgtctgcctcctctccctgcttttcagcctctgtctccttccatccctgtccctgtctggccttaactcttccctctttttcttttctttctttctttcttttttttttaagatagagtctcactctgctgcccgggctagagtgcagtggtgggatctcggctcactgcaacctctgcctcctggggttcaagtgatcctcccacctcagcctcctgagtagctgggattacaggcacccgccaccacgtccagctaatttttatatttttagtagagacggggtttcaccatgttggtcaggntggtcttgaactcctgacctcaggtgatccgctggcctcggcctcccagagtgctgggattataggcgtgagcctctggcccggcctttcctttttcctctcctctcctgccgagagtggaacacgcgtgtcctgggagctgcatcttgtgtagggtccagctgcttttggggactgcaggaatcatctcccctgggccctggactcggactggggcctccccacctccctctcggctgtgccttacggagccccaatccaggcctcctgtggctgttgggttccagatgctgcagctccatgtgacttccaagcaggccctccgccctccctgctgaatggaggagccgggggtcccccaggccaactggaaaatctcccaggctaggccaattgccttttgcacttccccgttcctgtcacatttccccagccccaccttcccctcctgatgccctgaaagcttccggaattgactgtgaccacttggatgtcaccactgtcagcccctgccttgatgtccccatttagccatctccatggagctcctgctggagggccctgaaccctgcactgcgtggctgcccagccagctgcctcctgtcctgggaggaggcctcctgggtgtcctcatctggtgtgtctactggagggtcccacaggagaggcagcagaggggtcaggggaggtctcctgccgggggttggcctctcaagcctcaggggttctagcctgttgaatataccccacctggtggtggcccctccgatgtccccactgatggctctgacaccgtgttggtggcgatgtcccagacaatcccaccaggacggcccagacatccctactggcttcgctggtggctcatctcgaacatccacgccagcctttctggggccggccacccaggccgcctgtccgtctgtcctccctccagcagcaccccctggcccctggagtggtggggccatggcaagagacaccgtggcgtctcatgtgaactttcctgggcactgtggttttatttcctaattgatttaagaaataaacctgaagaccgtctggtgcaagctg

SEQ ID NO: 295486 - DNA, 1850 bp, Homo sapiens
  misc_feature (776)..(776): n is a, c, g, or t
gcggccgtcgcagacccccacagcctgctggaccccaacgcgatataccaggagctgcagaaggtgctggcaccctatgcccggcccatcttcctgcgcctcctgccccaggtggacaccacaggcaccttcaagatccagaagacgaggctgcagcgagagggctttgacccacgccagacctcagaccggctcttcttcctggacctgaagcagggccactacctgcccttaaatgaggcagtctacactcgcatctgctcgggcgccttcgccctctgaagctgttcctctactggccacaaactctgggcctggtgggagaggccagcttgagccagacagcgctgcccaggggtggccgcctagtacacacccacctggccgagctgtacctggcacggcccatcctggactgagaaactggaacctcagaggaacccgtgcctctctgctgccttggtgcccctgtgtctgcctcctctccctgcttttcagcctctgtctccttccatccctgtccctgtctggccttaactcttccctctttttcttttctttctttctttcttttttttttaagatagagtctcactctgctgcccgggctagagtgcagtggtgggatctcggctcactgcaacctctgcctcctggggttcaagtgatcctcccacctcagcctcctgagtagctgggattacaggcacccgccaccacgtccagctaatttttatatttttagtagagacggggtttcaccatgttggtcaggntggtcttgaactcctgacctcaggtgatccgctggcctcggcctcccagagtgctgggattataggcgtgagcctctggcccggcctttcctttttcctctcctctcctgccgagagtggaacacgcgtgtcctgggagctgcatcttgtgtagggtccagctgcttttggggactgcaggaatcatctcccctgggccctggactcggactggggcctccccacctccctctcggctgtgccttacggagccccaatccaggcctcctgtggctgttgggttccagatgctgcagctccatgtgacttccaagcaggccctccgccctccctgctgaatggaggagccgggggtcccccaggccaactggaaaatctcccaggctaggccaattgccttttgcacttccccgttcctgtcacatttccccagccccaccttcccctcctgatgccctgaaagcttccggaattgactgtgaccacttggatgtcaccactgtcagcccctgccttgatgtccccatttagccatctccatggagctcctgctggagggccctgaaccctgcactgcgtggctgcccagccagctgcctcctgtcctgggaggaggcctcctgggtgtcctcatctggtgtgtctactggagggtcccacaggagaggcagcagaggggtcaggggaggtctcctgccgggggttggcctctcaagcctcaggggttctagcctgttgaatataccccacctggtggtggcccctccgatgtccccactgatggctctgacaccgtgttggtggcgatgtcccagacaatcccaccaggacggcccagacatccctactggcttcgctggtggctcatctcgaacatccacgccagcctttctggggccggccacccaggccgcctgtccgtctgtcctccctccagcagcaccccctggcccctggagtggtggggccatggcaagagacaccgtggcgtctcatgtgaactttcctgggcactgtggttttatttcctaattgatttaagaaataaacctgaagaccgtctggtgcaagctg

SEQ ID NO: 295487 - DNA, 3245 bp, Homo sapiens
  misc_feature (2311)..(2311): n is a, c, g, or t
tcagctctctctgcttccccaggatgcgggctccgggtgcgggcgcggcctcggtggtctcgctggcgctgttgtggctgctggggctgccgtggacctggagcgcggcagcggcgctcggcgtgtacgtgggcagcggcggctggcgcttcctgcgcatcgtctgcaagaccgcgaggcgagacctcttcggtctctctgtgctgatccgcgtgcgcctggagctgcggcggcaccagcgtgccggccacaccatcccgcgcatctttcaggcggtagtgcagcgacagcccgagcgcctggcgctggtggatgccgggaccggcgagtgctggacctttgcgcagctggacgcctactccaatgcggtagccaacctcttccgccagctgggcttcgcgccgggcgacgtggtggccatcttcctggagggccggccggagttcgtggggctgtggctgggcctggccaaggcgggcatggaggccgcgctgctcaacgtgaacctgcggcgcgagcccctggccttctgcctgggcacctcgggcgctaaggccctgatctttggaggagaaatggtggcggcggtggccgaagtgagcgggcatctggggaaaagtttgatcaagttctgctctggagacttggggcccgagggcatcttgccggacacccacctcctggacccgctgctgaaggaggcctctactgcccccttggcacagatccccagcaagggcatggacgatcgtcttttctacatctacacgtcggggaccaccgggctgcccaaggctgccattgtcgtgcacagcaggtactaccgcatggcagccttcggccaccacgcctaccgcatgcaggcggctgacgtgctctatgactgcctgcccctgtaccactcggcaggaaacatcatcggcgtggggcagtgtctcatctatgggctgacagtcgtcctccgcaagaaattctcggccagccgcttctgggacgactgcatcaagtacaactgcacggtggttcagtacatcggggagatctgccgctacctgctgaagcagccggtgcgcgaggcggagaggcgacaccgcgtgcgcctggcggtggggaacgggctgcgtcctgccatctgggaggagttcacggagcgcttcggcgtacgccaaatcggggagttctacggcgccaccgagtgcaactgcagcattgccaacatggacggcaaggtcggctcctgtggtttcaacagccgcatcctgccccacgtgtaccccatccggctggtgaaggtcaatgaggacacaatggagctgctgcgggatgcccagggcctctgcatcccctgccaggccggggagcctggcctccttgtgggtcagatcaaccaacaggacccgctgcgccgcttcgatggctatgtcagcgagagcgccaccagcaagaagatcgcccacagcgtcttcagcaagggcgacagcgcctacctctcaggtgacgtgctagtgatggatgagctgggctacatgtacttccgggaccgtagcggggacaccttccgctggcgaggggagaacgtctccaccaccgaggtggagggcgtgctgagccgcctgctgggccagacagacgtggccgtctatggggtggctgttccaggcaccttcaagatccagaagacgaggctgcagcgagagggctttgacccacgccagacctcagaccggctcttcttcctggacctgaagcagggccactacctgcccttaaatgaggcagtctacactcgcatctgctcgggcgccttcgccctctgaagctgttcctctactggccacaaactctgggcctggtgggagaggccagcttgagccagacagcgctgcccaggggtggccgcctagtacacacccacctggccgagctgtacctggcacggcccatcctggactgagaaactggaacctcagaggaacccgtgcctctctgctgccttggtgcccctgtgtctgcctcctctccctgcttttcagcctctgtctccttccatccctgtccctgtctggccttaactcttccctctttttcttttctttctttctttcttttttttttaagatagagtctcactctgctgcccgggctagagtgcagtggtgggatctcggctcactgcaacctctgcctcctggggttcaagtgatcctcccacctcagcctcctgagtagctgggattacaggcacccgccaccacgtccagctaatttttatatttttagtagagacggggtttcaccatgttggtcaggntggtcttgaactcctgacctcaggtgatccgctggcctcggcctcccagagtgctgggattataggcgtgagcctctggcccggcctttcctttttcctctcctctcctgccgagagtggaacacgcgtgtcctgggagctgcatcttgtgtagggtccagctgcttttggggactgcaggaatcatctccctgctgaatggaggagccgggggtcccccaggccaactggaaaatctcccaggctaggccaattgccttttgcacttccccgttcctgtcacatttccccagccccaccttcccctcctgatgccctgaaagcttccggaattgactgtgaccacttggatgtcaccactgtcagcccctgccttgatgtccccatttagccatctccatggagctcctgctggagggccctgaaccctgcactgcgtggctgcccagccagctgcctcctgtcctgggaggaggcctcctgggtgtcctcatctggtgtgtctactggagggtcccacaggagaggcagcagaggggtcaggggaggtctcctgccgggggttggcctctcaagcctcaggggttctagcctgttgaatataccccacctggtggtggcccctccgatgtccccactgatggctctgacaccgtgttggtggcgatgtcccagacaatcccaccaggacggcccagacatccctactggcttcgctggtggctcatctcgaacatccacgccagcctttctggggccggccacccaggccgcctgtccgtctgtcctccctccagcagcaccccctggcccctggagtggtggggccatggcaagagacaccgtggcgtctcatgtgaactttcctgggcactgtggttttatttcctaattgatttaagaaataaacctgaagaccgtctggtgcaagctg

SEQ ID NO: 295488 - DNA, 580 bp, Homo sapiens
ttttaaagatggagttttactcttgttgcccaggctggagtttaacggcacaatctcggctctgtctcccaggttcaagcaattctcctgcccagccagctgcctcctgtcctgggaggaggcctcctgggtgtcctcatctggtgtgtctactggagggtcccacaggagaggcagcagaggggtcaggggaggtctcctgccgggggttggcctctcaagcctcaggggttctagcctgttgaatataccccacctggtggtggcccctccgatgtccccactgatggctctgacaccgtgttggtggcgatgtcccagacaatcccaccaggacggcccagacatccctactggcttcgctggtggctcatctcgaacatccacgccagcctttctggggccggccacccaggccgcctgtccgtctgtcctccctccagcagcaccccctggcccctggagtggtggggccatggcaagagacaccgtggcgtctcatgtgaactttcctgggcactgtggttttatttcctaattgatttaagaaataaacctgaagaccgtctggtgcaagctg

SEQ ID NO: 295489 - DNA, 1577 bp, Homo sapiens
tcagctctctctgcttccccaggatgcgggctccgggtgcgggcgcggcctcggtggtctcgctggcgctgttgtggctgctggggctgccgtggacctggagcgcggcagcggcgctcggcgtgtacgtgggcagcggcggctggcgcttcctgcgcatcgtctgcaagaccgcgaggcgagacctcttcggtctctctgtgctgatccgcgtgcgcctggagctgcggcggcaccagcgtgccggccacaccatcccgcgcatctttcaggcggtagtgcagcgacagcccgagcgcctggcgctggtggatgccgggaccggcgagtgctggacctttgcgcagctggacgcctactccaatgcggtagccaacctcttccgccagctgggcttcgcgccgggcgacgtggtggccatcttcctggagggccggccggagttcgtggggctgtggctgggcctggccaaggcgggcatggaggccgcgctgctcaacgtgaacctgcggcgcgagcccctggccttctgcctgggcacctcgggcgctaaggccctgatctttggaggagaaatggtggcggcggtggccgaagtgagcgggcatctggggaaaagtttgatcaagttctgctctggagacttggggcccgagggcatcttgccggacacccacctcctggacccgctgctgaaggaggcctctactgcccccttggcacagatccccagcaagggcatggacgatcgtcttttctacatctacacgtcggggaccaccgggctgcccaaggctgccattgtcgtgcacagcaggtactaccgcatggcagccttcggccaccacgcctaccgcatgcaggcggctgacgtgctctatgactgcctgcccctgtaccactcggcaggaaacatcatcggcgtggggcagtgtctcatctatgggctgacagtcgtcctccgcaagaaattctcggccagccgcttctgggacgactgcatcaagtacaactgcacggtggttcagtacatcggggagatctgccgctacctgctgaagcagccggtgcgcgaggcggagaggcgacaccgcgtgcgcctggcggtggggaacgggctgcgtcctgccatctgggaggagttcacggagcgcttcggcgtacgccaaatcggggagttctacggcgccaccgagtgcaactgcagcattgccaacatggacggcaaggtgcacaccggcagggccccggggcaggtctcggagttcagggaagaccactgtctcctcttcctggggcccctgggatacataaaacagcctggactggcgcggaaggctccgccaaggcgcacgcagggcggggtgtaaggggagttcctgggactcccggtgcaccaccagagggacaatcctgcagcctgcacagatagtcatgtgactgtggtccttgggtcaggagagttggaggataggtatggctgtgcgccctggcaagtgcctcagcctttctgagcctcagtttctgcgtgtggagattagcaaggagaatagggctctgtgtaccgtgctgttatt

SEQ ID NO: 295490 - DNA, 297 bp, Homo sapiens
tgaatgcaggctgggaaggtgggaggaggggccctgagttggaggcgacgcttactaccctgcttttgcagatcagccaaggtcacagagcttagaatgacactggaggtgctaggtccaagccccagggcaaggcaggcaaagtgttactgagaaggaccccgcatatccccggctccttccaactcagttcaccccattccaggtcggctcctgtggtttcaacagccgcatcctgccccacgtgtaccccatccggctggtgaaggtcaatgaggacacaatggagctgctgcg

SEQ ID NO: 295491 - DNA, 463 bp, Homo sapiens
taggattagctccctgggtggggcggtctcggggtctctcctctgatccgggctccccaccgcctgccggtcccatcacccacttcctcaccccgtcccccaggtggttcagtacatcggggagatctgccgctacctgctgaagcagccggtgcgcgaggcggagaggcgacaccgcgtgcgcctggcggtggggaacgggctgcgtcctgccatctgggaggagttcacggagcgcttcggcgtacgccaaatcggggagttctacggcgccaccgagtgcaactgcagcattgccaacatggacggcaaggtgcacaccggcagggccccggggcaggtctcggagttcagggaagaccactgtctcctcttcctggggcccctgggatacataaaacagcctggactggcgcggaaggctccgccaaggcgcacgcagggcggggtgtaaggggagttc

SEQ ID NO: 295492 - DNA, 1129 bp, Homo sapiens
  misc_feature (946)..(946): n is a, c, g, or t
  misc_feature (951)..(951): n is a, c, g, or t
  misc_feature (954)..(955): n is a, c, g, or t
  misc_feature (959)..(959): n is a, c, g, or t
  misc_feature (970)..(970): n is a, c, g, or t
  misc_feature (1128)..(1128): n is a, c, g, or t
ggctaggttcgaggctgggtgtggcgactaccacgacctggagtcggtggttcagcaggtggagcagaacctggagctgatgaccaaacgggctgtaaaggcagaaaaccacgtcgtgaaactaaaacaggaaatcagtttgctccaggcgcaggtctccaacttccagcgagagaatgaagccctgcggtgcggccagggtgccagcctgaccgtggtgaagcagaacgccgacgtggccctgcagaacctccgggtggtcatgaacagtgcacaggcttccatcaagcaactggtttccggagctgagacactgaatcttgttgccgaaatccttaaatctatagacagaatttctgaagttaaagacgaggaggaagactcttgaggacccctgggtgttctcagcatgaagctccgtgtataccctgaggtcaccaccgctcgatctaaatgtgcagttgtgtccttaaatatgcagtcttcacccagagtaaagtgttgatcgcaagagtccagtgtcgtgccctcagccagttcttggccaccacaatgggagcagccctggccgagttgtctctgtggtttctatgcagcccttcttggcgaaattcctgcgatcttatagattctaatgagctcttggaagacattgtcataaaagccagtgattttaagaaaaagagtggttctggaatcaatgttttccagtcccatcccagaacatcagttgtaagataagtacaattggttgtccttgatttcataagtagaacaaacactaaatgtgcctctgagatggccaccccgggcagggacctgtgccttccgccgatgctcagggctccctctggctcccgggtcactcttgtggccccagtgggtggtccctgcagtcatggcctgagtgcgcagggcacggtggtgtgtggctctcggaccgggnacagnccnncggnggaaggcaaangcctgggggggctggggcgtcagggcttggaggcggaatcgatcagttgccggttgagcacggtttgggcgcccagggggaacaagttggatctcagcaaaaccgcagaggtttaagcacaaagggccgggctctgtttttcttgcgttgtgtgttcng

SEQ ID NO: 295493 - DNA, 2216 bp, Homo sapiens
gttcaggcacgcgctttcggtgctcggagcggaagcagcggcgagaggctcggaggcgcgggggcggccgagcggcgggcgacgggggcgggcgacgggggcgggcgacgcgggccgcggcacgggcggagccggggccatggagccgccgctgccgggctaggcaggtcgtgccccgccgggccggcggcgatgtcgggctaccagcgccgcccgggcgccaccccgctgtcccgagcccggagcctcgccattcccgacgattttggctatggaaaggggaaatgttctaagcagagcccgtcaggagcccacgggacacattttggagatgacagatttgaagatctggaagaggcaaatccattctcttttagagagtttctgaagaccaagaacctcggcctctcgaaagaggatccggccagcagaatttatgcaaaggaagcctcgaggcattccctgggacttgaccacaactccccaccctcccaaaccggcgggtatggcctggagtatcagcagccatttttcgaggatccgacaggggctggtgacctcctggatgaggaggaggatgaggacaccggatggagtggggcctacctgccgtccgccatcgagcagactcaccccgagagggtccctgccggcacgtcgccctgcagcacatacctttcctttttctccaccccgtcggagctggcagggcctgagtctctgccctcgtgggcgttgagtgacactgattctcgcgtgtctccggcctctccggcagggagtcctagcgcagactttgcggttcatggagagtctctgggagacaggcacctgcggacgctgcagataagttacgacgcactgaaagatgaaaattctaagctgagaagaaagctgaatgaggttcagagcttctctgaagctcaaacagaaatggtgaggacgcttgagcggaagttagaagcaaaaatgatcaaggaggaaagcgactaccacgacctggagtcggtggttcagcaggtggagcagaacctggagctgatgaccaaacgggctgtaaaggcagaaaaccacgtcgtgaaactaaaacaggaaatcagtttgctccaggcgcaggtctccaacttccagcgagagaatgaagccctgcggtgcggccagggtgccagcctgaccgtggtgaagcagaacgccgacgtggccctgcagaacctccgggtggtcatgaacagtgcacaggcttccatcaagcaactggtttccggagctgagacactgaatcttgttgccgaaatccttaaatctatagacagaatttctgaagttaaagacgaggaggaagactcttgaggacccctgggtgttctcagcatgaagctccgtgtataccctgaggtcaccaccgctcgatctaaatgtgcagttgtgtccttaaatatgcagtcttcacccagagtaaagtgttgatcgcaagagtccagtgtcgtgccctcagccagttcttggccaccacaatgggagcagccctggccgagttgtctctgtggtttctatgcagcccttcttggcgaaattcctgcgatcttatagattctaatgagctcttggaagacattgtcataaaagccagtgattttaagaaaaagagtggttctggaatcaatgttttccagtcccatcccagaacatcagttgtaagataagtacaattggttgtccttgatttcataagtagaacaaacactaaatgtgcctctgagatggccaccccgggcagggacctgtgccttccgccgatgctcagggctccctctggctcccgggtcactcttgtggccccagtgggtggtccctgcagtcatggcctgagtgcgcaggggccaccgcgtggctgctgctgtcctcctccgggacccacggggaccaaggtcacacgttccgtgctgtgaagctgtccagatgtgcctctttggctgggggttctggtggacgtttcaagtggcattttgtacaatgcaggttagaattcaggaatttcaagtatgtgcccgggtctgtcaggtcccagttgcctttctgacggcccccctcagagggacggcgatgagcactaaatgcttttttgactattttcctatagattttttttaaaacttttttttcctcctgttccaattgatagctttcttatttaataaattctgtagttcaccgca

SEQ ID NO: 295494 - DNA, 2366 bp, Homo sapiens
gttcaggcacgcgctttcggtgctcggagcggaagcagcggcgagaggctcggaggcgcgggggcggccgagcggcgggcgacgggggcgggcgacgggggcgggcgacgcgggccgcggcacgggcggagccggggccatggagccgccgctgccgggctaggcaggtcgtgccccgccgggccggcggcgatgtcgggctaccagcgccgcccgggcgccaccccgctgtcccgagcccggagcctcgccattcccgacgctccagcgttctatgagcgccggtcttgtctcccccagctaaattgtgagcgcccccatggcagggacctggactcccccttcttcggcattcggccggcctttatgtgctatgtgcccagcccggtgctggcttccgtgggagacacagattttggctatggaaaggggaaatgttctaagcagagcccgtcaggagcccacgggacacattttggagatgacagatttgaagatctggaagaggcaaatccattctcttttagagagtttctgaagaccaagaacctcggcctctcgaaagaggatccggccagcagaatttatgcaaaggaagcctcgaggcattccctgggacttgaccacaactccccaccctcccaaaccggcgggtatggcctggagtatcagcagccatttttcgaggatccgacaggggctggtgacctcctggatgaggaggaggatgaggacaccggatggagtggggcctacctgccgtccgccatcgagcagactcaccccgagagggtccctgccggcacgtcgccctgcagcacatacctttcctttttctccaccccgtcggagctggcagggcctgagtctctgccctcgtgggcgttgagtgacactgattctcgcgtgtctccggcctctccggcagggagtcctagcgcagactttgcggttcatggagagtctctgggagacaggcacctgcggacgctgcagataagttacgacgcactgaaagatgaaaattctaagctgagaagaaagctgaatgaggttcagagcttctctgaagctcaaacagaaatggtgaggacgcttgagcggaagttagaagcaaaaatgatcaaggaggaaagcgactaccacgacctggagtcggtggttcagcaggtggagcagaacctggagctgatgaccaaacgggctgtaaaggcagaaaaccacgtcgtgaaactaaaacaggaaatcagtttgctccaggcgcaggtctccaacttccagcgagagaatgaagccctgcggtgcggccagggtgccagcctgaccgtggtgaagcagaacgccgacgtggccctgcagaacctccgggtggtcatgaacagtgcacaggcttccatcaagcaactggtttccggagctgagacactgaatcttgttgccgaaatccttaaatctatagacagaatttctgaagttaaagacgaggaggaagactcttgaggacccctgggtgttctcagcatgaagctccgtgtataccctgaggtcaccaccgctcgatctaaatgtgcagttgtgtccttaaatatgcagtcttcacccagagtaaagtgttgatcgcaagagtccagtgtcgtgccctcagccagttcttggccaccacaatgggagcagccctggccgagttgtctctgtggtttctatgcagcccttcttggcgaaattcctgcgatcttatagattctaatgagctcttggaagacattgtcataaaagccagtgattttaagaaaaagagtggttctggaatcaatgttttccagtcccatcccagaacatcagttgtaagataagtacaattggttgtccttgatttcataagtagaacaaacactaaatgtgcctctgagatggccaccccgggcagggacctgtgccttccgccgatgctcagggctccctctggctcccgggtcactcttgtggccccagtgggtggtccctgcagtcatggcctgagtgcgcaggggccaccgcgtggctgctgctgtcctcctccgggacccacggggaccaaggtcacacgttccgtgctgtgaagctgtccagatgtgcctctttggctgggggttctggtggacgtttcaagtggcattttgtacaatgcaggttagaattcaggaatttcaagtatgtgcccgggtctgtcaggtcccagttgcctttctgacggcccccctcagagggacggcgatgagcactaaatgcttttttgactattttcctatagattttttttaaaacttttttttcctcctgttccaattgatagctttcttatttaataaattctgtagttcaccgca

SEQ ID NO: 295495 - DNA, 2297 bp, Homo sapiens
gttcaggcacgcgctttcggtgctcggagcggaagcagcggcgagaggctcggaggcgcgggggcggccgagcggcgggcgacgggggcgggcgacgggggcgggcgacgcgggccgcggcacgggcggagccggggccatggagccgccgctgccgggctaggcaggtcgtgccccgccgggccggcggcgatgtcgggctaccagcgccgcccgggcgccaccccgctgtcccgagcccggagcctcgccattcccgacgctccagcgttctatgagcgccggtcttgtctcccccagctaaattgtgagcgcccccatggcagggacctggactcccccttcttcggcattcggccggcctttatgtgctatgtgcccagcccggtgctggcttccgtgggagacacagatgacagatttgaagatctggaagaggcaaatccattctcttttagagagtttctgaagaccaagaacctcggcctctcgaaagaggatccggccagcagaatttatgcaaaggaagcctcgaggcattccctgggacttgaccacaactccccaccctcccaaaccggcgggtatggcctggagtatcagcagccatttttcgaggatccgacaggggctggtgacctcctggatgaggaggaggatgaggacaccggatggagtggggcctacctgccgtccgccatcgagcagactcaccccgagagggtccctgccggcacgtcgccctgcagcacatacctttcctttttctccaccccgtcggagctggcagggcctgagtctctgccctcgtgggcgttgagtgacactgattctcgcgtgtctccggcctctccggcagggagtcctagcgcagactttgcggttcatggagagtctctgggagacaggcacctgcggacgctgcagataagttacgacgcactgaaagatgaaaattctaagctgagaagaaagctgaatgaggttcagagcttctctgaagctcaaacagaaatggtgaggacgcttgagcggaagttagaagcaaaaatgatcaaggaggaaagcgactaccacgacctggagtcggtggttcagcaggtggagcagaacctggagctgatgaccaaacgggctgtaaaggcagaaaaccacgtcgtgaaactaaaacaggaaatcagtttgctccaggcgcaggtctccaacttccagcgagagaatgaagccctgcggtgcggccagggtgccagcctgaccgtggtgaagcagaacgccgacgtggccctgcagaacctccgggtggtcatgaacagtgcacaggcttccatcaagcaactggtttccggagctgagacactgaatcttgttgccgaaatccttaaatctatagacagaatttctgaagttaaagacgaggaggaagactcttgaggacccctgggtgttctcagcatgaagctccgtgtataccctgaggtcaccaccgctcgatctaaatgtgcagttgtgtccttaaatatgcagtcttcacccagagtaaagtgttgatcgcaagagtccagtgtcgtgccctcagccagttcttggccaccacaatgggagcagccctggccgagttgtctctgtggtttctatgcagcccttcttggcgaaattcctgcgatcttatagattctaatgagctcttggaagacattgtcataaaagccagtgattttaagaaaaagagtggttctggaatcaatgttttccagtcccatcccagaacatcagttgtaagataagtacaattggttgtccttgatttcataagtagaacaaacactaaatgtgcctctgagatggccaccccgggcagggacctgtgccttccgccgatgctcagggctccctctggctcccgggtcactcttgtggccccagtgggtggtccctgcagtcatggcctgagtgcgcaggggccaccgcgtggctgctgctgtcctcctccgggacccacggggaccaaggtcacacgttccgtgctgtgaagctgtccagatgtgcctctttggctgggggttctggtggacgtttcaagtggcattttgtacaatgcaggttagaattcaggaatttcaagtatgtgcccgggtctgtcaggtcccagttgcctttctgacggcccccctcagagggacggcgatgagcactaaatgcttttttgactattttcctatagattttttttaaaacttttttttcctcctgttccaattgatagctttcttatttaataaattctgtagttcaccgca

SEQ ID NO: 295496 - DNA, 2290 bp, Homo sapiens
gttcaggcacgcgctttcggtgctcggagcggaagcagcggcgagaggctcggaggcgcgggggcggccgagcggcgggcgacgggggcgggcgacgggggcgggcgacgcgggccgcccgggcgccaccccgctgtcccgagcccggagcctcgccattcccgacggtgagcggggcaggggccgagtccagcggtccaggtgggcggcggccgccccggcacgcagtaaagtcgctgttgtcgttgcttccagctccagcgttctatgagcgccggtcttgtctcccccagctaaattgtgagcgcccccatggcagggacctggactcccccttcttcggcattcggccggcctttatgtgctatgtgcccagcccggtgctggcttccgtgggagacacagatgacagatttgaagatctggaagaggcaaatccattctcttttagagagtttctgaagaccaagaacctcggcctctcgaaagaggatccggccagcagaatttatgcaaaggaagcctcgaggcattccctgggacttgaccacaactccccaccctcccaaaccggcgggtatggcctggagtatcagcagccatttttcgaggatccgacaggggctggtgacctcctggatgaggaggaggatgaggacaccggatggagtggggcctacctgccgtccgccatcgagcagactcaccccgagagggtccctgccggcacgtcgccctgcagcacatacctttcctttttctccaccccgtcggagctggcagggcctgagtctctgccctcgtgggcgttgagtgacactgattctcgcgtgtctccggcctctccggcagggagtcctagcgcagactttgcggttcatggagagtctctgggagacaggcacctgcggacgctgcagataagttacgacgcactgaaagatgaaaattctaagctgagaagaaagctgaatgaggttcagagcttctctgaagctcaaacagaaatggtgaggacgcttgagcggaagttagaagcaaaaatgatcaaggaggaaagcgactaccacgacctggagtcggtggttcagcaggtggagcagaacctggagctgatgaccaaacgggctgtaaaggcagaaaaccacgtcgtgaaactaaaacaggaaatcagtttgctccaggcgcaggtctccaacttccagcgagagaatgaagccctgcggtgcggccagggtgccagcctgaccgtggtgaagcagaacgccgacgtggccctgcagaacctccgggtggtcatgaacagtgcacaggcttccatcaagcaactggtttccggagctgagacactgaatcttgttgccgaaatccttaaatctatagacagaatttctgaagttaaagacgaggaggaagactcttgaggacccctgggtgttctcagcatgaagctccgtgtataccctgaggtcaccaccgctcgatctaaatgtgcagttgtgtccttaaatatgcagtcttcacccagagtaaagtgttgatcgcaagagtccagtgtcgtgccctcagccagttcttggccaccacaatgggagcagccctggccgagttgtctctgtggtttctatgcagcccttcttggcgaaattcctgcgatcttatagattctaatgagctcttggaagacattgtcataaaagccagtgattttaagaaaaagagtggttctggaatcaatgttttccagtcccatcccagaacatcagttgtaagataagtacaattggttgtccttgatttcataagtagaacaaacactaaatgtgcctctgagatggccaccccgggcagggacctgtgccttccgccgatgctcagggctccctctggctcccgggtcactcttgtggccccagtgggtggtccctgcagtcatggcctgagtgcgcaggggccaccgcgtggctgctgctgtcctcctccgggacccacggggaccaaggtcacacgttccgtgctgtgaagctgtccagatgtgcctctttggctgggggttctggtggacgtttcaagtggcattttgtacaatgcaggttagaattcaggaatttcaagtatgtgcccgggtctgtcaggtcccagttgcctttctgacggcccccctcagagggacggcgatgagcactaaatgcttttttgactattttcctatagattttttttaaaacttttttttcctcctgttccaattgatagctttcttatttaataaattctgtagttcaccgca

SEQ ID NO: 295497 - DNA, 2385 bp, Homo sapiens
gttcaggcacgcgctttcggtgctcggagcggaagcagcggcgagaggctcggaggcgcgggggcggccgagcggcgggcgacgggggcgggcgacgggggcgggcgacgcgggccgcggcacgggcggagccggggccatggagccgccgctgccgggctaggcaggtcgtgccccgccgggccggcggcgatgtcgggctaccagcgccgcccgggcgccaccccgctgtcccgagcccggagcctcgccattcccgacggtgagcggggcaggggccgagtccagcggtccaggtgggcggcggccgccccggcacgcagtaaagtcgctgttgtcgttgcttccagctccagcgttctatgagcgccggtcttgtctcccccagctaaattgtgagcgcccccatggcagggacctggactcccccttcttcggcattcggccggcctttatgtgctatgtgcccagcccggtgctggcttccgtgggagacacagatgacagatttgaagatctggaagaggcaaatccattctcttttagagagtttctgaagaccaagaacctcggcctctcgaaagaggatccggccagcagaatttatgcaaaggaagcctcgaggcattccctgggacttgaccacaactccccaccctcccaaaccggcgggtatggcctggagtatcagcagccatttttcgaggatccgacaggggctggtgacctcctggatgaggaggaggatgaggacaccggatggagtggggcctacctgccgtccgccatcgagcagactcaccccgagagggtccctgccggcacgtcgccctgcagcacatacctttcctttttctccaccccgtcggagctggcagggcctgagtctctgccctcgtgggcgttgagtgacactgattctcgcgtgtctccggcctctccggcagggagtcctagcgcagactttgcggttcatggagagtctctgggagacaggcacctgcggacgctgcagataagttacgacgcactgaaagatgaaaattctaagctgagaagaaagctgaatgaggttcagagcttctctgaagctcaaacagaaatggtgaggacgcttgagcggaagttagaagcaaaaatgatcaaggaggaaagcgactaccacgacctggagtcggtggttcagcaggtggagcagaacctggagctgatgaccaaacgggctgtaaaggcagaaaaccacgtcgtgaaactaaaacaggaaatcagtttgctccaggcgcaggtctccaacttccagcgagagaatgaagccctgcggtgcggccagggtgccagcctgaccgtggtgaagcagaacgccgacgtggccctgcagaacctccgggtggtcatgaacagtgcacaggcttccatcaagcaactggtttccggagctgagacactgaatcttgttgccgaaatccttaaatctatagacagaatttctgaagttaaagacgaggaggaagactcttgaggacccctgggtgttctcagcatgaagctccgtgtataccctgaggtcaccaccgctcgatctaaatgtgcagttgtgtccttaaatatgcagtcttcacccagagtaaagtgttgatcgcaagagtccagtgtcgtgccctcagccagttcttggccaccacaatgggagcagccctggccgagttgtctctgtggtttctatgcagcccttcttggcgaaattcctgcgatcttatagattctaatgagctcttggaagacattgtcataaaagccagtgattttaagaaaaagagtggttctggaatcaatgttttccagtcccatcccagaacatcagttgtaagataagtacaattggttgtccttgatttcataagtagaacaaacactaaatgtgcctctgagatggccaccccgggcagggacctgtgccttccgccgatgctcagggctccctctggctcccgggtcactcttgtggccccagtgggtggtccctgcagtcatggcctgagtgcgcaggggccaccgcgtggctgctgctgtcctcctccgggacccacggggaccaaggtcacacgttccgtgctgtgaagctgtccagatgtgcctctttggctgggggttctggtggacgtttcaagtggcattttgtacaatgcaggttagaattcaggaatttcaagtatgtgcccgggtctgtcaggtcccagttgcctttctgacggcccccctcagagggacggcgatgagcactaaatgcttttttgactattttcctatagattttttttaaaacttttttttcctcctgttccaattgatagctttcttatttaataaattctgtagttcaccgca

SEQ ID NO: 295498 - DNA, 2147 bp, Homo sapiens
gttcaggcacgcgctttcggtgctcggagcggaagcagcggcgagaggctcggaggcgcgggggcggccgagcggcgggcgacgggggcgggcgacgggggcgggcgacgcgggccgcggcacgggcggagccggggccatggagccgccgctgccgggctaggcaggtcgtgccccgccgggccggcggcgatgtcgggctaccagcgccgcccgggcgccaccccgctgtcccgagcccggagcctcgccattcccgacgatgacagatttgaagatctggaagaggcaaatccattctcttttagagagtttctgaagaccaagaacctcggcctctcgaaagaggatccggccagcagaatttatgcaaaggaagcctcgaggcattccctgggacttgaccacaactccccaccctcccaaaccggcgggtatggcctggagtatcagcagccatttttcgaggatccgacaggggctggtgacctcctggatgaggaggaggatgaggacaccggatggagtggggcctacctgccgtccgccatcgagcagactcaccccgagagggtccctgccggcacgtcgccctgcagcacatacctttcctttttctccaccccgtcggagctggcagggcctgagtctctgccctcgtgggcgttgagtgacactgattctcgcgtgtctccggcctctccggcagggagtcctagcgcagactttgcggttcatggagagtctctgggagacaggcacctgcggacgctgcagataagttacgacgcactgaaagatgaaaattctaagctgagaagaaagctgaatgaggttcagagcttctctgaagctcaaacagaaatggtgaggacgcttgagcggaagttagaagcaaaaatgatcaaggaggaaagcgactaccacgacctggagtcggtggttcagcaggtggagcagaacctggagctgatgaccaaacgggctgtaaaggcagaaaaccacgtcgtgaaactaaaacaggaaatcagtttgctccaggcgcaggtctccaacttccagcgagagaatgaagccctgcggtgcggccagggtgccagcctgaccgtggtgaagcagaacgccgacgtggccctgcagaacctccgggtggtcatgaacagtgcacaggcttccatcaagcaactggtttccggagctgagacactgaatcttgttgccgaaatccttaaatctatagacagaatttctgaagttaaagacgaggaggaagactcttgaggacccctgggtgttctcagcatgaagctccgtgtataccctgaggtcaccaccgctcgatctaaatgtgcagttgtgtccttaaatatgcagtcttcacccagagtaaagtgttgatcgcaagagtccagtgtcgtgccctcagccagttcttggccaccacaatgggagcagccctggccgagttgtctctgtggtttctatgcagcccttcttggcgaaattcctgcgatcttatagattctaatgagctcttggaagacattgtcataaaagccagtgattttaagaaaaagagtggttctggaatcaatgttttccagtcccatcccagaacatcagttgtaagataagtacaattggttgtccttgatttcataagtagaacaaacactaaatgtgcctctgagatggccaccccgggcagggacctgtgccttccgccgatgctcagggctccctctggctcccgggtcactcttgtggccccagtgggtggtccctgcagtcatggcctgagtgcgcaggggccaccgcgtggctgctgctgtcctcctccgggacccacggggaccaaggtcacacgttccgtgctgtgaagctgtccagatgtgcctctttggctgggggttctggtggacgtttcaagtggcattttgtacaatgcaggttagaattcaggaatttcaagtatgtgcccgggtctgtcaggtcccagttgcctttctgacggcccccctcagagggacggcgatgagcactaaatgcttttttgactattttcctatagattttttttaaaacttttttttcctcctgttccaattgatagctttcttatttaataaattctgtagttcaccgca

SEQ ID NO: 295499 - DNA, 2601 bp, Homo sapiens
gttcaggcacgcgctttcggtgctcggagcggaagcagcggcgagaggctcggaggcgcgggggcggccgagcggcgggcgacgggggcgggcgacgggggcgggcgacgcgggccgcggcacgggcggagccggggccatggagccgccgctgccgggctaggcaggtcgtgccccgccgggccggcggcgatgtcgggctaccagcgccgcccgggcgccaccccgctgtcccgagcccggagcctcgccattcccgacggtgagcggggcaggggccgagtccagcggtccaggtgggcggcggccgccccggcacgcagtaaagtcgctgttgtcgttgcttccagctccagcgttctatgagcgccggtcttgtctcccccagctaaattgtgagcgcccccatggcagggacctggactcccccttcttcggcattcggccggcctttatgtgctatgtgcccagcccggtgctggcttccgtgggagacacaggtgagagacgagggcgccggccccggggacgcttccagttcccgcgccacgtgtggcacctccgctgcagcacgagctcgtccattgacccatcaatgtgcagagcgctcactgcgtgccaggcactcggaattcaaaggcggagtcccctgctaggagctcacagtctggttgcggggagacctcccccaagacagacagttccagtacaggatgatgacagatttgaagatctggaagaggcaaatccattctcttttagagagtttctgaagaccaagaacctcggcctctcgaaagaggatccggccagcagaatttatgcaaaggaagcctcgaggcattccctgggacttgaccacaactccccaccctcccaaaccggcgggtatggcctggagtatcagcagccatttttcgaggatccgacaggggctggtgacctcctggatgaggaggaggatgaggacaccggatggagtggggcctacctgccgtccgccatcgagcagactcaccccgagagggtccctgccggcacgtcgccctgcagcacatacctttcctttttctccaccccgtcggagctggcagggcctgagtctctgccctcgtgggcgttgagtgacactgattctcgcgtgtctccggcctctccggcagggagtcctagcgcagactttgcggttcatggagagtctctgggagacaggcacctgcggacgctgcagataagttacgacgcactgaaagatgaaaattctaagctgagaagaaagctgaatgaggttcagagcttctctgaagctcaaacagaaatggtgaggacgcttgagcggaagttagaagcaaaaatgatcaaggaggaaagcgactaccacgacctggagtcggtggttcagcaggtggagcagaacctggagctgatgaccaaacgggctgtaaaggcagaaaaccacgtcgtgaaactaaaacaggaaatcagtttgctccaggcgcaggtctccaacttccagcgagagaatgaagccctgcggtgcggccagggtgccagcctgaccgtggtgaagcagaacgccgacgtggccctgcagaacctccgggtggtcatgaacagtgcacaggcttccatcaagcaactggtttccggagctgagacactgaatcttgttgccgaaatccttaaatctatagacagaatttctgaagttaaagacgaggaggaagactcttgaggacccctgggtgttctcagcatgaagctccgtgtataccctgaggtcaccaccgctcgatctaaatgtgcagttgtgtccttaaatatgcagtcttcacccagagtaaagtgttgatcgcaagagtccagtgtcgtgccctcagccagttcttggccaccacaatgggagcagccctggccgagttgtctctgtggtttctatgcagcccttcttggcgaaattcctgcgatcttatagattctaatgagctcttggaagacattgtcataaaagccagtgattttaagaaaaagagtggttctggaatcaatgttttccagtcccatcccagaacatcagttgtaagataagtacaattggttgtccttgatttcataagtagaacaaacactaaatgtgcctctgagatggccaccccgggcagggacctgtgccttccgccgatgctcagggctccctctggctcccgggtcactcttgtggccccagtgggtggtccctgcagtcatggcctgagtgcgcaggggccaccgcgtggctgctgctgtcctcctccgggacccacggggaccaaggtcacacgttccgtgctgtgaagctgtccagatgtgcctctttggctgggggttctggtggacgtttcaagtggcattttgtacaatgcaggttagaattcaggaatttcaagtatgtgcccgggtctgtcaggtcccagttgcctttctgacggcccccctcagagggacggcgatgagcactaaatgcttttttgactattttcctatagattttttttaaaacttttttttcctcctgttccaattgatagctttcttatttaataaattctgtagttcaccgca

SEQ ID NO: 295500 - DNA, 1689 bp, Homo sapiens
agagtggccccggagccagaggaccctgagcatcgcgaaagcacaggtcctgcccgggtgccatctcagagcacatttagtgtttgttctacttatgaaatcaaggaccacccattgtacttatcgtacaactgatgttctgggatgggactggaaaacattgattccagaaccactgctttgtcttaaaatcactggcttttatgacaatgtcttccctgattctcgcgtgtctccggcctctccggcagggagtcctagcgcagactttgcggttcatggagagtctctgggagacaggcacctgcggacgctgcagataagttacgacgcactgaaagatgaaaattctaagctgagaagaaagctgaatgaggttcagagcttctctgaagctcaaacagaaatggtgaggacgcttgagcggaagttagaagcaaaaatgatcaaggaggaaagcgactaccacgacctggagtcggtggttcagcaggtggagcagaacctggagctgatgaccaaacgggctgtaaaggcagaaaaccacgtcgtgaaactaaaacaggaaatcagtttgctccaggcgcaggtctccaacttccagcgagagaatgaagccctgcggtgcggccagggtgccagcctgaccgtggtgaagcagaacgccgacgtggccctgcagaacctccgggtggtcatgaacagtgcacaggcttccatcaagcaactggtttccggagctgagacactgaatcttgttgccgaaatccttaaatctatagacagaatttctgaagttaaagacgaggaggaagactcttgaggacccctgggtgttctcagcatgaagctccgtgtataccctgaggtcaccaccgctcgatctaaatgtgcagttgtgtccttaaatatgcagtcttcacccagagtaaagtgttgatcgcaagagtccagtgtcgtgccctcagccagttcttggccaccacaatgggagcagccctggccgagttgtctctgtggtttctatgcagcccttcttggcgaaattcctgcgatcttatagattctaatgagctcttggaagacattgtcataaaagccagtgattttaagaaaaagagtggttctggaatcaatgttttccagtcccatcccagaacatcagttgtaagataagtacaattggttgtccttgatttcataagtagaacaaacactaaatgtgcctctgagatggccaccccgggcagggacctgtgccttccgccgatgctcagggctccctctggctcccgggtcactcttgtggccccagtgggtggtccctgcagtcatggcctgagtgcgcaggggccaccgcgtggctgctgctgtcctcctccgggacccacggggaccaaggtcacacgttccgtgctgtgaagctgtccagatgtgcctctttggctgggggttctggtggacgtttcaagtggcattttgtacaatgcaggttagaattcaggaatttcaagtatgtgcccgggtctgtcaggtcccagttgcctttctgacggcccccctcagagggacggcgatgagcactaaatgcttttttgactattttcctatagattttttttaaaacttttttttcctcctgttccaattgatagctttcttatttaataaattctgtagttcaccgca

SEQ ID NO: 295501 - DNA, 2496 bp, Homo sapiens
gttcaggcacgcgctttcggtgctcggagcggaagcagcggcgagaggctcggaggcgcgggggcggccgagcggcgggcgacgggggcgggcgacgggggcgggcgacgcgggccgcggcacgggcggagccggggccatggagccgccgctgccgggctaggcaggtcgtgccccgccgggccggcggcgatgtcgggctaccagcgccgcccgggcgccaccccgctgtcccgagcccggagcctcgccattcccgacgctccagcgttctatgagcgccggtcttgtctcccccagctaaattgtgagcgcccccatggcagggacctggactcccccttcttcggcattcggccggcctttatgtgctatgtgcccagcccggtgctggcttccgtgggagacacagatgacagatttgaagatctggaagaggcaaatccattctcttttagagagtttctgaagaccaagaacctcggcctctcgaaagaggatccggccagcagaatttatgcaaaggaagcctcgaggcattccctgggacttgaccacaactccccaccctcccaaaccggcgggtatggcctggagtatcagcagccatttttcgaggatccgacaggggctggtgacctcctggatgaggaggaggatgaggacaccggatggagtggggcctacctgccgtccgccatcgagcagactcaccccgagagggtccctgccggcacgtcgccctgcagcacatacctttcctttttctccaccccgtcggagctggcagggcctgagtctctgccctcgtgggcgttgagtgacactgattctcgcgtgtctccggcctctccggcagggagtcctagcgcagactttgcggttcatggagagtctctgggagacaggcacctgcggacgctgcagataagttacgacgcagtaagtgagcctcacggcgccctctggcacagcgcctgtccgagcggcttctcccggggagaacctggagccatcctacctcttgggtggcctggtttgatttccaggacaaggcgatttgcgtgacagcctgctatccactttccctttgactttgcttctggttacacgtgggaatagaaccggctaaagaggactgctgaaagatgaaaattctaagctgagaagaaagctgaatgaggttcagagcttctctgaagctcaaacagaaatggtgaggacgcttgagcggaagttagaagcaaaaatgatcaaggaggaaagcgactaccacgacctggagtcggtggttcagcaggtggagcagaacctggagctgatgaccaaacgggctgtaaaggcagaaaaccacgtcgtgaaactaaaacaggaaatcagtttgctccaggcgcaggtctccaacttccagcgagagaatgaagccctgcggtgcggccagggtgccagcctgaccgtggtgaagcagaacgccgacgtggccctgcagaacctccgggtggtcatgaacagtgcacaggcttccatcaagcaactggtttccggagctgagacactgaatcttgttgccgaaatccttaaatctatagacagaatttctgaagttaaagacgaggaggaagactcttgaggacccctgggtgttctcagcatgaagctccgtgtataccctgaggtcaccaccgctcgatctaaatgtgcagttgtgtccttaaatatgcagtcttcacccagagtaaagtgttgatcgcaagagtccagtgtcgtgccctcagccagttcttggccaccacaatgggagcagccctggccgagttgtctctgtggtttctatgcagcccttcttggcgaaattcctgcgatcttatagattctaatgagctcttggaagacattgtcataaaagccagtgattttaagaaaaagagtggttctggaatcaatgttttccagtcccatcccagaacatcagttgtaagataagtacaattggttgtccttgatttcataagtagaacaaacactaaatgtgcctctgagatggccaccccgggcagggacctgtgccttccgccgatgctcagggctccctctggctcccgggtcactcttgtggccccagtgggtggtccctgcagtcatggcctgagtgcgcaggggccaccgcgtggctgctgctgtcctcctccgggacccacggggaccaaggtcacacgttccgtgctgtgaagctgtccagatgtgcctctttggctgggggttctggtggacgtttcaagtggcattttgtacaatgcaggttagaattcaggaatttcaagtatgtgcccgggtctgtcaggtcccagttgcctttctgacggcccccctcagagggacggcgatgagcactaaatgcttttttgactattttcctatagattttttttaaaacttttttttcctcctgttccaattgatagctttcttatttaataaattctgtagttcaccgca

SEQ ID NO: 295502 - DNA, 2997 bp, Homo sapiens
gttcaggcacgcgctttcggtgctcggagcggaagcagcggcgagaggctcggaggcgcgggggcggccgagcggcgggcgacgggggcgggcgacgggggcgggcgacgcgggccgcggcacgggcggagccggggccatggagccgccgctgccgggctaggcaggtcgtgccccgccgggccggcggcgatgtcgggctaccagcgccgcccgggcgccaccccgctgtcccgagcccggagcctcgccattcccgacgctccagcgttctatgagcgccggtcttgtctcccccagctaaattgtgagcgcccccatggcagggacctggactcccccttcttcggcattcggccggcctttatgtgctatgtgcccagcccggtgctggcttccgtgggagacacagatgacagatttgaagatctggaagaggcaaatccattctcttttagagagtttctgaagaccaagaacctcggcctctcgaaagaggatccggccagcagaatttatgcaaaggaagcctcgaggcattccctgggacttgaccacaactccccaccctcccaaaccggcgggtatggcctggagtatcagcagccatttttcgaggatccgacaggggctggtgacctcctggatgaggaggaggatgaggacaccggatggagtggggcctacctgccgtccgccatcgagcagactcaccccgagagggtccctgccggcacgtcgccctgcagcacatacctttcctttttctccaccccgtcggagctggcagggcctgagtctctgccctcgtgggcgttgagtgacactgattctcgcgtgtctccggcctctccggcagggagtcctagcgcagactttgcggttcatggagagtctctgggagacaggcacctgcggacgctgcagataagttacgacgcactgaaagatgaaaattctaagctgagaagaaagctgaatgaggttcagagcttctctgaagctcaaacagaaatgtatgtaagcttttagttaggaatgcaatccacaacatctaatacacagggaaatccgtttttaaatgataatgaagtaatcagagtcaaaccagatctgggttttattgtatataaatgttcagcatcaaacacatttctgtgttctgcctaaaagtttattttgagacagtcttgccgtgtcacccaggctcgggtgcagtggcgcaatcacggctcactgcagccttgacctccttggctccagcaatcctcccatctcagcctcctgagtagctgggacacaggcgtttgcactgcacctggctaatttttaaatcttatttttgtagagacagggtctcactatgttgcccaggcttgtctcaaactcctcggctcaaggaatcctcctgcctcaggctcctaaagtgttgggattataggcatgagccacggcgcctggccaaggtttattttaaactttaggcaaaaagccaccaaacaccttgttggagcagcagtgctgtgagagccgctccctgcacgcctgcctggtggctacaggtccaggcctgaggctgccgctgcctcccctctgtgcctgagacccattccatcacaggctcttagcgggttttatctggctcatgaggtatctttttgtagtcctcttaaaagtagccacagaaattaacaactcgggtttttctttaacaagggtgaggacgcttgagcggaagttagaagcaaaaatgatcaaggaggaaagcgactaccacgacctggagtcggtggttcagcaggtggagcagaacctggagctgatgaccaaacgggctgtaaaggcagaaaaccacgtcgtgaaactaaaacaggaaatcagtttgctccaggcgcaggtctccaacttccagcgagagaatgaagccctgcggtgcggccagggtgccagcctgaccgtggtgaagcagaacgccgacgtggccctgcagaacctccgggtggtcatgaacagtgcacaggcttccatcaagcaactggtttccggagctgagacactgaatcttgttgccgaaatccttaaatctatagacagaatttctgaagttaaagacgaggaggaagactcttgaggacccctgggtgttctcagcatgaagctccgtgtataccctgaggtcaccaccgctcgatctaaatgtgcagttgtgtccttaaatatgcagtcttcacccagagtaaagtgttgatcgcaagagtccagtgtcgtgccctcagccagttcttggccaccacaatgggagcagccctggccgagttgtctctgtggtttctatgcagcccttcttggcgaaattcctgcgatcttatagattctaatgagctcttggaagacattgtcataaaagccagtgattttaagaaaaagagtggttctggaatcaatgttttccagtcccatcccagaacatcagttgtaagataagtacaattggttgtccttgatttcataagtagaacaaacactaaatgtgcctctgagatggccaccccgggcagggacctgtgccttccgccgatgctcagggctccctctggctcccgggtcactcttgtggccccagtgggtggtccctgcagtcatggcctgagtgcgcaggggccaccgcgtggctgctgctgtcctcctccgggacccacggggaccaaggtcacacgttccgtgctgtgaagctgtccagatgtgcctctttggctgggggttctggtggacgtttcaagtggcattttgtacaatgcaggttagaattcaggaatttcaagtatgtgcccgggtctgtcaggtcccagttgcctttctgacggcccccctcagagggacggcgatgagcactaaatgcttttttgactattttcctatagattttttttaaaacttttttttcctcctgttccaattgatagctttcttatttaataaattctgtagttcaccgca

SEQ ID NO: 295503 - DNA, 3169 bp, Homo sapiens
gttcaggcacgcgctttcggtgctcggagcggaagcagcggcgagaggctcggaggcgcgggggcggccgagcggcgggcgacgggggcgggcgacgggggcgggcgacgcgggccgcggcacgggcggagccggggccatggagccgccgctgccgggctaggcaggtcgtgccccgccgggccggcggcgatgtcgggctaccagcgccgcccgggcgccaccccgctgtcccgagcccggagcctcgccattcccgacgctccagcgttctatgagcgccggtcttgtctcccccagctaaattgtgagcgcccccatggcagggacctggactcccccttcttcggcattcggccggcctttatgtgctatgtgcccagcccggtgctggcttccgtgggagacacagatgacagatttgaagatctggaagaggcaaatccattctcttttagagagtttctgaagaccaagaacctcggcctctcgaaagaggatccggccagcagaatttatgcaaaggaagcctcgaggcattccctgggacttgaccacaactccccaccctcccaaaccggcgggtatggcctggagtatcagcagccatttttcgaggatccgacaggggctggtgacctcctggatgaggaggaggatgaggacaccggatggagtggggcctacctgccgtccgccatcgagcagactcaccccgagagggtccctgccggcacgtcgccctgcagcacatacctttcctttttctccaccccgtcggagctggcagggcctgagtctctgccctcgtgggcgttgagtgacactgattctcgcgtgtctccggcctctccggcagggagtcctagcgcagactttgcggttcatggagagtctctgggagacaggcacctgcggacgctgcagataagttacgacgcactgaaagatgaaaattctaagctgagaagaaagctgaatgaggttcagagcttctctgaagctcaaacagaaatggtgaggacgcttgagcggaagttagaagcaaaaatgatcaaggaggaaagcgactaccacgacctggagtcggtggttcagcaggtggagcagaacctggagctgatgaccaaacgggctgtaaaggcagaaaaccacgtcgtgaaactaaaacaggaaatcagtttgctccaggcgcaggtctccaacttccagcgagagaatgaagccctgcggtgcggccagggtgccagcctgaccgtggtgaagcagaacgccgacgtggccctgcagaacctccgggtggtcatgaacagtgcacaggcttccatcaagcaactggtttccggagctgagacactgaatcttgttgccgaaatccttaaatctatagacagaatttctgaagttaaagacgaggaggaagactcttgaggacccctgggtgttctcagcatgaagctccgtgtataccctgaggtcaccaccgctcgatctaaatgtgcagttgtgtccttaaatatgcagtcttcacccagagtaaagtgttgatcgcaagagtccagtgtcgtgccctcagccagttcttggccaccacaatgggagcagccctggccgagttgtctctgtggtttctatgcagcccttcttggcgaaattcctgcgatcttatagattctaatgagctcttggaagacattgtcataaaagccagtgattttaagaaaaagagtggttctggaatcaatgttttccagtcccatcccagaacatcagttgtaagataagtacaattggttgtccttgatttcataagtagaacaaacactaaatgtgcctctgagatggccaccccgggcagggacctgtgccttccgccgatgctcagggctccctctggctcccgggtcactcttgtggccccagtgggtggtccctgcagtcatggcctgagtgcgcaggggccaccgcgtggctgctgctgtcctcctccgggacccacggggaccaaggtcacacgttccgtgctgtgaagctgtccagatgtgcctctttggctgggggttctggtggacgtttcaagtggcattttgtacaatgcaggttagaattcaggaatttcaagtatgtgcccgggtctgtcaggtcccagttgcctttctgacggcccccctcagagggacggcgatgagcactaaatgcttttttgactattttcctatagattttttttaaaacttttttttcctcctgttccaattgatagctttcttatttaataaattctgtagttcaccgcaaaaaaaaaaaaaaaaaaaaaaaaaaaaaaaccccggagggcctccatatcgcgcggggggcgggaaaaagggcgtattgcgaagggcgccatgggcgccaaaacgtgtgttcccgtggaccccagctctttcgtgtgccccaagggggcggaaaaccggcgcggcgtcaccccataaaggggacgcggaatataattgcggaataaagcgcggtgtttaaccctcgtctttatactctctctggtcagaaacaaaacgggcaacgagagaggagaggagaagagagaggagacggaaagaagcggggggagaaccgacgaactatggtgggccacaagaaacgattgatggtagccgagaaggagaacggatcataaaaacaaagggtagtggggaagagataagatagaatgacaaagcgtaatatataatgaagagagaggcagaaaagaagtgtaaatgaaggcgcgagcaagaggttttaagtagagataaaatacgaataagaacatgaaacaaatggaataagataaagaagagggagaaggaaagaacgaagataataaattagatagaaaagaagaggagaaccccaagagagaggaaacagcggagaggacgcaaaaaaagagcgatgaaaaaaagaaacaatgcgagaagaagacgaaagcggacgcgataaaaaagactagagggacgcgacgaagacaccacacccaacaaaagagcaggacgacaaaaaaaaagaagacgagaagggagagacgaaacaagacaacagggagagaacaacaacaacacaagacgagaaaacaaccccggcgacgagagagagcagagaaacgggagaaaaggacccgcaaaggaggcgg

SEQ ID NO: 295504 - DNA, 2270 bp, Homo sapiens
gttcaggcacgcgctttcggtgctcggagcggaagcagcggcgagaggctcggaggcgcgggggcggccgagcggcgggcgacgggggcgggcgacgggggcgggcgacgcgggccgcggcacgggcggagccggggccatggagccgccgctgccgggctaggcaggtcgtgccccgccgggccggcggcgatgtcgggctaccagcgccgcccgggcgccaccccgctgtcccgagcccggagcctcgccattcccgacgctccagcgttctatgagcgccggtcttgtctcccccagctaaattgtgagcgcccccatggcagggacctggactcccccttcttcggcattcggccggcctttatgtgctatgtgcccagcccggtgctggcttccgtgggagacacagatgacagatttgaagatctggaagaggcaaatccattctcttttagagagtttctgaagaccaagaacctcggcctctcgaaagaggatccggccagcagaatttatgcaaaggaagcctcgaggcattccctgggacttgaccacaactccccaccctcccaaaccggcgggtatggcctggagtatcagcagccatttttcgaggatccgacaggggctggtgacctcctggatgaggaggaggatgaggacaccggatggagtggggcctacctgccgtccgccatcgagcagactcaccccgagagggtccctgccggcacgtcgccctgcagcacatacctttcctttttctccaccccgtcggagctggcagggcctgagtctctgccctcgtgggcgttgagtgacactgattctcgcgtgtctccggcctctccggcagggagtcctagcgcagactttgcggttcatggagagtctctgggagacaggcacctgcggacgctgcagataagttacgacgcactgaaagatgaaaattctaagctgagaagaaagctgaatgaggttcagagcttctctgaagctcaaacagaaatggtgaggacgcttgagcggaagttagaagcaaaaatgatcaaggaggaaagcgactaccacgacctggagtcggtggttcagcagaaacgggctgtaaaggcagaaaaccacgtcgtgaaactaaaacaggaaatcagtttgctccaggcgcaggtctccaacttccagcgagagaatgaagccctgcggtgcggccagggtgccagcctgaccgtggtgaagcagaacgccgacgtggccctgcagaacctccgggtggtcatgaacagtgcacaggcttccatcaagcaactggtttccggagctgagacactgaatcttgttgccgaaatccttaaatctatagacagaatttctgaagttaaagacgaggaggaagactcttgaggacccctgggtgttctcagcatgaagctccgtgtataccctgaggtcaccaccgctcgatctaaatgtgcagttgtgtccttaaatatgcagtcttcacccagagtaaagtgttgatcgcaagagtccagtgtcgtgccctcagccagttcttggccaccacaatgggagcagccctggccgagttgtctctgtggtttctatgcagcccttcttggcgaaattcctgcgatcttatagattctaatgagctcttggaagacattgtcataaaagccagtgattttaagaaaaagagtggttctggaatcaatgttttccagtcccatcccagaacatcagttgtaagataagtacaattggttgtccttgatttcataagtagaacaaacactaaatgtgcctctgagatggccaccccgggcagggacctgtgccttccgccgatgctcagggctccctctggctcccgggtcactcttgtggccccagtgggtggtccctgcagtcatggcctgagtgcgcaggggccaccgcgtggctgctgctgtcctcctccgggacccacggggaccaaggtcacacgttccgtgctgtgaagctgtccagatgtgcctctttggctgggggttctggtggacgtttcaagtggcattttgtacaatgcaggttagaattcaggaatttcaagtatgtgcccgggtctgtcaggtcccagttgcctttctgacggcccccctcagagggacggcgatgagcactaaatgcttttttgactattttcctatagattttttttaaaacttttttttcctcctgttccaattgatagctttcttatttaataaattctgtagttcaccgca

SEQ ID NO: 295505 - DNA, 2339 bp, Homo sapiens
gttcaggcacgcgctttcggtgctcggagcggaagcagcggcgagaggctcggaggcgcgggggcggccgagcggcgggcgacgggggcgggcgacgggggcgggcgacgcgggccgcggcacgggcggagccggggccatggagccgccgctgccgggctaggcaggtcgtgccccgccgggccggcggcgatgtcgggctaccagcgccgcccgggcgccaccccgctgtcccgagcccggagcctcgccattcccgacgctccagcgttctatgagcgccggtcttgtctcccccagctaaattgtgagcgcccccatggcagggacctggactcccccttcttcggcattcggccggcctttatgtgctatgtgcccagcccggtgctggcttccgtgggagacacagatgacagatttgaagatctggaagaggcaaatccattctcttttagagagtttctgaagaccaagaacctcggcctctcgaaagaggatccggccagcagaatttatgcaaaggaagcctcgaggcattccctgggacttgaccacaactccccaccctcccaaaccggcgggtatggcctggagtatcagcagccatttttcgaggatccgacaggggctggtgacctcctggatgaggaggaggatgaggacaccggatggagtggggcctacctgccgtccgccatcgagcagactcaccccgagagggtccctgccggcacgtcgccctgcagcacatacctttcctttttctccaccccgtcggagctggcagggcctgagtctctgccctcgtgggcgttgagtgacactgattctcgcgtgtctccggcctctccggcagggagtcctagcgcagactttgcggttcatggagagtctctgggagacaggcacctgcggacgctgcagataagttacgacgcactgaaagatgaaaattctaagctgagaagaaagctgaatgaggttcagagcttctctgaagctcaaacagaaatggtgaggacgcttgagcggaagttagaagcaaaaatgatcaaggaggaaagcgactaccacgacctggagtcggtggttcagcaggtggagcagaacctggagctgatgaccaaacgggctgtaaaggcagaaaaccacgtcgtgaaactaaaacaggaaatcagtttgctccaggcgcaggtctccaacttccagcgagagaatgaagccctgcggtgcggccagggtgccagcctgaccgtggtgaagcagaacgccgacgtggccctgcagaacctccgggtggtcatgaacagtgcacaggcttccatcaagtgagtgcctgggaggcaccgggaagcctggcggggaaaggggcaactggtttccggagctgagacactgaatcttgttgccgaaatccttaaatctatagacagaatttctgaagttaaagacgaggaggaagactcttgaggacccctgggtgttctcagcatgaagctccgtgtataccctgaggtcaccaccgctcgatctaaatgtgcagttgtgtccttaaatatgcagtcttcacccagagtaaagtgttgatcgcaagagtccagtgtcgtgccctcagccagttcttggccaccacaatgggagcagccctggccgagttgtctctgtggtttctatgcagcccttcttggcgaaattcctgcgatcttatagattctaatgagctcttggaagacattgtcataaaagccagtgattttaagaaaaagagtggttctggaatcaatgttttccagtcccatcccagaacatcagttgtaagataagtacaattggttgtccttgatttcataagtagaacaaacactaaatgtgcctctgagatggccaccccgggcagggacctgtgccttccgccgatgctcagggctccctctggctcccgggtcactcttgtggccccagtgggtggtccctgcagtcatggcctgagtgcgcaggggccaccgcgtggctgctgctgtcctcctccgggacccacggggaccaaggtcacacgttccgtgctgtgaagctgtccagatgtgcctctttggctgggggttctggtggacgtttcaagtggcattttgtacaatgcaggttagaattcaggaatttcaagtatgtgcccgggtctgtcaggtcccagttgcctttctgacggcccccctcagagggacggcgatgagcactaaatgcttttttgactattttcctatagattttttttaaaacttttttttcctcctgttccaattgatagctttcttatttaataaattctgtagttcaccgca

SEQ ID NO: 295506 - DNA, 2399 bp, Homo sapiens
gttcaggcacgcgctttcggtgctcggagcggaagcagcggcgagaggctcggaggcgcgggggcggccgagcggcgggcgacgggggcgggcgacgggggcgggcgacgcgggccgcggcacgggcggagccggggccatggagccgccgctgccgggctaggcaggtcgtgccccgccgggccggcggcgatgtcgggctaccagcgccgcccgggcgccaccccgctgtcccgagcccggagcctcgccattcccgacggtgagcggggcaggggccgagtccagcggtccaggtgggcggcggccgccccggcacgcagtaaagtcgctgttgtcgttgcttccagctccagcgttctatgagcgccggtcttgtctcccccagctaaattgtgagcgcccccatggcagggacctggactcccccttcttcggcattcggccggcctttatgtgctatgtgcccagcccggtgctggcttccgtgggagacacaggtgagagacgagggcgccggccccggggacgcttccagttcccgcgccacgtgtggcacctccgctgcagcacgagctcgtccattgacccatcaatgtgcagagcgctcactgcgtgccaggcactcggaattcaaaggcggagtcccctgctaggagctcacagtctggttgcggggagacctcccccaagacagacagttccagtacaggatgatgacagatttgaagatctggaagaggcaaatccattctcttttagagagtttctgaagaccaagaacctcggcctcccaaagtgctgggattacaggcgcgagccactgcccccggcctctgagtaaaattaactggcatctgtgaccacaggtctttgaaaagtgcctgcctccgtctgtggtctccctctgtagtggctgcaggtggatgctgcactgacccagcatctctgcttatcaggaggctctggagccacaccgcagaagcacacgcccttttgagccagacatgctgactttctaataaggatgttctctctccacagctgaaagatgaaaattctaagctgagaagaaagctgaatgaggttcagagcttctctgaagctcaaacagaaatggtgaggacgcttgagcggaagttagaagcaaaaatgatcaaggaggaaagcgactaccacgacctggagtcggtggttcagcaggtggagcagaacctggagctgatgaccaaacgggctgtaaaggcagaaaaccacgtcgtgaaactaaaacaggaaatcagtttgctccaggcgcaggtctccaacttccagcgagagaatgaagccctgcggtgcggccagggtgccagcctgaccgtggtgaagcagaacgccgacgtggccctgcagaacctccgggtggtcatgaacagtgcacaggcttccatcaagcaactggtttccggagctgagacactgaatcttgttgccgaaatccttaaatctatagacagaatttctgaagttaaagacgaggaggaagactcttgaggacccctgggtgttctcagcatgaagctccgtgtataccctgaggtcaccaccgctcgatctaaatgtgcagttgtgtccttaaatatgcagtcttcacccagagtaaagtgttgatcgcaagagtccagtgtcgtgccctcagccagttcttggccaccacaatgggagcagccctggccgagttgtctctgtggtttctatgcagcccttcttggcgaaattcctgcgatcttatagattctaatgagctcttggaagacattgtcataaaagccagtgattttaagaaaaagagtggttctggaatcaatgttttccagtcccatcccagaacatcagttgtaagataagtacaattggttgtccttgatttcataagtagaacaaacactaaatgtgcctctgagatggccaccccgggcagggacctgtgccttccgccgatgctcagggctccctctggctcccgggtcactcttgtggccccagtgggtggtccctgcagtcatggcctgagtgcgcaggggccaccgcgtggctgctgctgtcctcctccgggacccacggggaccaaggtcacacgttccgtgctgtgaagctgtccagatgtgcctctttggctgggggttctggtggacgtttcaagtggcattttgtacaatgcaggttagaattcaggaatttcaagtatgtgcccgggtctgtcaggtcccagttgcctttctgacggcccccctcagagggacggcgatgagcactaaatgcttttttgactattttcctatagattttttttaaaacttttttttcctcctgttccaattgatagctttcttatttaataaattctgtagttcaccgca

SEQ ID NO: 295507 - DNA, 2645 bp, Homo sapiens
gttcaggcacgcgctttcggtgctcggagcggaagcagcggcgagaggctcggaggcgcgggggcggccgagcggcgggcgacgggggcgggcgacgggggcgggcgacgcgggccgcggcacgggcggagccggggccatggagccgccgctgccgggctaggcaggtcgtgccccgccgggccggcggcgatgtcgggctaccagcgccgcccgggcgccaccccgctgtcccgagcccggagcctcgccattcccgacgatgacagatttgaagatctggaagaggcaaatccattctcttttagagagtttctgaagaccaagaacctcggcctcccaaagtgctgggattacaggcgcgagccactgcccccggcctctgagtaaaattaactggcatctgtgaccacaggtctttgaaaagtgcctgcctccgtctgtggtctccctctgtagtggctgcaggtggatgctgcactgacccagcatctctgcttatcaggaggctctggagccacaccgcagaagcacacgcccttttgagccagacatgctgactttctaataaggatgttctctctccacagctgaaagatgaaaattctaagctgagaagaaagctgaatgaggttcagagcttctctgaagctcaaacagaaatgtatgtaagcttttagttaggaatgcaatccacaacatctaatacacagggaaatccgtttttaaatgataatgaagtaatcagagtcaaaccagatctgggttttattgtatataaatgttcagcatcaaacacatttctgtgttctgcctaaaagtttattttgagacagtcttgccgtgtcacccaggctcgggtgcagtggcgcaatcacggctcactgcagccttgacctccttggctccagcaatcctcccatctcagcctcctgagtagctgggacacaggcgtttgcactgcacctggctaatttttaaatcttatttttgtagagacagggtctcactatgttgcccaggcttgtctcaaactcctcggctcaaggaatcctcctgcctcaggctcctaaagtgttgggattataggcatgagccacggcgcctggccaaggtttattttaaactttaggcaaaaagccaccaaacaccttgttggagcagcagtgctgtgagagccgctccctgcacgcctgcctggtggctacaggtccaggcctgaggctgccgctgcctcccctctgtgcctgagacccattccatcacaggctcttagcgggttttatctggctcatgaggtatctttttgtagtcctcttaaaagtagccacagaaattaacaactcgggtttttctttaacaagggtgaggacgcttgagcggaagttagaagcaaaaatgatcaaggaggaaagcgactaccacgacctggagtcggtggttcagcaggtggagcagaacctggagctgatgaccaaacgggctgtaaaggcagaaaaccacgtcgtgaaactaaaacaggaaatcagtttgctccaggcgcaggtctccaacttccagcgagagaatgaagccctgcggtgcggccagggtgccagcctgaccgtggtgaagcagaacgccgacgtggccctgcagaacctccgggtggtcatgaacagtgcacaggcttccatcaagcaactggtttccggagctgagacactgaatcttgttgccgaaatccttaaatctatagacagaatttctgaagttaaagacgaggaggaagactcttgaggacccctgggtgttctcagcatgaagctccgtgtataccctgaggtcaccaccgctcgatctaaatgtgcagttgtgtccttaaatatgcagtcttcacccagagtaaagtgttgatcgcaagagtccagtgtcgtgccctcagccagttcttggccaccacaatgggagcagccctggccgagttgtctctgtggtttctatgcagcccttcttggcgaaattcctgcgatcttatagattctaatgagctcttggaagacattgtcataaaagccagtgattttaagaaaaagagtggttctggaatcaatgttttccagtcccatcccagaacatcagttgtaagataagtacaattggttgtccttgatttcataagtagaacaaacactaaatgtgcctctgagatggccaccccgggcagggacctgtgccttccgccgatgctcagggctccctctggctcccgggtcactcttgtggccccagtgggtggtccctgcagtcatggcctgagtgcgcaggggccaccgcgtggctgctgctgtcctcctccgggacccacggggaccaaggtcacacgttccgtgctgtgaagctgtccagatgtgcctctttggctgggggttctggtggacgtttcaagtggcattttgtacaatgcaggttagaattcaggaatttcaagtatgtgcccgggtctgtcaggtcccagttgcctttctgacggcccccctcagagggacggcgatgagcactaaatgcttttttgactattttcctatagattttttttaaaacttttttttcctcctgttccaattgatagctttcttatttaataaattctgtagttcaccgca

SEQ ID NO: 295508 - DNA, 1259 bp, Homo sapiens
ccctcctgctccctgggttggggcccgtgtccggtatgaatgtgaggacatcagtgatgctttttgtggtttttcttttttgggtaacagaaacgggctgtaaaggcagaaaaccacgtcgtgaaactaaaacaggaaatcagtttgctccaggcgcaggtctccaacttccagcgagagaatgaagccctgcggtgcggccagggtgccagcctgaccgtggtgaagcagaacgccgacgtggccctgcagaacctccgggtggtcatgaacagtgcacaggcttccatcaagcaactggtttccggagctgagacactgaatcttgttgccgaaatccttaaatctatagacagaatttctgaagttaaagacgaggaggaagactcttgaggacccctgggtgttctcagcatgaagctccgtgtataccctgaggtcaccaccgctcgatctaaatgtgcagttgtgtccttaaatatgcagtcttcacccagagtaaagtgttgatcgcaagagtccagtgtcgtgccctcagccagttcttggccaccacaatgggagcagccctggccgagttgtctctgtggtttctatgcagcccttcttggcgaaattcctgcgatcttatagattctaatgagctcttggaagacattgtcataaaagccagtgattttaagaaaaagagtggttctggaatcaatgttttccagtcccatcccagaacatcagttgtaagataagtacaattggttgtccttgatttcataagtagaacaaacactaaatgtgcctctgagatggccaccccgggcagggacctgtgccttccgccgatgctcagggctccctctggctcccgggtcactcttgtggccccagtgggtggtccctgcagtcatggcctgagtgcgcaggggccaccgcgtggctgctgctgtcctcctccgggacccacggggaccaaggtcacacgttccgtgctgtgaagctgtccagatgtgcctctttggctgggggttctggtggacgtttcaagtggcattttgtacaatgcaggttagaattcaggaatttcaagtatgtgcccgggtctgtcaggtcccagttgcctttctgacggcccccctcagagggacggcgatgagcactaaatgcttttttgactattttcctatagattttttttaaaacttttttttcctcctgttccaattgatagctttcttatttaataaattctgtagttcaccgca

SEQ ID NO: 295509 - DNA, 2382 bp, Homo sapiens
gttcaggcacgcgctttcggtgctcggagcggaagcagcggcgagaggctcggaggcgcgggggcggccgagcggcgggcgacgggggcgggcgacgggggcgggcgacgcgggccgcggcacgggcggagccggggccatggagccgccgctgccgggctaggcaggtcgtgccccgccgggccggcggcgatgtcgggctaccagcgccgcccgggcgccaccccgctgtcccgagcccggagcctcgccattcccgacgctccagcgttctatgagcgccggtcttgtctcccccagctaaattgtgagcgcccccatggcagggacctggactcccccttcttcggcattcggccggcctttatgtgctatgtgcccagcccggtgctggcttccgtgggagacacagatgacagatttgaagatctggaagaggcaaatccattctcttttagagagtttctgaagaccaagaacctcggcctctcgaaagaggatccggccagcagaatttatgcaaaggaagcctcgaggcattccctgggacttgaccacaactccccaccctcccaaaccggcgggtatggcctggagtatcagcagccatttttcgaggatccgacaggggctggtgacctcctggatgaggaggaggatgaggacaccggatggagtggggcctacctgccgtccgccatcgagcagactcaccccgagagggtccctgccggcacgtcgccctgcagcacatacctttcctttttctccaccccgtcggagctggcagggcctgagtctctgccctcgtgggcgttgagtgacactgattctcgcgtgtctccggcctctccggcagggagtcctagcgcagactttgcggttcatggagagtctctgggagacaggcacctgcggacgctgcagataagttacgacgcactgaaagatgaaaattctaagctgagaagaaagctgaatgaggttcagagcttctctgaagctcaaacagaaatgtatgtaagcttttagttaggaatgcaatccacaacatctaatacacagggaaatccgtttttaaatgataatgaagtaatcagagtcaaaccagatctgggttttattgtatataaatgttcagcatcaaacacatttctgtgttctgcctaaaagtttattttgagacagtcttgccgtgtcacccaggctcgggtgcagtggcgcaatcacggctcactgcagccttgacctccttggctccagcaatcctcccatctcagcctcctgagtagctgggacacaggcgtttgcactgcacctggctaatttttaaatcttatttttgtagagacagggtctcactatgttgcccaggcttgtctcaaactcctcggctcaaggaatcctcctgcctcaggctcctaaagtgttgggattataggcatgagccacggcgcctggccaaggtttattttaaactttaggcaaaaagccaccaaacaccttgttggagcagcagtgctgtgagagccgctccctgcacgcctgcctggtggctacaggtccaggcctgaggctgccgctgcctcccctctgtgcctgagacccattccatcacagagtaaagtgttgatcgcaagagtccagtgtcgtgccctcagccagttcttggccaccacaatgggagcagccctggccgagttgtctctgtggtttctatgcagcccttcttggcgaaattcctgcgatcttatagattctaatgagctcttggaagacattgtcataaaagccagtgattttaagaaaaagagtggttctggaatcaatgttttccagtcccatcccagaacatcagttgtaagataagtacaattggttgtccttgatttcataagtagaacaaacactaaatgtgcctctgagatggccaccccgggcagggacctgtgccttccgccgatgctcagggctccctctggctcccgggtcactcttgtggccccagtgggtggtccctgcagtcatggcctgagtgcgcaggggccaccgcgtggctgctgctgtcctcctccgggacccacggggaccaaggtcacacgttccgtgctgtgaagctgtccagatgtgcctctttggctgggggttctggtggacgtttcaagtggcattttgtacaatgcaggttagaattcaggaatttcaagtatgtgcccgggtctgtcaggtcccagttgcctttctgacggcccccctcagagggacggcgatgagcactaaatgcttttttgactattttcctatagattttttttaaaacttttttttcctcctgttccaattgatagctttcttatttaataaattctgtagttcaccgca

SEQ ID NO: 295510 - DNA, 2172 bp, Homo sapiens
  misc_feature (1989)..(1989): n is a, c, g, or t
  misc_feature (1994)..(1994): n is a, c, g, or t
  misc_feature (1997)..(1998): n is a, c, g, or t
  misc_feature (2002)..(2002): n is a, c, g, or t
  misc_feature (2013)..(2013): n is a, c, g, or t
  misc_feature (2171)..(2171): n is a, c, g, or t
gttcaggcacgcgctttcggtgctcggagcggaagcagcggcgagaggctcggaggcgcgggggcggccgagcggcgggcgacgggggcgggcgacgggggcgggcgacgcgggccgcggcacgggcggagccggggccatggagccgccgctgccgggctaggcaggtcgtgccccgccgggccggcggcgatgtcgggctaccagcgccgcccgggcgccaccccgctgtcccgagcccggagcctcgccattcccgacgctccagcgttctatgagcgccggtcttgtctcccccagctaaattgtgagcgcccccatggcagggacctggactcccccttcttcggcattcggccggcctttatgtgctatgtgcccagcccggtgctggcttccgtgggagacacagatgacagatttgaagatctggaagaggcaaatccattctcttttagagagtttctgaagaccaagaacctcggcctctcgaaagaggatccggccagcagaatttatgcaaaggaagcctcgaggcattccctgggacttgaccacaactccccaccctcccaaaccggcgggtatggcctggagtatcagcagccatttttcgaggatccgacaggggctggtgacctcctggatgaggaggaggatgaggacaccggatggagtggggcctacctgccgtccgccatcgagcagactcaccccgagagggtccctgccggcacgtcgccctgcagcacatacctttcctttttctccaccccgtcggagctggcagggcctgagtctctgccctcgtgggcgttgagtgacactgattctcgcgtgtctccggcctctccggcagggagtcctagcgcagactttgcggttcatggagagtctctgggagacaggcacctgcggacgctgcagataagttacgacgcactgaaagatgaaaattctaagctgagaagaaagctgaatgaggttcagagcttctctgaagctcaaacagaaatggtgaggacgcttgagcggaagttagaagcaaaaatgatcaaggaggaaagcgactaccacgacctggagtcggtggttcagcaggtggagcagaacctggagctgatgaccaaacgggctgtaaaggcagaaaaccacgtcgtgaaactaaaacaggaaatcagtttgctccaggcgcaggtctccaacttccagcgagagaatgaagccctgcggtgcggccagggtgccagcctgaccgtggtgaagcagaacgccgacgtggccctgcagaacctccgggtggtcatgaacagtgcacaggcttccatcaagcaactggtttccggagctgagacactgaatcttgttgccgaaatccttaaatctatagacagaatttctgaagttaaagacgaggaggaagactcttgaggacccctgggtgttctcagcatgaagctccgtgtataccctgaggtcaccaccgctcgatctaaatgtgcagttgtgtccttaaatatgcagtcttcacccagagtaaagtgttgatcgcaagagtccagtgtcgtgccctcagccagttcttggccaccacaatgggagcagccctggccgagttgtctctgtggtttctatgcagcccttcttggcgaaattcctgcgatcttatagattctaatgagctcttggaagacattgtcataaaagccagtgattttaagaaaaagagtggttctggaatcaatgttttccagtcccatcccagaacatcagttgtaagataagtacaattggttgtccttgatttcataagtagaacaaacactaaatgtgcctctgagatggccaccccgggcagggacctgtgccttccgccgatgctcagggctccctctggctcccgggtcactcttgtggccccagtgggtggtccctgcagtcatggcctgagtgcgcagggcacggtggtgtgtggctctcggaccgggnacagnccnncggnggaaggcaaangcctgggggggctggggcgtcagggcttggaggcggaatcgatcagttgccggttgagcacggtttgggcgcccagggggaacaagttggatctcagcaaaaccgcagaggtttaagcacaaagggccgggctctgtttttcttgcgttgtgtgttcng

SEQ ID NO: 295511 - DNA, 1850 bp, Homo sapiens
  misc_feature (1537)..(1537): n is a, c, g, or t
gttcaggcacgcgctttcggtgctcggagcggaagcagcggcgagaggctcggaggcgcgggggcggccgagcggcgggcgacgggggcgggcgacgggggcgggcgacgcgggccgcggcacgggcggagccggggccatggagccgccgctgccgggctaggcaggtcgtgccccgccgggccggcggcgatgtcgggctaccagcgccgcccgggcgccaccccgctgtcccgagcccggagcctcgccattcccgacgctccagcgttctatgagcgccggtcttgtctcccccagctaaattgtgagcgcccccatggcagggacctggactcccccttcttcggcattcggccggcctttatgtgctatgtgcccagcccggtgctggcttccgtgggagacacagatgacagatttgaagatctggaagaggcaaatccattctcttttagagagtttctgaagaccaagaacctcggcctctcgaaagaggatccggccagcagaatttatgcaaaggaagcctcgaggcattccctgggacttgaccacaactccccaccctcccaaaccggcgggtatggcctggagtatcagcagccatttttcgaggatccgacaggggctggtgacctcctggatgaggaggaggatgaggacaccggatggagtggggcctacctgccgtccgccatcgagcagactcaccccgagagggtccctgccggcacgtcgccctgcagcacatacctttcctttttctccaccccgtcggagctggcagggcctgagtctctgccctcgtgggcgttgagtgacactgattctcgcgtgtctccggcctctccggcagggagtcctagcgcagactttgcggttcatggagagtctctgggagacaggcacctgcggacgctgcagataagttacgacgcactgaaagatgaaaattctaagctgagaagaaagctgaatgaggttcagagcttctctgaagctcaaacagaaatggtgaggacgcttgagcggaagttagaagcaaaaatgatcaaggaggaaagcgactaccacgacctggagtcggtggttcagcaggtggagcagaacctggagctgatgaccaaacgggctgtaaaggcagaaaaccacgtcgtgaaactaaaacaggaaatcagtttgctccaggcgcaggtctccaacttccagcgagagaatgaagccctgcggtgcggccagggtgccagcctgaccgtggtgaagcagaacgccgacgtggccctgcagaacctccgggtggtcatgaacagtgcacaggcttccatcaagcaactggtttccggagctgagacactgaatcttgttgccgaaatccttaaatctatagacagaatttctgaagttaaagacgaggaggaagactcttgaggacccctgggtgttctcagcatgaagctccgtgtataccctgaggtcaccaccgctcgatctaaatgtgcagttgtgtccttaaatatgcagtcttcacccagantaaagttgtttgactcccaaaaaaaaaaaaaaaaaaaaaaaaaaaaaaaaaaaaacaaaaaaaaaaacacccacgacacaactattattatatgtaggaacgaccaaaaaagaagagatagaataagaagatgtcgtcacgatgaaggaacaaaacgagatgtcttaacgatccaacccaatcatttattttctacctacagacgggagtagaaactagcaagagagactcctcaccaaatataagaaatagtaataattatatacgataaccgaggggatatacgagtattatatacatatgtaataagtga

SEQ ID NO: 295512 - DNA, 1552 bp, Homo sapiens
  misc_feature (1452)..(1453): n is a, c, g, or t
  misc_feature (1456)..(1456): n is a, c, g, or t
gttcaggcacgcgctttcggtgctcggagcggaagcagcggcgagaggctcggaggcgcgggggcggccgagcggcgggcgacgggggcgggcgacgggggcgggcgacgcgggccgcggcacgggcggagccggggccatggagccgccgctgccgggctaggcaggtcgtgccccgccgggccggcggcgatgtcgggctaccagcgccgcccgggcgccaccccgctgtcccgagcccggagcctcgccattcccgacgctccagcgttctatgagcgccggtcttgtctcccccagctaaattgtgagcgcccccatggcagggacctggactcccccttcttcggcattcggccggcctttatgtgctatgtgcccagcccggtgctggcttccgtgggagacacagatgacagatttgaagatctggaagaggcaaatccattctcttttagagagtttctgaagaccaagaacctcggcctctcgaaagaggatccggccagcagaatttatgcaaaggaagcctcgaggcattccctgggacttgaccacaactccccaccctcccaaaccggcgggtatggcctggagtatcagcagccatttttcgaggatccgacaggggctggtgacctcctggatgaggaggaggatgaggacaccggatggagtggggcctacctgccgtccgccatcgagcagactcaccccgagagggtccctgccggcacgtcgccctgcagcacatacctttcctttttctccaccccgtcggagctggcagggcctgagtctctgccctcgtgggcgttgagtgacactgattctcgcgtgtctccggcctctccggcagggagtcctagcgcagactttgcggttcatggagagtctctgggagacaggcacctgcggacgctgcagataagttacgacgcactgaaagatgaaaattctaagctgagaagaaagctgaatgaggttcagagcttctctgaagctcaaacagaaatggtgaggacgcttgagcggaagttagaagcaaaaatgatcaaggaggaaagcgactaccacgacctggagtcggtggttcagcaggtggagcagaacctggagctgatgaccaaacgggctgtaaaggcagaaaaccacgtcgtgaaactaaaacaggaaatcagtttgctccaggcgcaggtctccaacttccagcgagagaatgaagccctgcggtgcggccagggtgccagcctgaccgtggtgaagcagaacgccgacgtggccctgcagaacctccgggtggtcatgaacagtgcacaggcttccatcaagcaactggtttccggagctgagacactgaatcttgttgccgaaatccttaaatctatagacagaatttctgaagttaaagacgaggaggaagactcttgaggaccccggcgcctgtcattnnaancaggtgagtgctctgggcaccgctgtgtgtttacgttacactgaggccccatgtgctatccagtctctcgcattaggatggtggtgtagtgtagca

SEQ ID NO: 295513 - DNA, 1302 bp, Homo sapiens
gttcaggcacgcgctttcggtgctcggagcggaagcagcggcgagaggctcggaggcgcgggggcggccgagcggcgggcgacgggggcgggcgacgggggcgggcgacgcgggccgcggcacgggcggagccggggccatggagccgccgctgccgggctaggcaggtcgtgccccgccgggccggcggcgatgtcgggctaccagcgccgcccgggcgccaccccgctgtcccgagcccggagcctcgccattcccgacgctccagcgttctatgagcgccggtcttgtctcccccagctaaattgtgagcgcccccatggcagggacctggactcccccttcttcggcattcggccggcctttatgtgctatgtgcccagcccggtgctggcttccgtgggagacacagatgacagatttgaagatctggaagaggcaaatccattctcttttagagagtttctgaagaccaagaacctcggcctctcgaaagaggatccggccagcagaatttatgcaaaggaagcctcgaggcattccctgggacttgaccacaactccccaccctcccaaaccggcgggtatggcctggagtatcagcagccatttttcgaggatccgacaggggctggtgacctcctggatgaggaggaggatgaggacaccggatggagtggggcctacctgccgtccgccatcgagcagactcaccccgagagggtccctgccggcacgtcgccctgcagcacatacctttcctttttctccaccccgtcggagctggcagggcctgagtctctgccctcgtgggcgttgagtgacactgattctcgcgtgtctccggcctctccggcagggagtcctagcgcagactttgcggttcatggagagtctctgggagacaggcacctgcggacgctgcagataagttacgacgcagtaagtgagcctcacggcgccctctggcacagcgcctgtccgagcggcttctcccggggagaacctggagccatcctacctcttgggtggcctggtttgatttccaggacaaggcgatttgcgtgacagcctgctatccactttccctttgactttgcttctggttacacgtgggaatagaaccggctaaagaggactggtgagctagaagctgtgaattggatgcagttgggcacttacagggctgtaccctcagtaaaggcaggctgcagtcgccagcttgctaagtattccaagaggaggaaaatttttaaaaaattataatcacctaaaaggttataagctctgaataaaaaaaaa

SEQ ID NO: 295514 - DNA, 1286 bp, Homo sapiens
gttcaggcacgcgctttcggtgctcggagcggaagcagcggcgagaggctcggaggcgcgggggcggccgagcggcgggcgacgggggcgggcgacgggggcgggcgacgcgggccgcggcacgggcggagccggggccatggagccgccgctgccgggctaggcaggtcgtgccccgccgggccggcggcgatgtcgggctaccagcgccgcccgggcgccaccccgctgtcccgagcccggagcctcgccattcccgacggtgagcggggcaggggccgagtccagcggtccaggtgggcggcggccgccccggcacgcagtaaagtcgctgttgtcgttgcttccagctccagcgttctatgagcgccggtcttgtctcccccagctaaattgtgagcgcccccatggcagggacctggactcccccttcttcggcattcggccggcctttatgtgctatgtgcccagcccggtgctggcttccgtgggagacacaggtgagagacgagggcgccggccccggggacgcttccagttcccgcgccacgtgtggcacctccgctgcagcacgagctcgtccattgacccatcaatgtgcagagcgctcactgcgtgccaggcactcggaattcaaaggcggagtcccctgctaggagctcacagtctggttgcggggagacctcccccaagacagacagttccagtacaggatggttagtgcccggggagcacaggagcccgcccgctttcctcgtggggctggagtcggggtgccttcacctagtgggcagtgattggaaaccgagctggagcattccatctgcctccacagccgggcagtggccagatctggttcgtcctcgttctacccaagcagaagtgctgctgggtgcccggggtgtgcaggagtgtttgtgtggttatgccaggatctgaggacattcgggggttgtcacaagacaagaggacgcgcttgccccggctgggcttcaaaatctgctgaggagccgctttcagaccacggacaccagggccagtctgcaagtcaggccatctccagggtcacaagtctgggagcttgtgttttttttaaagttttctcggctgaccgggcgcagtggcttacgcctgtaatcccagcactttgggaggccgaggcaggcggatcatgaggtcaggagattgagaccatcctggctaacagggtgaaaacccgtctctacaaaaaatacaaaaaaattagccgggcgtggtggcaggtgcctgtagtcccagctactcgg

SEQ ID NO: 295515 - DNA, 741 bp, Homo sapiens
  misc_feature (428)..(428): n is a, c, g, or t
agaataaatatatcccttcatattctaaaaaaataaattcttcaaaaatttaatttccattaaaaaatttgaaaactttccaaataagaacctctcccctttccctaccccttggaacccctccctttttccccctaccaacccctcccctttctccccccagaaccctgttgctgctgagtagctgctgccacccatcctgatatccatgcttgttttcaggcaactggtttccggagctgagacactgaatcttgttgccgaaatccttaaatctatagacagaatttctgaagttaaagacgaggaggaagactcttgaggacccctgggtgttctcagcatgaagctccgtgtataccctgaggtcaccaccgctcgatctaaatgtgcagttgtgtccttaaatatgcagtcttcacccagantaaagttgtttgactcccaaaaaaaaaaaaaaaaaaaaaaaaaaaaaaaaaaaaacaaaaaaaaaaacacccacgacacaactattattatatgtaggaacgaccaaaaaagaagagatagaataagaagatgtcgtcacgatgaaggaacaaaacgagatgtcttaacgatccaacccaatcatttattttctacctacagacgggagtagaaactagcaagagagactcctcaccaaatataagaaatagtaataattatatacgataaccgaggggatatacgagtattatatacatatgtaataagtga

SEQ ID NO: 295516 - DNA, 2495 bp, Homo sapiens
caaaccagagacactgactccattaataaaccatattttgtgccgttttgactgttctgaccaaatactaatgggaacaattcttgacgtttttctgttgctgattgttaacatagagcagtctctacactaccctgaggcaactctacattggaacactgaggcttacagcctgcaagagcatcagagctgaccatacatttaaacagaaatgctggtttatttgcaaaatcaccagtatattttctattgtgtctataaaaaatcagtcatttaagtacaagaatcatattttccattcctttttagaaatttattttgttgtccctatggaaatcattcacatctgacaatttatatgttaaagagttttactctctctattttggtccaatttgtatctagtggctgagaaattaaataattctaaagtatgaagttacctatctgaaaatgtacttacagagtatcattttaaaatggatgtctctttaaaaattttgttacttttaccaacaatgtaatataatttatgtatattttattaataatagtgaattccttaaaatttgttctatgtacttatatttaatttgatttaatggttactgcccagatattgagaaatggttcaaatattgagtgtgtttcaatatattatctggcttatttcaacatgagtaatatgagcaaaataagttaaaacctgcgtctgatcaattttcctcatgactagaactaaaacagtaaatttggacaatattaagcctcaaataatcatctccaaactccttctaacactttttaaatcagattggaagacatggacaaatcaggttcatgtgttgcatctttatgtcctttgccaatatccaagatcatcacatatggtagatattcacatggagtttcaaattcagaatagattaccattaccttcctgcccttacacatcctactccttatttaaaagttctatttgtgacttttcatttcctgaaagtttaaaaatacaatttgagaatgtttataatacattctctcctgtcttttcacggttacgtctgttattgctgaaatacaccacattttctttgttctggtcaaggttaactcaatatctgtgtgaaagagaactactaacaacgttacaatagaggctagatttgaaaaaaaaaatctatagatctaattgatacaattgtagaacaaaatgtcaaaataatgttttaagtataagagaagatggaccaaggagagagagatcatttgaaaatctaattgtagcttttctaggctcacattcatgtactacttttagcacccttatgggctgtgctcgccccctggacagttgagctttggattatcttcctcttcaattttccctctattgacccgagtgtctccctctgcttctacagatttatagtactccttggctcttttgagtctccacttttactcactgtctctgggatttttaagatccttttcttctcttataaatcatcctcttaatgaaaattagcctaacaaaagtttggagactggaatcctactttgagccactgacttgaaataactcttttggcaagttgcctgacatcctgtcttaccaaggtggcatatttgcatttttactgcttaaaacatttttttttttttaccatctttatccaaatttatcatattgatggtaggactaacaggctttttagaagctggctttaactttgagtctcaagctacaatgctgttgggcagcctggtcttcccacgtgagggtttaactttgtttatttgcctccagttattccaaaatgcttattaaatgaaaggcccaggaacatgtttattttagtcacctttgctttttaacaattttgttttgtaatcaatgagtaattcatgatgaattatttttgactaatggatagccgaaggccaagcttttaattctaataggtaatgttcttcttttgtcttattgaaacaatgagaatactctgtgcatttcaaatgcactccgattatgctgtggttttattcacataagcacaatatgtgttttatttataacttcataacaaacttataatataataatttaccttagcagacatgcaaaagcttattcttgtgtgacttactttctttaagctaataatataaaaataaatatgtatcttaaaaatctataataaaacattagaaattaaagatatgtgctttttattttgcagatgagttcatttgcttctgtagatgtgttttcagagctaggtacagaggaatgtttgctacctttagcggtgaaaaaagaaagagagtcaagaattttgttggattgtgtttgtgtgtgcatatatttgatatcatcattatatttgtaatctttggacttgtaatcatagcctgtttattctactgtgccattaaatatactttaccttatacataacgaataaaatacctagatgtagatttattta

SEQ ID NO: 295517 - DNA, 2485 bp, Homo sapiens
cgctctagagatccactcgcggctggatagggccgttttgactgttctgaccaaatactaatgggaacaattcttgacgtttttctgttgctgattgttaacatagagcagtctctacactaccctgaggcaactctacattggaacactgaggcttacagcctgcaagagcatcagagctgaccatacatttaaacagaaatgctggtttatttgcaaaatcaccagtatattttctattgtgtctataaaaaatcagtcatttaagtacaagaatcatattttccattcctttttagaaatttattttgttgtccctatggaaatcattcacatctgacaatttatatgttaaagagttttactctctctattttggtccaatttgtatctagtggctgagaaattaaataattctaaagtatgaagttacctatctgaaaatgtacttacagagtatcattttaaaatggatgtctctttaaaaattttgttacttttaccaacaatgtaatataatttatgtatattttattaataatagtgaattccttaaaatttgttctatgtacttatatttaatttgatttaatggttactgcccagatattgagaaatggttcaaatattgagtgtgtttcaatatattatctggcttatttcaacatgagtaatatgagcaaaataagttaaaacctgcgtctgatcaattttcctcatgactagaactaaaacagtaaatttggacaatattaagcctcaaataatcatctccaaactccttctaacactttttaaatcagattggaagacatggacaaatcaggttcatgtgttgcatctttatgtcctttgccaatatccaagatcatcacatatggtagatattcacatggagtttcaaattcagaatagattaccattaccttcctgcccttacacatcctactccttatttaaaagttctatttgtgacttttcatttcctgaaagtttaaaaatacaatttgagaatgtttataatacattctctcctgtcttttcacggttacgtctgttattgctgaaatacaccacattttctttgttctggtcaaggttaactcaatatctgtgtgaaagagaactactaacaacgttacaatagaggctagatttgaaaaaaaaaatctatagatctaattgatacaattgtagaacaaaatgtcaaaataatgttttaagtataagagaagatggaccaaggagagagagatcatttgaaaatctaattgtagcttttctaggctcacattcatgtactacttttagcacccttatgggctgtgctcgccccctggacagttgagctttggattatcttcctcttcaattttccctctattgacccgagtgtctccctctgcttctacagatttatagtactccttggctcttttgagtctccacttttactcactgtctctgggatttttaagatccttttcttctcttataaatcatcctcttaatgaaaattagcctaacaaaagtttggagactggaatcctactttgagccactgacttgaaataactcttttggcaagttgcctgacatcctgtcttaccaaggtggcatatttgcatttttactgcttaaaacatttttttttttttaccatctttatccaaatttatcatattgatggtaggactaacaggctttttagaagctggctttaactttgagtctcaagctacaatgctgttgggcagcctggtcttcccacgtgagggtttaactttgtttatttgcctccagttattccaaaatgcttattaaatgaaaggcccaggaacatgtttattttagtcacctttgctttttaacaattttgttttgtaatcaatgagtaattcatgatgaattatttttgactaatggatagccgaaggccaagcttttaattctaataggtaatgttcttcttttgtcttattgaaacaatgagaatactctgtgcatttcaaatgcactccgattatgctgtggttttattcacataagcacaatatgtgttttatttataacttcataacaaacttataatataataatttaccttagcagacatgcaaaagcttattcttgtgtgacttactttctttaagctaataatataaaaataaatatgtatcttaaaaatctataataaaacattagaaattaaagatatgtgctttttattttgcagatgagttcatttgcttctgtagatgtgttttcagagctaggtacagaggaatgtttgctacctttagcggtgaaaaaagaaagagagtcaagaattttgttggattgtgtttgtgtgtgcatatatttgatatcatcattatatttgtaatctttggacttgtaatcatagcctgtttattctactgtgccattaaatatactttaccttatacataacgaataaaatacctagatgtagatttattta

SEQ ID NO: 295518 - DNA, 2238 bp, Homo sapiens
cggacgcgtgggtcgacccacgcgttcaatcatattttccattcctttttagaaatttattttgttgtccctatggaaatcattcacatctgacaatttatatgttaaagagttttactctctctattttggtccaatttgtatctagtggctgagaaattaaataattctaaagtatgaagttacctatctgaaaatgtacttacagagtatcattttaaaatggatgtctctttaaaaattttgttacttttaccaacaatgtaatataatttatgtatattttattaataatagtgaattccttaaaatttgttctatgtacttatatttaatttgatttaatggttactgcccagatattgagaaatggttcaaatattgagtgtgtttcaatatattatctggcttatttcaacatgagtaatatgagcaaaataagttaaaacctgcgtctgatcaattttcctcatgactagaactaaaacagtaaatttggacaatattaagcctcaaataatcatctccaaactccttctaacactttttaaatcagattggaagacatggacaaatcaggttcatgtgttgcatctttatgtcctttgccaatatccaagatcatcacatatggtagatattcacatggagtttcaaattcagaatagattaccattaccttcctgcccttacacatcctactccttatttaaaagttctatttgtgacttttcatttcctgaaagtttaaaaatacaatttgagaatgtttataatacattctctcctgtcttttcacggttacgtctgttattgctgaaatacaccacattttctttgttctggtcaaggttaactcaatatctgtgtgaaagagaactactaacaacgttacaatagaggctagatttgaaaaaaaaaatctatagatctaattgatacaattgtagaacaaaatgtcaaaataatgttttaagtataagagaagatggaccaaggagagagagatcatttgaaaatctaattgtagcttttctaggctcacattcatgtactacttttagcacccttatgggctgtgctcgccccctggacagttgagctttggattatcttcctcttcaattttccctctattgacccgagtgtctccctctgcttctacagatttatagtactccttggctcttttgagtctccacttttactcactgtctctgggatttttaagatccttttcttctcttataaatcatcctcttaatgaaaattagcctaacaaaagtttggagactggaatcctactttgagccactgacttgaaataactcttttggcaagttgcctgacatcctgtcttaccaaggtggcatatttgcatttttactgcttaaaacatttttttttttttaccatctttatccaaatttatcatattgatggtaggactaacaggctttttagaagctggctttaactttgagtctcaagctacaatgctgttgggcagcctggtcttcccacgtgagggtttaactttgtttatttgcctccagttattccaaaatgcttattaaatgaaaggcccaggaacatgtttattttagtcacctttgctttttaacaattttgttttgtaatcaatgagtaattcatgatgaattatttttgactaatggatagccgaaggccaagcttttaattctaataggtaatgttcttcttttgtcttattgaaacaatgagaatactctgtgcatttcaaatgcactccgattatgctgtggttttattcacataagcacaatatgtgttttatttataacttcataacaaacttataatataataatttaccttagcagacatgcaaaagcttattcttgtgtgacttactttctttaagctaataatataaaaataaatatgtatcttaaaaatctataataaaacattagaaattaaagatatgtgctttttattttgcagatgagttcatttgcttctgtagatgtgttttcagagctaggtacagaggaatgtttgctacctttagcggtgaaaaaagaaagagagtcaagaattttgttggattgtgtttgtgtgtgcatatatttgatatcatcattatatttgtaatctttggacttgtaatcatagcctgtttattctactgtgccattaaatatactttaccttatacataacgaataaaatacctagatgtagatttattta

SEQ ID NO: 295519 - DNA, 2221 bp, Homo sapiens
caaaccagagacactgactccattaataaaccatattttgtgccgttttgactgttctgaccaaatactaatgggaacaattcttgacgtttttctgttgctgattgttaacatagagcagtctctacactaccctgaggcaactctacattggaacactgaggcttacagcctgcaagagcatcagagctgaccatacatttaaacagaaatgctggtttatttgcaaaatcaccagtatattttctattgtgtctataaaaaatcagtcatttaagtacaagaatcatattttccattcctttttagaaatttattttgttgtccctatggaaatcattcacatctgacaatttatatgttaaagagttttactctctctattttggtccaatttgtatctagtggctgagaaattaaataattctaaagtatgaagttacctatctgaaaatgtacttacagagtatcattttaaaatggatgtctctttaaaaattttgttacttttaccaacaatgtaatataatttatgtatattttattaataatagtgaattccttaaaatttgttctatgtacttatatttaatttgatttaatggttactgcccagatattgagaaatggttcaaatattgagtgtgtttcaatatattatctggcttatttcaacatgagtaatatgagcaaaataagttaaaacctgcgtctgatcaattttcctcatgactagaactaaaacagtaaatttggacaatattaagcctcaaataatcatctccaaactccttctaacactttttaaatcagattggaagacatggacaaatcaggttcatgtgttgcatctttatgtcctttgccaatatccaagatcatcacatatggtagatattcacatggagtttcaaattcagaatagattaccattaccttcctgcccttacacatcctactccttatttaaaagttctatttgtgacttttcatttcctgaaagtttaaaaatacaatttgagaatgtttataatacattctctcctgtcttttcacggttacgtctgttattgctgaaatacaccacattttctttgttctggtcaaggttaactcaatatctgtgtgaaagagaactactaacaacgttacaatagaggctagatttgaaaaaaaaaatctatagatctaattgatacaattgtagaacaaaatgtcaaaataatgttttaagtataagagaagatggaccaaggagagagagatcatttgaaaatctaattgtagcttttctaggctcacattcatgtactacttttagcacccttatgggctgtgctcgccccctggacagttgagctttggattatcttcctcttcaattttccctctattgacccgagtgtctccctctgcttctacagatttatagtactccttggctcttttgagtctccacttttactcactgtctctgggatttttaagatccttttcttctcttataaatcatcctcttaatgaaaattagcctaacaaaagtttggagactggaatcctactttgagccactgacttgaaataactcttttggcaagttgcctgacatcctgtcttaccaaggtggcatatttgcatttttactgcttaaaacatttttttttttttaccatctttatccaaatttatcatattgatggtaggactaacaggctttttagaagctggctttaactttgagtctcaagctacaatgctgttgggcagcctggtcttcccacgtgagggtttaactttgtttatttgcctccagttattccaaaatgcttattaaatgaaaggcccaggaacatgtttattttagtcacctttgctttttaacaattttgttttgtaatcaatgagtaattcatgatgaattatttttgactaatggatagccgaaggccaagcttttaattctaataggtaatgttcttcttttgtcttattgaaacaatgagaatactctgtgcatttcaaatgcactccgattatgctgtggttttattcacataagcacaatatgtgttttatttataacttcataacaaacttataatataataatttaccttagcagacatgcaaaagcttattcttgtgtgacttactttctttaagctaataatataaaaataaatatgtatcttaaaaatctataataaaacattagaaatta

SEQ ID NO: 295520 - DNA, 2603 bp, Homo sapiens
caaaccagagacactgactccattaataaaccatattttgtgccgttttgactgttctgaccaaatactaatgggaacaattcttgacgtttttctgttgctgattgttaacatagagcagtctctacactaccctgaggcaactctacattggaacactgaggcttacagcctgcaagagcatcagagctgaccatacatttaaacagaaatgctggtttatttgcaaaatcaccagtatattttctattgtgtctataaaaaatcagtcatttaagtacaagaatcatattttccattcctttttagaaatttattttgttgtccctatggaaatcattcacatctgacaatttatatgttaaagagttttactctctctattttggtccaatttgtatctagtggctgagaaattaaataattctaaagtatgaagttacctatctgaaaatgtacttacagagtatcattttaaaatggatgtctctttaaaaattttgttacttttaccaacaatgtaatataatttatgtatattttattaataatagtgaattccttaaaatttgttctatgtacttatatttaatttgatttaatggttactgcccagatattgagaaatggttcaaatattgagtgtgtttcaatatattatctggcttatttcaacatgagtaatatgagcaaaataagttaaaacctgcgtctgatcaattttcctcatgactagaactaaaacagtaaatttggacaatattaagcctcaaataatcatctccaaactccttctaacactttttaaatcagattggaagacatggacaaatcaggttcatgtgttgcatctttatgtcctttgccaatatccaagatcatcacatatggtagatattcacatggagtttcaaattcagaatagattaccattaccttcctgcccttacacatcctactccttatttaaaagttctatttgtgacttttcatttcctgaaagtttaaaaatacaatttgagaatgtttataatacattctctcctgtcttttcacggttacgtctgttattgctgaaatacaccacattttctttgttctggtcaaggttaactcaatatctgtgtgaaagagaactactaacaacgttacaatagaggctagatttgaaaaaaaaaatctatagatctaattgatacaattgtagaacaaaatgtcaaaataatgttttaagtataagagaagatggaccaaggagagagagatcatttgaaaatctaattgtagcttttctaggctcacattcatgtactacttttagcacccttatgggctgtgctcgccccctggacagttgagctttggattatcttcctcttcaattttccctctattgacccgagtgtctccctctgcttctacagatttatagtactccttggctcttttgagtctccacttttactcactgtctctgggatttttaagatccttttcttctcttataaatcatcctcttaatgaaaattagcctaacaaaagtttggagactggaatcctactttgagccactgacttgaaataactcttttggcaagttgcctgacatcctgtcttaccaaggtggcatatttgcatttttactgcttaaaacatttttttttttttaccatctttatccaaatttatcatattgatggtaggactaacaggctttttagaagctggctttaactttgagtctcaagctacaatgctgttgggcagcctggtcttcccacgtgagggtttaactttgtttatttgcctccagttattccaaaatgcttattaaatgaaaggcccaggaacatgtttattttagtcacctttgctttttaacaattttgttttgtaatcaatgagtaattcatgatgaattatttttgactaatggatagccgaaggccaagcttttaattctaataggtaatgttcttcttttgtcttattgaaacaatgagaatactctgtgcatttcaaatgcactccgattatgctgtggttttattcacataagcacaatatgtgttttatttataacttcataacaaacttataatataataatttaccttagcagacatgcaaaagcttattcttgtgtgacttactttctttaagctaataatataaaaataaatatgtatcttaaaaatctataataaaacattagaaattaaagatatgtgctttttattttgcagatgagttcatttgcttctgtagatgtgttttcagagctaggtacagaggaatgtttgctacctttagcggtgaaaaaagaaagagagtcaagaattttgttggattgtgtttgtgtgtgcatatatttgatatcatcattatatttgtaatctttggacttgtaatcatagcctgtttattctactgtgccattaaatatactttaccttatacataacgaataaaatacctagatgtagatttatttacacactgtcttatgaaattcttatgtttatgtcagcacagaacaagcacacatttagagcattcatctgaaaattatatggaaattgaacatgggtcaaataaagatg

SEQ ID NO: 295521 - DNA, 1431 bp, Homo sapiens
caaaccagagacactgactccattaataaaccatattttgtgccgttttgactgttctgaccaaatactaatgggaacaattcttgacgtttttctgttgctgattgttaacatagagcagtctctacactaccctgaggcaactctacattggaacactgaggcttacagcctgcaagagcatcagagctgaccatacatttaaacagaaatgctggtttatttgcaaaatcaccagtatattttctattgtgtctataaaaaatcagtcatttaagtacaagaatcatattttccattcctttttagaaatttattttgttgtccctatggaaatcattcacatctgacaatttatatgttaaagagttttactctctctattttggtccaatttgtatctagtggctgagaaattaaataattctaaagtatgaagttacctatctgaaaatgtacttacagagtatcattttaaaatggatgtctctttaaaaattttgttacttttaccaacaatgtaatataatttatgtatattttattaataatagtgaattccttaaaatttgttctatgtacttatatttaatttgatttaatggttactgcccagatattgagaaatggttcaaatattgagtgtgtttcaatatattatctggcttatttcaacatgagtaatatgagcaaaataagttaaaacctgcgtctgatcaattttcctcatgactagaactaaaacagtaaatttggacaatattaagcctcaaataatcatctccaaactccttctaacactttttaaatcagattggaagacatggacaaatcaggttcatgtgttgcatctttatgtcctttgccaatatccaagatcatcacatatggtagatattcacatggagtttcaaattcagaatagattaccattaccttcctgcccttacacatcctactccttatttaaaagttctatttgtgacttttcatttcctgaaagtttaaaaatacaatttgagaatgtttataatacattctctcctgtcttttcacggttacgtctgttattgctgaaatacaccacattttctttgttctggtcaaggttaactcaatatctgtgtgaaagagaactactaacaacgttacaatagaggctagatttgaaaaaaaaaatctatagatctaattgatacaattgtagaacaaaatgtcaaaataatgttttaagtataagagaagatggaccaaggagagagagatcatttgaaaatctaattgtagcttttctaggctcacattcatgtactacttttagcacccttatgggctgtgctcgcccccggccaagatactcatattacacactttgtagctctttaatctgacttcacacctacatccagcataatgtccccgtggacttcc

SEQ ID NO: 295522 - DNA, 1122 bp, Homo sapiens
agcagggctcaaaacctggccaggaggtcttgttgggccaggaatgtccgtggttggtgaggaggctgggagaaggcctttttgatggctccattgttcacagcgctgccctacaaataccatatccgtccccacctcctctgcaagggtcgagcggaagagtaggtctggtgagctgagctctagggcgctggtaccatcttccctcaatccccctcggttaccccttggggcagcaacgacgccatcccagccccttccagagaacacacaaaggaagccccacccgtccttagacctgaggacacgctcgggagcgggctgacgtggaccccgtttcagggcgccccgggcccctgcggggaacaatagccgccgcctcctgggcggtctggcgggcgcgcggcacaaacgtccgcgccgccatgtgatgcgcgcgctcgttccgcgctctccgcgcctcagcgagcggccaggctgcgggccgggtgggctggcgctcctgatccacctggaacacttttgcaaagacagacgcggttcctcctacttcagagcaagtctgggccagctgggatccgaccagaaaccgcaagcggaggagacgcaggagcgcaggctgagcgctaactgaaggcgcgacctgagcccggcgcctgctggggagctgcgcagccaggacagcggtcggcagcacagggcctgggcgcagggcccgccgtcaccacctcacgtcggaagccagcactgctgcccgccagccctgccgcctgccctcggacttcccagggcgcccagggtcctcccaacgcgcctgcacccacacccgcccctgagccacagtgaccttgcattccccgccccctgccacacctcctgcgtgcccgagtgtcacccttaaataccgctctacacccagagagggacgaatacacctctgaagacagggcaagactaatttcaatgggtcagaaggttcttgcaggcactgttttatttaagagtgcctatttactggcaggagtatttgtgtgggaggaagtaggctaagactgctgttgaacttgaagctaaacttgaatgccatttaaaataacaataaaaatatacttaaaacaccaa

SEQ ID NO: 295523 - DNA, 1293 bp, Homo sapiens
agcagggctcaaaacctggccaggaggtcttgttgggccaggaatgtccgtggttggtgaggaggctgggagaaggcctttttgatggctccattgttcacagcgctgccctacaaataccatatccgtccccacctcctctgcaagggtcgagcggaagagtaggtctggtgagctgagctctagggcgctggtaccatcttccctcaatccccctcggttaccccttggggcagcaacgacgccatcccagccccttccagagaacacacaaaggaagccccacccgtccttagacctgaggacacgctcgggagcgggctgacgtggaccccgtttcagggcgccccgggcccctgcggggaacaatagccgccgcctcctgggcggtctggcgggcgcgcggcacaaacgtccgcgccgccatgtgatgcgcgcgctcgttccgcgctctccgcgcctcagcgagcggccaggctgcgggccgggtgggctggcgctcctgatccacctggaacacttttgcaaagacagacggtgagttaatcaccctaccggctggcggccgcgtcccctctcgcccgcgaggaggactggagaaggggctggggtggaggttttctctgtgtgtgtctagggttgggggcaggagaggttagttctattaagagttcatcaatcacccggtgtgcacttttcgctcgacagcggttcctcctacttcagagcaagtctgggccagctgggatccgaccagaaaccgcaagcggaggagacgcaggagcgcaggctgagcgctaactgaaggcgcgacctgagcccggcgcctgctggggagctgcgcagccaggacagcggtcggcagcacagggcctgggcgcagggcccgccgtcaccacctcacgtcggaagccagcactgctgcccgccagccctgccgcctgccctcggacttcccagggcgcccagggtcctcccaacgcgcctgcacccacacccgcccctgagccacagtgaccttgcattccccgccccctgccacacctcctgcgtgcccgagtgtcacccttaaataccgctctacacccagagagggacgaatacacctctgaagacagggcaagactaatttcaatgggtcagaaggttcttgcaggcactgttttatttaagagtgcctatttactggcaggagtatttgtgtgggaggaagtaggctaagactgctgttgaacttgaagctaaacttgaatgccatttaaaataacaataaaaatatacttaaaacaccaa

SEQ ID NO: 295524 - DNA, 739 bp, Homo sapiens
acctgcatgctactcagtacagttggggcattgtgctcagacaagaaaggggcacttgtgatccagacaatgggctgggtcgctcccatttggcctgggcttcagcttccctgggtcagcaatatcctttcctctgctcctgcccactctgcttccacccctccctggagaatggtggctaggaacacggagcagagactcaccgcgggcccatgcccggtttggcacgtgcctcggccgtgaggaggaggagggatgcaagcttcgctcctctaccctggtatagaccaagagaaatggcggcatctgcacacacaaaaacttgtacaggaatgttcacagcagcaataacagccaaaaagtgggaacaatcttaatgtctaccaactgacgaacaggtatagaccaagaggtatggaggccaaggcgagcagattacttgaggtcaggagttcgagaccagcctggccagcggttccagtgaggcccatgtgaggcagtcactcagggcagtagccccctcactggcctccccacttccactcacacccactatggcccactccccacacctcacattcctgcccagggtcccccagcggtcccatcttgctgagaacctgccggcactcctctttgcctgcacgggctcactcagccacacaggtgtcctcgcggtgctccacctcacagggctggcccctgcctcaggactgcaatacccggctgtttcttctgc

SEQ ID NO: 295525 - DNA, 457 bp, Homo sapiens
tcagctcggtaccgtgaggtacagctggataacactaacttgaactaaggacagtcaaagacaaccacaaaacgcaaaacataaaagtttggtggccgggtgcggtggctcaggcctataatcccagcactttgggaggccgaggcgggcggatcacctgaggtcaggagttcgagaccagcctggccagcggttccagtgaggcccatgtgaggcagtcactcagggcagtagccccctcactggcctccccacttccactcacacccactatggcccactccccacacctcacattcctgcccagggtcccccagcggtcccatcttgctgagaacctgccggcactcctctttgcctgcacgggctcactcagccacacaggtgtcctcgcggtgctccacctcacagggctggcccctgcctcaggactgcaatacccggctgtttcttctgc

SEQ ID NO: 295526 - DNA, 564 bp, Homo sapiens
tcgaaggggccgaagaactcggcggcgaaggtgaccacgtcctccggctggcgcagcagcaggaagagcaggaagtcggagatgagcgcgtgggcttcggggtgctgccgcagatagctggcgtggccgagccggagctcctcctggcaggggacagagcccgagcctcagccggacgggacccccgcgccccaggagcccccagccgctcgctccaaggagagctaaggggcgctggagccttctagcccctacgggtgtgcatttcaatcaggcatcttggtgatgatgcagcaccctggggagcccacctgtattctcttggccaggtgcctggagtgcaacacaacatgtgagagtgagaatcttcccagaccgcctgctatggactgaattgtctctctaacccccagtgtggtggtatttggagaaaggccatgtgaggacacattgagaaggcacttgtctgcaagctaggaagacagccctcaccagaaaccaaccctgatggcaccatgatcttggacttcctgccttccagcaaatatatttctcttgaagcca

SEQ ID NO: 295527 - DNA, 509 bp, Homo sapiens
tcgaaggggccgaagaactcggcggcgaaggtgaccacgtcctccggctggcgcagcagcaggaagagcaggaagtcggagatgagcgcgtgggcttcggggtgctgccgcagatagctggcgtggccgagccggagctcctcctggcaggggacagagcccgagcctcagccggacgggacccccgcgccccaggagcccccagccgctcgctccaaggagagctaaggggcgctggagccttctagcccctacgggtgtgcatttcaatcaggtgcctggagtgcaacacaacatgtgagagtgagaatcttcccagaccgcctgctatggactgaattgtctctctaacccccagtgtggtggtatttggagaaaggccatgtgaggacacattgagaaggcacttgtctgcaagctaggaagacagccctcaccagaaaccaaccctgatggcaccatgatcttggacttcctgccttccagcaaatatatttctcttgaagcca

SEQ ID NO: 295528 - DNA, 490 bp, Homo sapiens
agacaacccccatcccctgctgtagcgggacagttggagggtcatgggtgggtgaagtgtttggctgagggaaactcagaccaaagagcagcggcaagaaagcagttgggtccccacaaaacgcccgaagtcaaggtgagggtcacacaacgactcttgacgattccggcgagttcatcctggtgcacatcccactccatgcctctctcttctggttggacaatagttacatccttacgaaaaggaggcaagctgctgggccttggtggatccactcaaccttgttaccaagggacatgccgccatgctatgtgaaaaggggggttttgttgtttgtttttaatttaagtatctaattcgtttcacgaaagaatgatcaataccggcccagagtaaacttgataagtaattaaactgtcagggcatagagttcccatagaggtgcttgttctttcaatacacaaataaagggatgcaaaagtcaacatgc

SEQ ID NO: 295529 - DNA, 805 bp, Homo sapiens
  misc_feature (8)..(8): n is a, c, g, or t
  misc_feature (15)..(15): n is a, c, g, or t
  misc_feature (22)..(22): n is a, c, g, or t
gcgacagntaccgcncctggcnccgacctggcggataaagtggccagtgtgtacgaagccccgggctttttcctggacctggagcccatcccgggagccttggacgctgtgcgggagatgaacgacctaccggacacgcaggtcttcatctgcaccagccccctgctgaagtaccaccactgtgtgggtgagaaggtgtggctgccccgcccctactccgcacgtggagctgcctaaatcctgattttaaaaagaaaccaccagaaacccagaagtaccgctgggtggagcagcacctggggccccagttcgtagaacgaattatcctgacaagggacaagacggtggtcttgggggacctgctcattgatgacaaggacacagttcgaggccaggaggagaccccaagctgggagcacatcttgttcacctgctgccacaatcggcacctggtcctgcccccgacaaggagacggctgctctcctggagtgacaactggagggagatcttagatagcaagcgcggagctgcgcagcgggaatgagcggggatgccgcgggcagcagctggagctaaaggaagggcaggcccacaggggccaccgcagagccgagtcggggcggcatcgtgctggtgcctctggccccgtggagtggagcaggcagataccgttaagcgctgtgctaccgggccccaggcccagccacccggtacctcccgagaggctgtccctggaccctggctggcatggaaatacagtgggaaaaccagtcgggacctttaataaaagaccttggctttcta

SEQ ID NO: 295530 - DNA, 5089 bp, Homo sapiens
ccagtggacgagaatcgcggagcctgcggggctggaggttgagcgcccgggccagcacctaggcgggcgcgggggtgtgcaggccagggttcgcgcgggccgggtggaggcttgagcggggacccccgagcttgagccccggagccggcggcgctggggccagaggggccggacgggaggtggcggaggtggcggcggaggcgaaggggcggcgggacgcgggcctggcccgtgtgtgtcctggcggcctggcccaggctgccgctgtacggtgagcccgagggaggcggatctgggtcccgggaaggacacccgcctggatttgccccttaggcccggcccgggcccctcgggagcagaacaaccttagtgaggtggacaggaggggacctcgcgagcagacgcgcgccagcgacagcagccccgccccggcctctcgggagccgtggggcagaggctgcggagccccagaagggtctaccagccacagtctctgcacgtttccaagagcagcagaaaatgaacacattgcaggggccagtgtcattcaaagatgtggctgtggatttcacccaggaggagtggcagcagctggaccctgatgagaagataacttacagggatgtgatgttggagaactatagccatctagtttctgtgggatatgataccaccaagccaaacgtcatcattaagttggagcagggagaggagccgtggataatgggaggtgaatttccatgtcaacatagtccagaagcctggagagttgatgacctgatagagagaatccaagaaaacgaagacaaacattcaaggcaagctgcttgtatcaatagcaaaaccctgactgaagagaaagagaatacatttagtcaaatttacatggaaacaagccttgttccttcaagcataatagctcataattgtgtctcatgtggaaagaatttagaatctatttcgcaattaattagtagtgatggaagctatgctaggacaaaacctgatgagtgtaatgaatgtgggaaaacatatcatggagagaaaatgtgtgaatttaatcaaaatggggatacctattctcacaatgaagaaaatattcttcagaaaattagtattttggagaaaccctttgaatataatgaatgcatggaagccttagacaatgaggctgtttttattgctcataagagagcttacataggggagaagccctatgagtggaatgattctggaccagacttcatacagatgtcaaattttaatgcatatcagagatcacaaatggaaatgaagccctttgaatgcagtgaatgtggaaaatccttctgtaaaaagtcaaaattcatcatccaccagagggctcacacaggagagaaaccttatgaatgtaatgtatgtgggaaatccttcagccaaaagggaaccctcactgtacatcggagatcacacttagaggagaagccctataaatgtaatgaatgtgggaaaaccttttgtcagaagttacacctcactcaacacctaagaactcattcaggagagaaaccctacgaatgtagcgaatgtgggaaaaccttctgccaaaagacacatctcaccctgcaccagaggaatcattcaggagagaggccctatccatgtaacgaatgtgggaaatccttctcccgcaagtctgctctcagtgaccatcagagaactcacacgggagagaagctttataaatgtaatgaatgtgggaaatcctactaccgaaagtctactctgattacacatcagagaacacacacgggagagaagccctatcagtgtagcgagtgtgggaaattcttttctcgggtgtcatacctcactatacattatagaagtcatttagaagagaaaccctatgaatgtaatgaatgtggcaaaaccttcaatttaaattcagccttcattagacatcggaaagtacacacagaagagaaatcccatgaatgtagtgaatgtggaaagttctctcagttgtatctcaccgaccatcatacagctcatttagaagagaaaccctatgaatgtaatgaatgtgggaaaaccttccttgtaaattcagccttcgatgggcaccagccacttccaaaaggggagaaatcctatgaatgtaatgtatgtggaaagttattcaatgagttgtcatactatactgaacattatagaagtcattcagaagagaaaccttatggatgtagcgaatgtgggaaaaccttttcccataattcatccctcttcagacatcaaagagtacacacaggcgagaaaccctatgaatgttacgaatgtggaaaattcttctctcagaaatcatatctcactatacatcatcgaattcattcaggagagaaaccctatgaatgtagtaaatgtggaaaagtcttctctcggatgtcaaacctcactgtccactacagaagccattcaggagagaaaccctatgaatgtaatgaatgtgggaaagtcttttctcagaagtcatacctcactgtacactatagaactcattcaggagagaaaccctatgaatgtaacgagtgtgggaaaaaattccaccacagatcagccttcaatagccatcagagaattcatagaagaggaaatatgaacgtacttgatgtggaaaatctctgaagtcagatctcaatttttagaaaactctctgaatataatgaatatggggaatccaataggaagtcaaagcgtttatctgagagttcgtgttcctgaacggtgagaagcatttaggcattagagtcattttaatccaaattttcacagagaagaatcccgaagaatgtaacaagaagcaaagccttcagcaagatcatacgactcatcggacactaatttatataggagtgaagttttataaatatttaatatttattttggattcaaattgtatttacatatcagggaatcatacaaaggcaaaatctgtcaatatggtgaatgtggaaaatatattgtcttggaaatttgttgtaaaagccatatttctaatggaaaatcaggtgtttacaggaaagatctcagaggctatgagctctgaataaatcttcattgtataaaatgaagtttttaaattgtcaggagttgatcatgaggacagtagcattaaataagtatatggccgttttttatcatgtcttaaaaatgcaatctaatggtaattctatgcaagtttggaattggatgacttgtgaagaggcagttttcttatttgagtattaggatggcaaaatgtattaagacaggacatattgttggtgagataatatttaataggtataaaatggtaaaatacctagttttctatttagaggaatttacaaatgggtttttaacaaatgcctcattagtacaggaggcagtcgttttgtaaagttttcaactgcatctgagtaagataagattttctaaaagactattttgataaactatacatacataatttggaattgtttaagtctatttcagtgaaagagaacaagcatactgcccatactctaaaatatccccagctctcacaccacccttgttttttaacccataggtttgagtgtgcctagtgccaatattttgtaatttagaaattttattcacaaacttctgtttggtacaaatacagtgtcattgttttgtgcattctcctttttcccagtatttcagaacaaattgattcaagtttctagcagatattttttgatcaattaacttaatgtcctcgctccatttcttgctggaacagtttaggtacctaccacttcttcacatgacacaggggaatcctgattagtcaaaataataatgatttcattctctttgccagtaacttgttttatagtggtcatatgacctgatactgggtaaacaaaacaaagatggacttgttctgggaaaaggtaaaatggtaatcaaatagattgtgttccaggaatgcaaaggtggcttaatattcacaagtcagttgctattatacaccacctgtagaaaagtaatctggcatgcagaacattcttgtggtacaattaatgttcgtttatgatcttagcaaatgatggattgaaagggacttacttaactgcataaagagacttaaactacaacaaacaatatgcttaatgatgaaatagtgaacatttctcctaagattataaaaataagacaaggatatctgctgtcaatgattttatcggagcgtgcgcgtgctggtggacatggacggcgtcctggccgacttcgaggccggcctcctgcggggcttccgccgccgcttccctgaggagccgcacgtgccgctggagcagcgccgcggcttcctggcccgcgagcagtaccgcgccctgcggcccgacctggcggataaagtggccagtgtgtacgaagccccgggctttttcctggacctggagcccatcccgggagccttggacgctgtgcgggagatgaacgacctaccggacacgcaggtcttcatctgcaccagccccctgctgaagtaccaccactgtgtgggtgagaagtaccgctgggtggagcagcacctggggccccagttcgtagaacgaattatcctgacaagggacaagacggtggtcttgggggacctgctcattgatgacaaggacacagttcgaggccaggaggagaccccaagctgggagcacatcttgttcacctgctgccacaatcggcacctggtcctgcccccgacaaggagacggctgctctcctggagtgacaactggagggagatcttagatagcaagcgcggagctgcgcagcgggaatgagcggggatgccgcgggcagcagctggagctaaaggaagggcaggcccacaggggccaccgcagagccgagtcggggcggcatcgtgctggtgcctctggccccgtggagtggagcaggcagataccgttaagcgctgtgctaccgggccccaggcccagccacccggtacctcccgagaggctgtccctggaccctggctggcatggaaatacagtgggaaaaccagtcgggacctttaataaaagaccttggctttcta

SEQ ID NO: 295531 - DNA, 941 bp, Homo sapiens
agcagcgctccctccgcttccggccgagcccgcgccccccagaccccgagagctcgcagctccggcccggcggcgatggcgcggagcgtgcgcgtgctggtggacatggacggcgtcctggccgacttcgaggccggcctcctgcggggcttccgccgccgcttccctgaggagccgcacgtgccgctggagcagcgccgcggcttcctggcccgcgagcagtaccgcgccctgcggcccgacctggcggataaagtggccagtgtgtacgaagccccgggctttttcctggacctggagcccatcccgggagccttggacgctgtgcgggagatgaacgacctaccggacacgcaggtcttcatctgcaccagccccctgctgaagtaccaccactgtgtgggtgagaagtaccgctgggtggagcagcacctggggccccagttcgtagaacgaattatcctgacaagggacaagacggtggtcttgggggacctgctcattgatgacaaggacacagttcgaggccaggaggagaccccaagctgggagcacatcttgttcacctgctgccacaatcggcacctggtcctgcccccgacaaggagacggctgctctcctggagtgacaactggagggagatcttagatagcaagcgcggagctgcgcagcgggaatgagcggggatgccgcgggcagcagctggagctaaaggaagggcaggcccacaggggccaccgcagagccgagtcggggcggcatcgtgctggtgcctctggccccgtggagtggagcaggcagataccgttaagcgctgtgctaccgggccccaggcccagccacccggtacctcccgagaggctgtccctggaccctggctggcatggaaatacagtgggaaaaccagtcgggacctttaataaaagaccttggctttcta

SEQ ID NO: 295532 - DNA, 997 bp, Homo sapiens
agcagcgctccctccgcttccggccgagcccgcgccccccagaccccgagagctcgcagctccggcccggcggcgatggcgcggagcgtgcgcgtgctggtggacatggacggcgtcctggccgacttcgaggccggcctcctgcggggcttccgccgccgcttccctgaggagccgcacgtgccgctggagcagcgccgcggcttcctggcccgcgagcagtaccgcgccctgcggcccgacctggcggataaagtggccagtgtgtacgaagccccgggctttttcctggacctggagcccatcccgggagccttggacgctgtgcgggagatgaacgacctaccggaccccctgctgaagtaccaccactgtgtgggtgagaaggtgtggctgccccgcccctactccgcacgtggagctgcctaaatcctgattttaaaaagaaaccaccagaaacccagaagtaccgctgggtggagcagcacctggggccccagttcgtagaacgaattatcctgacaagggacaagacggtggtcttgggggacctgctcattgatgacaaggacacagttcgaggccaggaggagaccccaagctgggagcacatcttgttcacctgctgccacaatcggcacctggtcctgcccccgacaaggagacggctgctctcctggagtgacaactggagggagatcttagatagcaagcgcggagctgcgcagcgggaatgagcggggatgccgcgggcagcagctggagctaaaggaagggcaggcccacaggggccaccgcagagccgagtcggggcggcatcgtgctggtgcctctggccccgtggagtggagcaggcagataccgttaagcgctgtgctaccgggccccaggcccagccacccggtacctcccgagaggctgtccctggaccctggctggcatggaaatacagtgggaaaaccagtcgggacctttaataaaagaccttggctttcta

SEQ ID NO: 295533 - DNA, 906 bp, Homo sapiens
agcagcgctccctccgcttccggccgagcccgcgccccccagaccccgagagctcgcagctccggcccggcggcgatggcgcggagcgtgcgcgtgctggtggacatggacggcgtcctggccgacttcgaggccggcctcctgcggggcttccgccgccgcttccctgaggagccgcacgtgccgctggagcagcgccgcggcttcctggcccgcgagcagtaccgcgccctgcggcccgacctggcggataaagtggccagtgtgtacgaagccccgggctttttcctggacctggagcccatcccgggagccttggacgctgtgcgggagatgaacgacctaccggacacgcaggtcttcatctgcaccagccccctgctgaagtaccaccactgtgtgggtgagaagtaccgctgggtggagcagcacctggggccccagttcgtagaacgaattatcctgacaagggacaagacggtggtcttgggggacctgctcattgatgacaaggacacagttcgaggccaggaggagaccccaagctgggagcacatcttgttcacctgctgccacaatcggcacctggagtgacaactggagggagatcttagatagcaagcgcggagctgcgcagcgggaatgagcggggatgccgcgggcagcagctggagctaaaggaagggcaggcccacaggggccaccgcagagccgagtcggggcggcatcgtgctggtgcctctggccccgtggagtggagcaggcagataccgttaagcgctgtgctaccgggccccaggcccagccacccggtacctcccgagaggctgtccctggaccctggctggcatggaaatacagtgggaaaaccagtcgggacctttaataaaagaccttggctttcta

SEQ ID NO: 295534 - DNA, 1096 bp, Homo sapiens
agcagcgctccctccgcttccggccgagcccgcgccccccagaccccgagagctcgcagctccggcccggcggcgatggcgcggagcgtgcgcgtgctggtggacatggacggcgtcctggccgacttcgaggccggcctcctgcggggcttccgccgccgcttccctgaggagccgcacgtgccgctggagcagcgccgcggcttcctggcccgcgagcagtaccgcgccctgcggcccgacctggcggataaagtggccagtgtgtacgaagccccgggctttttcctggacctggagcccatcccgggagccttggacgctgtgcgggagatgaacgacctaccggagtaaggagagaggggggcgggcggagtcctgggcgggctcctggctcccggcggtaacggcgtccttctccgcagcacgcaggtcttcatctgcaccagccccctgctgaagtaccaccactgtgtgggtgagaaggtgtggctgccccgcccctactccgcacgtggagctgcctaaatcctgattttaaaaagaaaccaccagaaacccagaagtaccgctgggtggagcagcacctggggccccagttcgtagaacgaattatcctgacaagggacaagacggtggtcttgggggacctgctcattgatgacaaggacacagttcgaggccaggaggagaccccaagctgggagcacatcttgttcacctgctgccacaatcggcacctggtcctgcccccgacaaggagacggctgctctcctggagtgacaactggagggagatcttagatagcaagcgcggagctgcgcagcgggaatgagcggggatgccgcgggcagcagctggagctaaaggaagggcaggcccacaggggccaccgcagagccgagtcggggcggcatcgtgctggtgcctctggccccgtggagtggagcaggcagataccgttaagcgctgtgctaccgggccccaggcccagccacccggtacctcccgagaggctgtccctggaccctggctggcatggaaatacagtgggaaaaccagtcgggacctttaataaaagaccttggctttcta

SEQ ID NO: 295535 - DNA, 1348 bp, Homo sapiens
agcagcgctccctccgcttccggccgagcccgcgccccccagaccccgagagctcgcagctccggcccggcggcgatggcgcggagcgtgcgcgtgctggtggacatggacggcgtcctggccgacttcgaggccggcctcctgcggggcttccgccgccgcttccctgaggagccgcacgtgccgctggagcagcgccgcggcttcctggcccgcgagcagtaccgcgccctgcggcccgacctggcggtagggggcgcagggtccccacccgggcagggcccgctcgctccgttccgggggtctcccccttctctgtgaagggcgcagagctctcaccctggaacccgcgggcagcgcaccctggggaggagcctttgggcgcgtgcccctgaccgacgccccctccgcccctctgagctcgggcccggagcccccaggagcctccctgcgggtcctcgcgggaacgggaagccgggacccagaactcttgtctttcaggataaagtggccagtgtgtacgaagccccgggctttttcctggacctggagcccatcccgggagccttggacgctgtgcgggagatgaacgacctaccggagtaaggagagaggggggcgggcggagtcctgggcgggctcctggctcccggcggtaacggcgtccttctccgcagcacgcaggtcttcatctgcaccagccccctgctgaagtaccaccactgtgtgggtgagaaggtgtggctgccccgcccctactccgcacgtggagctgcctaaatcctgattttaaaaagaaaccaccagaaacccagaagtaccgctgggtggagcagcacctggggccccagttcgtagaacgaattatcctgacaagggacaagacggtggtcttgggggacctgctcattgatgacaaggacacagttcgaggccaggaggagaccccaagctgggagcacatcttgttcacctgctgccacaatcggcacctggtcctgcccccgacaaggagacggctgctctcctggagtgacaactggagggagatcttagatagcaagcgcggagctgcgcagcgggaatgagcggggatgccgcgggcagcagctggagctaaaggaagggcaggcccacaggggccaccgcagagccgagtcggggcggcatcgtgctggtgcctctggccccgtggagtggagcaggcagataccgttaagcgctgtgctaccgggccccaggcccagccacccggtacctcccgagaggctgtccctggaccctggctggcatggaaatacagtgggaaaaccagtcgggacctttaataaaagaccttggctttcta

SEQ ID NO: 295536 - DNA, 1445 bp, Homo sapiens
agcagcgctccctccgcttccggccgagcccgcgccccccagaccccgagagctcgcagctccggcccggcggcgatggcgcggagcgtgcgcgtgctggtggacatggacggcgtcctggccgacttcgaggccggcctcctgcggggcttccgccgccgcttccctgaggagccgcacgtgccgctggagcagcgccgcggcttcctggcccgcgagcagtaccgcgccctgcggcccgacctggcggtagggggcgcagggtccccacccgggcagggcccgctcgctccgttccgggggtctcccccttctctgtgaagggcgcagagctctcaccctggaacccgcgggcagcgcaccctggggaggagcctttgggcgcgtgcccctgaccgacgccccctccgcccctctgagctcgggcccggagcccccaggagcctccctgcgggtcctcgcgggaacgggaagccgggacccagaactcttgtctttcaggataaagtggccagtgtgtacgaagccccgggctttttcctggacctggagcccatcccgggagccttggacgctgtgcgggagatgaacgacctaccggagtaaggagagaggggggcgggcggagtcctgggcgggctcctggctcccggcggtaacggcgtccttctccgcagcacgcaggtcttcatctgcaccagccccctgctgaagtaccaccactgtgtgggtgagaaggtgtggctgccccgcccctactccgcacgtggagctgcctaaatcctgattttaaaaagaaaccaccagaaacccagaaggtgggggtggggggctctcaagggcttagagccaactccctatccctgaattccggcttccatcaggccctactcacagactgtgttttctacacagtaccgctgggtggagcagcacctggggccccagttcgtagaacgaattatcctgacaagggacaagacggtggtcttgggggacctgctcattgatgacaaggacacagttcgaggccaggaggagaccccaagctgggagcacatcttgttcacctgctgccacaatcggcacctggtcctgcccccgacaaggagacggctgctctcctggagtgacaactggagggagatcttagatagcaagcgcggagctgcgcagcgggaatgagcggggatgccgcgggcagcagctggagctaaaggaagggcaggcccacaggggccaccgcagagccgagtcggggcggcatcgtgctggtgcctctggccccgtggagtggagcaggcagataccgttaagcgctgtgctaccgggccccaggcccagccacccggtacctcccgagaggctgtccctggaccctggctggcatggaaatacagtgggaaaaccagtcgggacctttaataaaagaccttggctttcta

SEQ ID NO: 295537 - DNA, 1016 bp, Homo sapiens
agcagcgctccctccgcttccggccgagcccgcgccccccagaccccgagagctcgcagctccggcccggcggcgatggcgcggagcgtgcgcgtgctggtggacatggacggcgtcctggccgacttcgaggccggcctcctgcggggcttccgccgccgcttccctgaggagccgcacgtgccgctggagcagcgccgcggcttcctggcccgcgagcagtaccgcgccctgcggcccgacctggcggataaagtggccagtgtgtacgaagccccgggctttttcctggacctggagcccatcccgggagccttggacgctgtgcgggagatgaacgacctaccggagtaaggagagaggggggcgggcggagtcctgggcgggctcctggctcccggcggtaacggcgtccttctccgcagcacgcaggtcttcatctgcaccagccccctgctgaagtaccaccactgtgtgggtgagaagtaccgctgggtggagcagcacctggggccccagttcgtagaacgaattatcctgacaagggacaagacggtggtcttgggggacctgctcattgatgacaaggacacagttcgaggccaggaggagaccccaagctgggagcacatcttgttcacctgctgccacaatcggcacctggtcctgcccccgacaaggagacggctgctctcctggagtgacaactggagggagatcttagatagcaagcgcggagctgcgcagcgggaatgagcggggatgccgcgggcagcagctggagctaaaggaagggcaggcccacaggggccaccgcagagccgagtcggggcggcatcgtgctggtgcctctggccccgtggagtggagcaggcagataccgttaagcgctgtgctaccgggccccaggcccagccacccggtacctcccgagaggctgtccctggaccctggctggcatggaaatacagtgggaaaaccagtcgggacctttaataaaagaccttggctttcta

SEQ ID NO: 295538 - DNA, 1268 bp, Homo sapiens
agcagcgctccctccgcttccggccgagcccgcgccccccagaccccgagagctcgcagctccggcccggcggcgatggcgcggagcgtgcgcgtgctggtggacatggacggcgtcctggccgacttcgaggccggcctcctgcggggcttccgccgccgcttccctgaggagccgcacgtgccgctggagcagcgccgcggcttcctggcccgcgagcagtaccgcgccctgcggcccgacctggcggtagggggcgcagggtccccacccgggcagggcccgctcgctccgttccgggggtctcccccttctctgtgaagggcgcagagctctcaccctggaacccgcgggcagcgcaccctggggaggagcctttgggcgcgtgcccctgaccgacgccccctccgcccctctgagctcgggcccggagcccccaggagcctccctgcgggtcctcgcgggaacgggaagccgggacccagaactcttgtctttcaggataaagtggccagtgtgtacgaagccccgggctttttcctggacctggagcccatcccgggagccttggacgctgtgcgggagatgaacgacctaccggagtaaggagagaggggggcgggcggagtcctgggcgggctcctggctcccggcggtaacggcgtccttctccgcagcacgcaggtcttcatctgcaccagccccctgctgaagtaccaccactgtgtgggtgagaagtaccgctgggtggagcagcacctggggccccagttcgtagaacgaattatcctgacaagggacaagacggtggtcttgggggacctgctcattgatgacaaggacacagttcgaggccaggaggagaccccaagctgggagcacatcttgttcacctgctgccacaatcggcacctggtcctgcccccgacaaggagacggctgctctcctggagtgacaactggagggagatcttagatagcaagcgcggagctgcgcagcgggaatgagcggggatgccgcgggcagcagctggagctaaaggaagggcaggcccacaggggccaccgcagagccgagtcggggcggcatcgtgctggtgcctctggccccgtggagtggagcaggcagataccgttaagcgctgtgctaccgggccccaggcccagccacccggtacctcccgagaggctgtccctggaccctggctggcatggaaatacagtgggaaaaccagtcgggacctttaataaaagaccttggctttcta

SEQ ID NO: 295539 - DNA, 1273 bp, Homo sapiens
agcagcgctccctccgcttccggccgagcccgcgccccccagaccccgagagctcgcagctccggcccggcggcgatggcgcggagcgtgcgcgtgctggtggacatggacggcgtcctggccgacttcgaggccggcctcctgcggggcttccgccgccgcttccctgaggagccgcacgtgccgctggagcagcgccgcggcttcctggcccgcgagcagtaccgcgccctgcggcccgacctggcggtagggggcgcagggtccccacccgggcagggcccgctcgctccgttccgggggtctcccccttctctgtgaagggcgcagagctctcaccctggaacccgcgggcagcgcaccctggggaggagcctttgggcgcgtgcccctgaccgacgccccctccgcccctctgagctcgggcccggagcccccaggagcctccctgcgggtcctcgcgggaacgggaagccgggacccagaactcttgtctttcaggataaagtggccagtgtgtacgaagccccgggctttttcctggacctggagcccatcccgggagccttggacgctgtgcgggagatgaacgacctaccggacacgcaggtcttcatctgcaccagccccctgctgaagtaccaccactgtgtgggtgagaaggtgtggctgccccgcccctactccgcacgtggagctgcctaaatcctgattttaaaaagaaaccaccagaaacccagaagtaccgctgggtggagcagcacctggggccccagttcgtagaacgaattatcctgacaagggacaagacggtggtcttgggggacctgctcattgatgacaaggacacagttcgaggccaggaggagaccccaagctgggagcacatcttgttcacctgctgccacaatcggcacctggtcctgcccccgacaaggagacggctgctctcctggagtgacaactggagggagatcttagatagcaagcgcggagctgcgcagcgggaatgagcggggatgccgcgggcagcagctggagctaaaggaagggcaggcccacaggggccaccgcagagccgagtcggggcggcatcgtgctggtgcctctggccccgtggagtggagcaggcagataccgttaagcgctgtgctaccgggccccaggcccagccacccggtacctcccgagaggctgtccctggaccctggctggcatggaaatacagtgggaaaaccagtcgggacctttaataaaagaccttggctttcta

SEQ ID NO: 295540 - DNA, 826 bp, Homo sapiens
agcagcgctccctccgcttccggccgagcccgcgccccccagaccccgagagctcgcagctccggcccggcggcgatggcgcggagcgtgcgcgtgctggtggacatggacggcgtcctggccgacttcgaggccggcctcctgcggggcttccgccgccgcttccctgaggagccgcacgtgccgctggagcagcgccgcggcttcctggcccgcgagcagtaccgcgccctgcggcccgacctggcggataaagtggccagtgtgtacgaagccccgggctttttcctggacctggagcccatcccgggagccttggacgctgtgcgggagatgaacgacctaccggacacgcaggtcttcatctgcaccagccccctgctgaagtaccaccactgtgtgggtgagaaggccaggaggagaccccaagctgggagcacatcttgttcacctgctgccacaatcggcacctggtcctgcccccgacaaggagacggctgctctcctggagtgacaactggagggagatcttagatagcaagcgcggagctgcgcagcgggaatgagcggggatgccgcgggcagcagctggagctaaaggaagggcaggcccacaggggccaccgcagagccgagtcggggcggcatcgtgctggtgcctctggccccgtggagtggagcaggcagataccgttaagcgctgtgctaccgggccccaggcccagccacccggtacctcccgagaggctgtccctggaccctggctggcatggaaatacagtgggaaaaccagtcgggacctttaataaaagaccttggctttcta

SEQ ID NO: 295541 - DNA, 1274 bp, Homo sapiens
  misc_feature (945)..(945): n is a, c, g, or t
agcagcgctccctccgcttccggccgagcccgcgccccccagaccccgagagctcgcagctccggcccggcggcgatggcgcggagcgtgcgcgtgctggtggacatggacggcgtcctggccgacttcgaggccggcctcctgcggggcttccgccgccgcttccctgaggagccgcacgtgccgctggagcagcgccgcggcttcctggcccgcgagcagtaccgcgccctgcggcccgacctggcggataaagtggccagtgtgtacgaagccccgggctttttcctggacctggagcccatcccgggagccttggacgctgtgcgggagatgaacgacctaccggacacgcaggtcttcatctgcaccagccccctgctgaagtaccaccactgtgtgggtgagaagtaccgctgggtggagcagcacctggggccccagttcgtagaacgaattatcctgacaagggacaagacggtggtcttgggggacctgctcattgatgacaaggacacagttcgaggccaggaggagaccccaagctgggagcacatcttgttcacctgctgccacaatcggcacctggtcctgcccccgacaaggagacggctgctctcctggagtgacaactggagggagatcttagatagcaagcgcggagctgcgcagcgggaatgagcggggatgccgcgggcagcagctggagctaaaggaagggcaggcccacaggggccaccgcagagccgagtcggggcggcatcgtgctggtgcctctggccccgtggagtggagcaggcagataccgttaagcgctgtgctaccgggccccaggcccagccacccggtacctcccgagaggctgtccctggaccctggctggcatggaaatacagtgggaaaaccagtcgggacctttaataaaagaccttggctttctaaaanaaaaaaaaaaaaaaaaaaaaaaaaaaaaaaaaaaaaaaaaaaaaaaaaaaaacaaaaacaaaagaaaaaaagaaaaaagaaaaaaaaaaaagagggggggggcccagaaaaaaccagaggggacaccaagaaaagaccatcgcacactatccaagaagggcgcaccaaaggggggacgaagaaaagaaaggagggcggggcgggccaaacacagagaggaagggcggagacaaaggccgcgccggcctatagggagagcgcacaacaactggcgggagaggaacaagaggggaaaccaacaccgcaagaaaaggaagcgggggaagcac

SEQ ID NO: 295542 - DNA, 998 bp, Homo sapiens
agcagcgctccctccgcttccggccgagcccgcgccccccagaccccgagagctcgcagctccggcccggcggcgatggcgcggagcgtgcgcgtgctggtggacatggacggcgtcctggccgacttcgaggccggcctcctgcggggcttccgccgccgcttccctgaggagccgcacgtgccgctggagcagcgccgcggcttcctggcccgcgagcagtaccgcgccctgcggcccgacctggcggataaagtggccagtgtgtacgaagccccgggctttttcctggacctggagcccatcccgggagccttggacgctgtgcgggagatgaacgacctaccggacacgcaggtcttcatctgcaccagccccctgctgaagtaccaccactgtgtgggtgagaagtaccgctgggtggagcagcacctggggccccagttcgtagaacgaattatcctgacaagggacaagacggtggtcttgggggacctgctcattgatgacaaggacacagttcgaggccaggaggagaccccaagctgggagcacatcttgttcacctgctgccacaatcggcacctggtcctgcccccgacaaggagacggctgctctcctggagtgacaactggagggagatcttagatagcaagcgcggagctgcgcagcgggaatgagcggggatgccgcgggcagcagctggagctaaaggaagggcaggcccacaggggccaccgcagagccgagtcggggcggcatcgtgctggtgcctctggccccgtggagtggagcaggcagataccgttaagcgctgtgctaccgggccccaggcccagccacccggtacctcccgagaggctgtccctggaccctggctggcatggaaatacagtgggaaaaccagtcgggacctttaataaaagaccttggctttctaataaaaagaaaacaaacacacttgacacgtgaatctagcaataaaaaacacaaagaa

SEQ ID NO: 295543 - DNA, 1020 bp, Homo sapiens
agcagcgctccctccgcttccggccgagcccgcgccccccagaccccgagagctcgcagctccggcccggcggcgatggcgcggagcgtgcgcgtgctggtggacatggacggcgtcctggccgacttcgaggccggcctcctgcggggcttccgccgccgcttccctgaggagccgcacgtgccgctggagcagcgccgcggcttcctggcccgcgagcagtaccgcgccctgcggcccgacctggcggataaagtggccagtgtgtacgaagccccgggctttttcctggacctggagcccatcccgggagccttggacgctgtgcgggagatgaacgacctaccggagtaaggagagaggggggcgggcggagtcctgggcgggctcctggctcccggcggtaacggcgtccttctccgcagcacgcaggtcttcatctgcaccagccccctgctgaagtaccaccactgtgtgggtgagaaggtgtggctgccccgcccctactccgcacgtggagctgcctaaatcctgattttaaaaagaaaccaccagaaacccagaagtaccgctgggtggagcagcacctggggccccagttcgtagaacgaattatcctgacaagggacaagacggtggtcttgggggacctgctcattgatgacaaggacacagttcgaggccaggaggagaccccaagctgggagcacatcttgttcacctgctgccacaatcggcacctggtcctgcccccgacaaggagacggctgctctcctggagtgacaactggagggagatcttagatagcaagcgccaccgcagagccgagtcggggcggcatcgtgctggtgcctctggccccgtggagtggagcaggcagataccgttaagcgctgtgctaccgggccccaggcccagccacccggtacctcccgagaggctgtccctggaccctggctggcatggaaatacagtgggaaaaccagtcgggacctttaataaaagaccttggctttcta

SEQ ID NO: 295544 - DNA, 1307 bp, Homo sapiens
agcagcgctccctccgcttccggccgagcccgcgccccccagaccccgagagctcgcagctccggcccggcggcgatggcgcggagcgtgcgcgtgctggtggacatggacggcgtcctggccgacttcgaggccggcctcctgcggggcttccgccgccgcttccctgaggagccgcacgtgccgctggagcagcgccgcggcttcctggcccgcgagcagtaccgcgccctgcggcccgacctggcggtagggggcgcagggtccccacccgggcagggcccgctcgctccgttccgggggtctcccccttctctgtgaagggcgcagagctctcaccctggaacccgcgggcagcgcaccctggggaggagcctttgggcgcgtgcccctgaccgacgccccctccgcccctctgagctcgggcccggagcccccaggagcctccctgcgggtcctcgcgggaacgggaagccgggacccagaactcttgtctttcaggataaagtggccagtgtgtacgaagccccgggctttttcctggacctggagcccatcccgggagccttggacgctgtgcgggagatgaacgacctaccggacacgcaggtcttcatctgcaccagccccctgctgaagtaccaccactgtgtgggtgagaaggtgtggctgccccgcccctactccgcacgtggagctgcctaaatcctgattttaaaaagaaaccaccagaaacccagaagtaccgctgggtggagcagcacctggggccccagttcgtagaacgaattatcctgacaagggacaagacggtggtcttgggggacctgctcattgatgacaaggacacagttcgaggttggacccgttatccttggcagcctccaggcctctggcctgcccggattagggagagggagtaataatacccatgacagatggcagcgcgctgtctttcactgtcctaggccaggaggagaccccaagctgggagcacatcttgttcacctgctgccacaatcggcacctggtcctgcccccgacaaggagacggctgctctcctggagtgacaactggagggagatcttagatagcaagcgccaccgcagagccgagtcggggcggcatcgtgctggtgcctctggccccgtggagtggagcaggcagataccgttaagcgctgtgctaccgggccccaggcccagccacccggtacctcccgagaggctgtccctggaccctggctggcatggaaatacagtgggaaaaccagtcgggacctttaataaaagaccttggctttcta

SEQ ID NO: 295545 - DNA, 883 bp, Homo sapiens
agcagcgctccctccgcttccggccgagcccgcgccccccagaccccgagagctcgcagctccggcccggcggcgatggcgcggagcgtgcgcgtgctggtggacatggacggcgtcctggccgacttcgaggccggcctcctgcggggcttccgccgccgcttccctgaggagccgcacgtgccgctggagcagcgccgcggcttcctggcccgcgagcagtaccgcgccctgcggcccgacctggcggataaagtggccagtgtgtacgaagccccgggctttttcctggacctggagcccatcccgggagccttggacgctgtgcgggagatgaacgacctaccggacacgcaggtcttcatctgcaccagccccctgctgaagtaccaccactgtgtgggtgagaaggccaggaggagaccccaagctgggagcacatcttgttcacctgctgccacaatcggcacctggtcctgcccccgacaaggagacggctgctctcctggagtgacaactggagggagatcttagatagcaagcgcggagctgcgcagcgggaatgagcggggatgccgcgggcagcagctggagctaaaggaagggcaggcccacaggggccaccgcagagccgagtcggggcggcatcgtgctggtgcctctggccccgtggagtggagcaggcagataccgttaagcgctgtgctaccgggccccaggcccagccacccggtacctcccgagaggctgtccctggaccctggctggcatggaaatacagtgggaaaaccagtcgggacctttaataaaagaccttggctttctaataaaaagaaaacaaacacacttgacacgtgaatctagcaataaaaaacacaaagaa

SEQ ID NO: 295546 - DNA, 1083 bp, Homo sapiens
agcagcgctccctccgcttccggccgagcccgcgccccccagaccccgagagctcgcagctccggcccggcggcgatggcgcggagcgtgcgcgtgctggtggacatggacggcgtcctggccgacttcgaggccggcctcctgcggggcttccgccgccgcttccctgaggagccgcacgtgccgctggagcagcgccgcggcttcctggcccgcgagcagtaccgcgccctgcggcccgacctggcggtagggggcgcagggtccccacccgggcagggcccgctcgctccgttccgggggtctcccccttctctgtgaagggcgcagagctctcaccctggaacccgcgggcagcgcaccctggggaggagcctttgggcgcgtgcccctgaccgacgccccctccgcccctctgagctcgggcccggagcccccaggagcctccctgcgggtcctcgcgggaacgggaagccgggacccagaactcttgtctttcaggataaagtggccagtgtgtacgaagccccgggctttttcctggacctggagcccatcccgggagccttggacgctgtgcgggagatgaacgacctaccggagtaaggagagaggggggcgggcggagtcctgggcgggctcctggctcccggcggtaacggcgtccttctccgcagcacgcaggtcttcatctgcaccagccccctgctgaagtaccaccactgtgtgggtgagaaggtgtggctgccccgcccctactccgcacgtggagctgcctaaatcctgattttaaaaagaaaccaccagaaacccagaagtaccgctgggtggagcagcacctggggccccagttcgtagaacgaattatcctgacaagccaccgcagagccgagtcggggcggcatcgtgctggtgcctctggccccgtggagtggagcaggcagataccgttaagcgctgtgctaccgggccccaggcccagccacccggtacctcccgagaggctgtccctggaccctggctggcatggaaatacagtgggaaaaccagtcgggacctttaataaaagaccttggctttcta

SEQ ID NO: 295547 - DNA, 643 bp, Homo sapiens
agcagcgctccctccgcttccggccgagcccgcgccccccagaccccgagagctcgcagctccggcccggcggcgatggcgcggagcgtgcgcgtgctggtggacatggacggcgtcctggccgacttcgaggccggcctcctgcggggcttccgccgccgcttccctgaggagccgcacgtgccgctggagcagcgccgcggcttcctggcccgcgagcagtaccgcgccctgcggcccgacctggcggataaagtggccagtgtgtacgaagccccgggctttttcctggacctggagcccatcccgggagccttggacgctgtgcgggagatgaacgacctaccggacacgcaggtcttcatctgcaccagccccctgctgaagtaccaccactgtgtgggtgagaagtaccgctgggtggagcagcacctgggccaccgcagagccgagtcggggcggcatcgtgctggtgcctctggccccgtggagtggagcaggcagataccgttaagcgctgtgctaccgggccccaggcccagccacccggtacctcccgagaggctgtccctggaccctggctggcatggaaatacagtgggaaaaccagtcgggacctttaataaaagaccttggctttcta

SEQ ID NO: 295548 - DNA, 969 bp, Homo sapiens
agcagcgctccctccgcttccggccgagcccgcgccccccagaccccgagagctcgcagctccggcccggcggcgatggcgcggagcgtgcgcgtgctggtggacatggacggcgtcctggccgacttcgaggccggcctcctgcggggcttccgccgccgcttccctgaggagccgcacgtgccgctggagcagcgccgcggcttcctggcccgcgagcagtaccgcgccctgcggcccgacctggcggtagggggcgcagggtccccacccgggcagggcccgctcgctccgttccgggggtctcccccttctctgtgaagggcgcagagctctcaccctggaacccgcgggcagcgcaccctggggaggagcctttgggcgcgtgcccctgaccgacgccccctccgcccctctgagctcgggcccggagcccccaggagcctccctgcgggtcctcgcgggaacgggaagccgggacccagaactcttgtctttcaggataaagtggccagtgtgtacgaagccccgggctttttcctggacctggagcccatcccgggagccttggacgctgtgcgggagatgaacgacctaccggagtaaggagagaggggggcgggcggagtcctgggcgggctcctggctcccggcggtaacggcgtccttctccgcagcacgcaggtcttcatctgcaccagccccctgctgaagtaccaccactgtgtgggtgagaaggtgtggctgccccgcccctactccgcacgtggagctgcctaaatcctgattttaaaaagaaaccaccagaaacccagaaggtgggggtggggggctctcaagggcttagagccaactcccccaggcccagccacccggtacctcccgagaggctgtccctggaccctggctggcatggaaatacagtgggaaaaccagtcgggacctttaataaaagaccttggctttcta

SEQ ID NO: 295549 - DNA, 649 bp, Homo sapiens
agcagcgctccctccgcttccggccgagcccgcgccccccagaccccgagagctcgcagctccggcccggcggcgatggcgcggagcgtgcgcgtgctggtggacatggacggcgtcctggccgacttcgaggccggcctcctgcggggcttccgccgccgcttccctgaggagccgcacgtgccgctggagcagcgccgcggcttcctggcccgcgagcagtaccgcgccctgcggcccgacctggcggataaagtggccagtgtgtacgaagccccgggctttttcctggacctggagcccatcccgggagccttggacgctgtgcgggagatgaacgacctaccggacacgcaggtcttcatctgcaccagccccctgctgaagtaccaccactgtgtgggtgagaagctggagctaaaggaagggcaggcccacaggggccaccgcagagccgagtcggggcggcatcgtgctggtgcctctggccccgtggagtggagcaggcagataccgttaagcgctgtgctaccgggccccaggcccagccacccggtacctcccgagaggctgtccctggaccctggctggcatggaaatacagtgggaaaaccagtcgggacctttaataaaagaccttggctttcta

SEQ ID NO: 295550 - DNA, 507 bp, Homo sapiens
ttcagtgaaaactttttgaagaatatatttactatttattgacaccaagacccaggtagtgcttagatctttacccctactctggtgcttcttctttcccaagtattagggaacacaaaccaaactcctgggtttagatgacaaaaggaatttagaactttgaaatccaagtctaattaaaatgtctgaactgttctggaaggaggaagaagagacatagagaagaaaggtgtcaaacgacaaattattattattattattattattattattgctgtttatttatttttgagacagggtcttgctctgtcacccaggctagagtgcagtggcgtaatcacagctcactgcagccttgacctcctgggctcaagtaatcctcccatctcattctcctgagtaccttggactaaaggcaggtgctaccacacctggctaatttttttttatttttagtagagacgtgatctcgctatgttgcccaggctggtctagaactcgctctca

SEQ ID NO: 295551 - DNA, 448 bp, Homo sapiens
ccagaaaagggtccatccacaaggagagaaacgtggaaagggcagaggcttcaccctacctttacagccacacttcttgcaggtagtgttcaagacagcctcaagggtgatcttctgcccagtgtaatcctggaaggatcgcctccgcctctcttcttgcctataatgaaaaagataccgactgccggcccccttaagagatatggccagagatactacaaggatgacatatgagttcgatggaccagacctgggcacaagaagaagaaataacgtaaagcagagggcatatctggtatttatactctaaactggataagaaggtagctctctcctggataaacatgaccagtctagaagcgttagcagtgaaaaactggaaacaacttaaaatgattatgtggtacatctgaatgacagaataaagccattaaatgtttatagaaaa

SEQ ID NO: 295552 - DNA, 350 bp, Homo sapiens
agtagcttacttagcctcgatgtttaatactgaccacgttataccgtgagctgataaggctattcttgagctcttaccttttcccgtggtttacaaatacgcttatgtttttgataactttttttgtagctctggtattatggagaacatttgtttatgctacatggaaaatctctaactgtgattccatacaagtgtgaagtgtcatcattagcaggtgctcttggaaaactcaagcatagtcaagatccaggtagaaacttacttctgtttgttttattaatacaaaccgttttattaacttgtagtttcgtacagattcccacagccttctatttgtaaagcttttt

SEQ ID NO: 295553 - DNA, 2547 bp, Homo sapiens
agcgggccgggagtgagcgcggccgtacttaggtttgctcaaaatggcagcgctggaggaagaattcacgttgtcttcggtagtcctgagcgccgggcctgaaggactcctaggcgtggagcagagcgacaaaacagaccagtttctagtgacagacagcggcaggacagtcatcctctataaggtttctgatcagaaacccttggggagctggtcagtgaaacaaggtcaaattataacatgtccagctgtgtgcaactttcaaactggagagtatgttgttgtacacgataataaggttttaagaatatggaataatgaagatgtaaacctggataaagtatttaaagctacattgtcagcagaagtatataggatactttcagtgcaagggacagaacccttggtgctcttcaaggaaggtgctgttcgtggtttagaggccttgcttgcagacccccagcagaaaattgaaactgttatctctgatgaagaagtgattaaatggacaaagtttttcgtagtattcagacatcctgttttaatttttattactgaaaaacatggaaattactttgcttacgtgcaaatgtttaactcacgtatcttaaccaaatatacactcttacttggacaagacgaaaactctgttataaagagttttactgcatctgtagatcggaaattcatctctttgatgtcattaagctctgatggttgtatatatgaaaccttgataccaatacgtccagctgacccagaaaaaaatcagagcttagttaaatcactgctgctcaaggctgttgtatctggtaacgctcgaaatggagttgcactcactgccctggatcaggatcacgtcgcagtcctaggaagtccactagcagcttctaaggaatgcctctctgtatggaacataaaatttcaaacactacagacttcaaaagagttaccacaagggaccagtggtcaactctggtattatggagaacatttgtttatgctacatggaaaatctctaactgtgattccatacaagtgtgaagtgtcatcattagcaggtgctcttggaaaactcaagcatagtcaagatccaggaactcatgtcgtgtcccattttgtaaactgggagacacctcaaggatgtggacttgggttccagaactcagagcagtcaagaagaattttaaggagacgaaaaattgaagtgagtttacagccagaggttccaccatccaaacaacttttgtcaaccataatgaaagattcagaaaaacacattgaagtagaagtacggaaatttttggctctgaagcagacacctgactttcatactgtcattggggacacagtaacaggacttctggaaaggtgtaaagcagaaccatcattttatccccggaactgtctgatgcagcttatccaaacgcatgtgctttcttacagtttgtgccccgacttaatggagattgccttaaaaaagaaagatgtacagttgttacaactctgtctacagcagttccctgacattcctgaatcagtcacctgtgcttgcttaaaaattttcttgagcattggtgatgacagtcttcaagaaacagatgttaatatggagtcagtttttgactatagtataaattctgtacatgatgagaaaatggaagagcaaactgaaattcttcaaaatggcttcaatcctgaagaagataaatgcaataactgtgatcaagagttaaataaaaagccccaggacgaaacaaaggagagcacttcatgccctgtggtacaaaaaagagcagctctacttaatgcaattcttcattcagcatatagcgagacatttcttctgcctcatttgaaagacatcccagcacagcatatcacgctgtttcttaagtatttgtatttcctgtacctgaagtgtagcgaaaatgctactatgactcttcctggaatacacccacctaccttgaaccagattatggattggatatgtctacttctggatgcgaattttactgttgttgtaatgatgccagaagcaaagaggctactgataaatctttacaagcttgtaaaatctcagatatctgtttattctgagctcaacaagattgaagtaagttttcgggagctacagaaattaaatcaagaaaagaataatagaggattatattcaattgaagtgctggagctcttctgatattatcaattctccttcatagacattttataaagctcttttatgtgaactcttgcttcatccaggcaagaacggtgttttgtttgcgaccatctcagtgtcaagagaaacgtgtcagtgagtacctggaccatcacttaactgatgctccggggtaggactgcaggtttcacatgaacctgttctaggctgtggacattggtgtggagaggttctgcaattttttaaaaatatgtaactgggttgattttaagtaaaattatttgtgtattgataaaagtctaatttcttatcatgtgttttgaattttttcttttaataaaaaatgaccattgaagcagtga

SEQ ID NO: 295554 - DNA, 2581 bp, Homo sapiens
agcgggccgggagtgagcgcggccgtacttaggtttgctcaaaatggcagcgctggaggaagaattcacgttgtcttcggtagtcctgagcgccgggcctgaaggactcctaggcgtggagcagagcgacaaaacagaccagtttctagtgacagacagcggcaggacagtcatcctctataaggtttctgatcagaaacccttggggagctggtcagtgaaacaaggtcaaattataacatgtccagctgtgtgcaactttcaaactggagagtatgttgttgtacacgataataaggttttaagaatatggaataatgaagatgtaaacctggataaagtatttaaagctacattgtcagcagaagtatataggatactttcagtgcaagggacagaacccttggtgctcttcaaggaaggtgctgttcgtggtttagaggccttgcttgcagacccccagcagaaaattgaaactgttatctctgatgaagaagtgattaaatggacaaagtttttcgtagtattcagacatcctgttttaatttttattactgaaaaacatggaaattactttgcttacgtgcaaatgtttaactcacgtatcttaaccaaatatacactcttacttggacaagacgaaaactctgttataaagagttttactgcatctgtagatcggaaattcatctctttgatgtcattaagctctgatggttgtatatatgaaaccttgataccaatacgtccagctgacccagaaaaaaatcagagcttagttaaatcactgctgctcaaggctgttgtatctggtaacgctcgaaatggagttgcactcactgccctggatcaggatcacgtcgcagtcctaggaagtccactagcagcttctaaggaatgcctctctgtatggaacataaaatttcaaacactacagacttcaaaagagttaccacaagggaccagtggtcaactctggtattatggagaacatttgtttatgctacatggaaaatctctaactgtgattccatacaagtgtgaagtgtcatcattagcaggtgctcttggaaaactcaagcatagtcaagatccaggaactcatgtcgtgtcccattttgtaaactgggagacacctcaaggatgtggacttgggttccagaactcagagcagtcaagaagaattttaaggagacgaaaaattgaagtgagtttacagccagaggttccaccatccaaacaacttttgtcaaccataatgaaagattcagaaaaacacattgaagtagaagtacggaaatttttggctctgaagcagacacctgactttcatactgtcattggggacacagtaacaggacttctggaaaggtgtaaagcagaaccatcattttatccccggaactgtctgatgcagcttatccaaacgcatgtgctttcttacagtttgtgccccgacttaatggagattgccttaaaaaagaaagatgtacagttgttacaactctgtctacagcagttccctgacattcctgaatcagtcacctgtgcttgcttaaaaattttcttgagcattggtgatgacagtcttcaagaaacagatgttaatatggagtcagtttttgactatagtataaattctgtacatgatgagaaaatggaagagcaaactgaaattcttcaaaatggcttcaatcctgaagaagataaatgcaataactgtgatcaagagttaaataaaaagccccaggacgaaacaaaggagagcacttcatgccctgtggtacaaaaaagagcagctctacttaatgcaattcttcattcagcatatagcgagacatttcttctgcctcatttgaaagacatcccagcacagcatatcacgctgtttcttaagtatttgtatttcctgtacctgaagtgtagcgaaaatgctactatgactcttcctggaatacacccacctaccttgaaccagattatggattggatatgtctacttctggatgcgaattttactgttgttgtaatgatgccagaagcaaagaggctactgataaatctttacaagcttgtaaaatctcagatatctgtttattctgagctcaacaagattgaagtaagttttcgggagctacagaaattaaatcaagaaaagaataatagaggattatattcaattgaagtgctggagctcttctgatattatcaattctccttcatagacattttataaagctcttttatgtgaactcttgcttcatccaggcaagaacggtgttttgtttgcgaccatctcagtgtcaagagaaacgtgtcagtgagtacctggaccatcacttaactgatgctccggggtaggactgcaggtttcacatgaacctgttctaggctgtggacattggtgtggagaggttctgcaattttttaaaaatatgtaactgggttgattttaagtaaaattatttgtgtattgataaaagtctaatttcttatcatgtgttttgaattttttcttttaataaaaaatgaccattgaagcagtgaaaaaaaaaagaatgtaattttatcagagtcagaa

SEQ ID NO: 295555 - DNA, 2724 bp, Homo sapiens
agcgggccgggagtgagcgcggccgtacttaggtttgctcaaaatggcagcgctggaggaagaattcacgttgtcttcggtagtcctgagcgccgggcctgaaggactcctaggcgtggagcagagcgacaaaacagaccagtttctagtgacagacagcggcaggacagtcatcctctataaggtttctgatcagaaacccttggggagctggtcagtgaaacaaggtcaaattataacatgtccagctgtgtgcaactttcaaactggagagtatgttgttgtacacgataataaggttttaagaatatggaataatgaagatgtaaacctggataaagtatttaaagctacattgtcagcagaagtatataggatactttcagtgcaagggacagaacccttggtgctcttcaaggaaggtgctgttcgtggtttagaggccttgcttgcagacccccagcagaaaattgaaactgttatctctgatgaagaagtgattaaatggacaaagtttttcgtagtattcagacatcctgttttaatttttattactgaaaaacatggaaattactttgcttacgtgcaaatgtttaactcacgtatcttaaccaaatatacactcttacttggacaagacgaaaactctgttataaagagttttactgcatctgtagatcggaaattcatctctttgatgtcattaagctctgatggttgtatatatgaaaccttgataccaatacgtccagctgacccagaaaaaaatcagagcttagttaaatcactgctgctcaaggctgttgtatctggtaacgctcgaaatggagttgcactcactgccctggatcaggatcacgtcgcagtcctaggaagtccactagcagcttctaaggaatgcctctctgtatggaacataaaatttcaaacactacagacttcaaaagagttaccacaagggaccagtggtcaactctggtattatggagaacatttgtttatgctacatggaaaatctctaactgtgattccatacaagtgtgaagtgtcatcattagcaggtgctcttggaaaactcaagcatagtcaagatccaggaactcatgtcgtgtcccattttgtaaactgggagacacctcaaggatgtggacttgggttccagaactcagagcagtcaagaagaattttaaggagacgaaaaattgaagtgagtttacagccagaggttccaccatccaaacaacttttgtcaaccataatgaaagattcagaaaaacacattgaagtagaagtacggaaatttttggctctgaagcagacacctgactttcatactgtcattggggacacagtaacaggacttctggaaaggtgtaaagcagaaccatcattttatccccggaactgtctgatgcagcttatccaaacgcatgtgctttcttacagtttgtgccccgacttaatggagattgccttaaaaaagaaagatgtacagttgttacaactctgtctacagcagttccctgacattcctgaatcagtcacctgtgcttgcttaaaaattttcttgagcattggtgatgacagtcttcaagaaacagatgttaatatggagtcagtttttgactatagtataaattctgtacatgatgagaaaatggaagagcaaactgaaattcttcaaaatggcttcaatcctgaagaagataaatgcaataactgtgatcaagagttaaataaaaagccccaggacgaaacaaaggagagcacttcatgccctgtggtacaaaaaagagcagctctacttaatgcaattcttcattcagcatatagcgagacatttcttctgcctcatttgaaagacatcccagcacagcatatcacgctgtttcttaagtatttgtatttcctgtacctgaagtgtagcgaaaatgctactatgactcttcctggaatacacccacctaccttgaaccagattatggattggatatgtctacttctggatgcgaattttactgttgttgtaatgatgccagaagcaaagaggctactgataaatctttacaagcttgtaaaatctcagatatctgtttattctgagctcaacaagattgaagtaagttttcgggagctacagaaattaaatcaagaaaagaataatagaggattatattcaattgaagtgctggagctcttctgatattatcaattctccttcatagacattttataaagctcttttatgtgaactcttgcttcatccaggcaagaacggtgttttgtttgcgaccatctcagtgtcaagagaaacgtgtcagtgagtacctggaccatcacttaactgatgctccggggtaggactgcaggtttcacatgaacctgttctaggctgtggacattggtgtggagaggttctgcaattttttaaaaatatgtaactgggttgattttaagtaaaattatttgtgtattgataaaagtctaataaaaaaaaaaaaaaaaaaaaaaaaaaaaaaaaaaaaaaccccgaagggcatcttcaatattgcgcggggggcgggaaaaagagaggggaacggagaaaggggcacagtggcactaagcgtgtctcccaggcccccggtttcttgttgtacaaggggggaaaatcaggcggggccccccaaaaaagggaaggccgagaataaaatcgagaaagccccgggtaacccggatataagg

SEQ ID NO: 295556 - DNA, 2556 bp, Homo sapiens
agcgggccgggagtgagcgcggccgtacttaggtttgctcaaaatggcagcgctggaggaagaattcacgttgtcttcggtagtcctgagcgccgggcctgaaggactcctaggcgtggagcagagcgacaaaacagaccagtttctagtgacagacagcggcaggacagtcatcctctataaggtttctgatcagaaacccttggggagctggtcagtgaaacaaggtcaaattataacatgtccagctgtgtgcaactttcaaactggagagtatgttgttgtacacgataataaggttttaagaatatggaataatgaagatgtaaacctggataaagtatttaaagctacattgtcagcagaagtatataggatactttcagtgcaagggacagaacccttggtgctcttcaaggaaggtgctgttcgtggtttagaggccttgcttgcagacccccagcagaaaattgaaactgttatctctgatgaagaagtgattaaatggacaaagtttttcgtagtattcagacatcctgttttaatttttattactgaaaaacatggaaattactttgcttacgtgcaaatgtttaactcacgtatcttaaccaaatatacactcttacttggacaagacgaaaactctgttataaagagttttactgcatctgtagatcggaaattcatctctttgatgtcattaagctctgatggttgtatatatgaaaccttgataccaatacgtccagctgacccagaaaaaaatcagagcttagttaaatcactgctgctcaaggctgttgtatctggtaacgctcgaaatggagttgcactcactgccctggatcaggatcacgtcgcagtcctaggaagtccactagcagcttctaaggaatgcctctctgtatggaacataaaatttcaaacactacagacttcaaaagagttaccacaagggaccagtggtcaactctggtattatggagaacatttgtttatgctacatggaaaatctctaactgtgattccatacaagtgtgaagtgtcatcattagcaggtgctcttggaaaactcaagcatagtcaagatccaggaactcatgtcgtgtcccattttgtaaactgggagacacctcaaggatgtggacttgggttccagaactcagagcagtcaagaagaattttaaggagacgaaaaattgaagtgagtttacagccagaggttccaccatccaaacaacttttgtcaaccataatgaaagattcagaaaaacacattgaagtagaagtacggaaatttttggctctgaagcagacacctgactttcatactgtcattggggacacagtaacaggacttctggaaaggtgtaaagcagaaccatcattttatccccggaactgtctgatgcagcttatccaaacgcatgtgctttcttacagtttgtgccccgacttaatggagattgccttaaaaaagaaagatgtacagttgttacaactctgtctacagcagttccctgacattcctgaatcagtcacctgtgcttgcttaaaaattttcttgagcattggtgatgacagtcttcaagaaacagatgttaatatggagtcagtttttgactatagtataaattctgtacatgatgagaaaatggaagagcaaactgaaattcttcaaaatggcttcaatcctgaagaagataaatgcaataactgtgatcaagagttaaataaaaagccccaggacgaaacaaaggagagcacttcatgccctgtggtacaaaaaagagcagctctacttaatgcaattcttcattcagcatatagcgagacatttcttctgcctcatttgaaagacatcccagcacagcatatcacgctgtttcttaagtatttgtatttcctgtacctgaagtgtagcgaaaatgctactatgactcttcctggaatacacccacctaccttgaaccagattatggattggatatgtctacttctggatgcgaattttactgttgttgtaatgatgccagaagcaaagaggctactgataaatctttacaagcttgtaaaatctcagatatctgtttattctgagctcaacaagattgaagtaagttttcgggagctacagaaattaaatcaagaaaagaataatagaggattatattcaattgaagtgctggagctcttctgatattatcaattctccttcatagacattttataaagctcttttatgtgaactcttgcttcatccaggcaagaacggtgttttgtttgcgaccatctcagtgtcaagagaaacgtgtcagtgagtacctggaccatcacttaactgatgctccggggtaggactgcaggtttcacatgaacctgttctaggctgtggacattggtgtggagaggttctgcaattttttaaaaatatgtaactgggttgattttaagtaaaattatttgtgtattgataaaagtctaatttcaaaacacatgataagaaattagacttttatcaatacacaaataattttacttaaaatgtcgacg

SEQ ID NO: 295557 - DNA, 3123 bp, Homo sapiens
  misc_feature (2163)..(2163): n is a, c, g, or t
agcgggccgggagtgagcgcggccgtacttaggtttgctcaaaatggcagcgctggaggaagaattcacgttgtcttcggtagtcctgagcgccgggcctgaaggactcctaggcgtggagcagagcgacaaaacagaccagtttctagtgacagacagcggcaggacagtcatcctctataaggtttctgatcagaaacccttggggagctggtcagtgaaacaaggtcaaattataacatgtccagctgtgtgcaactttcaaactggagagtatgttgttgtacacgataataaggttttaagaatatggaataatgaagatgtaaacctggataaagtatttaaagctacattgtcagcagaagtatataggatactttcagtgcaagggacagaacccttggtgctcttcaaggaaggtgctgttcgtggtttagaggccttgcttgcagacccccagcagaaaattgaaactgttatctctgatgaagaagtgattaaatggacaaagtttttcgtagtattcagacatcctgttttaatttttattactgaaaaacatggaaattactttgcttacgtgcaaatgtttaactcacgtatcttaaccaaatatacactcttacttggacaagacgaaaactctgttataaagagttttactgcatctgtagatcggaaattcatctctttgatgtcattaagctctgatggttgtatatatgaaaccttgataccaatacgtccagctgacccagaaaaaaatcagagcttagttaaatcactgctgctcaaggctgttgtatctggtaacgctcgaaatggagttgcactcactgccctggatcaggatcacgtcgcagtcctaggaagtccactagcagcttctaaggaatgcctctctgtatggaacataaaatttcaaacactacagacttcaaaagagttaccacaagggaccagtggtcaactctggtattatggagaacatttgtttatgctacatggaaaatctctaactgtgattccatacaagtgtgaagtgtcatcattagcaggtgctcttggaaaactcaagcatagtcaagatccaggaactcatgtcgtgtcccattttgtaaactgggagacacctcaaggatgtggacttgggttccagaactcagagcagtcaagaagaattttaaggagacgaaaaattgaagtgagtttacagccagaggttccaccatccaaacaacttttgtcaaccataatgaaagattcagaaaaacacattgaagtagaagtacggaaatttttggctctgaagcagacacctgactttcatactgtcattggggacacagtaacaggacttctggaaaggtgtaaagcagaaccatcattttatccccggaactgtctgatgcagcttatccaaacgcatgtgctttcttacagtttgtgccccgacttaatggagattgccttaaaaaagaaagatgtacagttgttacaactctgtctacagcagttccctgacattcctgaatcagtcacctgtgcttgcttaaaaattttcttgagcattggtgatgacagtcttcaagaaacagatgttaatatggagtcagtttttgactatagtataaattctgtacatgatgagaaaatggaagagcaaactgaaattcttcaaaatggcttcaatcctgaagaagataaatgcaataactgtgatcaagagttaaataaaaagccccaggacgaaacaaaggagagcacttcatgccctgtggtacaaaaaagagcagctctactgtatcctttgacatagagcatccctctgtttctctttatagggtatagttatatgccaagcagtaaccaaggagtaactcaataatttaaggtttttctttccttttccaattgttttttgtttctgtttgaaaatagattatgttcaatgctacgttaagtaaggtttacttaaacctgtttaatttaactaggctgggcatgggtggctcatgcctgtagtcccagcactttttgaggccgaggtgggaggattgtctgagcccaggagtctgagaccagcctgggcaacatggcgagacccccatctctacatcagatttaaaaaaaaaaaaaagaagaagctatactaacacngaagctctatcaattctgaagatcagtattctgaataaataccaattaaagtattccacatgatctccaatgattaggagagtgtttggtgatagagctcttttagagatgtaaaacttttgtataaatttagaaaactaacattgacaaaggaagttactcataagttcaatagaatagcttctatttgttgaagtacgattttcctttagtcctaagtaatgcaattcttcattcagcatatagcgagacatttcttctgcctcatttgaaagacatcccagcacagcatatcacgctgtttcttaagtatttgtatttcctgtacctgaagtgtagcgaaaatgctactatgactcttcctggaatacacccacctaccttgaaccagattatggattggatatgtctacttctggatgcgaattttactgttgttgtaatgatgccagaagcaaagaggctactgataaatctttacaagcttgtaaaatctcagatatctgtttattctgagctcaacaagattgaagtaagttttcgggagctacagaaattaaatcaagaaaagaataatagaggattatattcaattgaagtgctggagctcttctgatattatcaattctccttcatagacattttataaagctcttttatgtgaactcttgcttcatccaggcaagaacggtgttttgtttgcgaccatctcagtgtcaagagaaacgtgtcagtgagtacctggaccatcacttaactgatgctccggggtaggactgcaggtttcacatgaacctgttctaggctgtggacattggtgtggagaggttctgcaattttttaaaaatatgtaactgggttgattttaagtaaaattatttgtgtattgataaaagtctaatttcttatcatgtgttttgaattttttcttttaataaaaaatgaccattgaagcagtga

SEQ ID NO: 295558 - DNA, 2377 bp, Homo sapiens
gatccccctagctgctggcagtttggtagtatgctggagataacaggaggaaagttacctgagaagcagactattactgttaggaggacactggagaaacataattagactagaaagatagggctatacattagcctttactatatgaaatgatagtcttcctagtctaatttatcatacccagtacccggaagtatgtagtcgactacatacttctgcaagggacagaacccttggtgctcttcaaggaaggtgctgttcgtggtttagaggccttgcttgcagacccccagcagaaaattgaaactgttatctctgatgaagaagtgattaaatggacaaagtttttcgtagtattcagacatcctgttttaatttttattactgaaaaacatggaaattactttgcttacgtgcaaatgtttaactcacgtatcttaaccaaatatacactcttacttggacaagacgaaaactctgttataaagagttttactgcatctgtagatcggaaattcatctctttgatgtcattaagctctgatggttgtatatatgaaaccttgataccaatacgtccagctgacccagaaaaaaatcagagcttagttaaatcactgctgctcaaggctgttgtatctggtaacgctcgaaatggagttgcactcactgccctggatcaggatcacgtcgcagtcctaggaagtccactagcagcttctaaggaatgcctctctgtatggaacataaaatttcaaacactacagacttcaaaagagttaccacaagggaccagtggtcaactctggtattatggagaacatttgtttatgctacatggaaaatctctaactgtgattccatacaagtgtgaagtgtcatcattagcaggtgctcttggaaaactcaagcatagtcaagatccaggaactcatgtcgtgtcccattttgtaaactgggagacacctcaaggatgtggacttgggttccagaactcagagcagtcaagaagaattttaaggagacgaaaaattgaagtgagtttacagccagaggttccaccatccaaacaacttttgtcaaccataatgaaagattcagaaaaacacattgaagtagaagtacggaaatttttggctctgaagcagacacctgactttcatactgtcattggggacacagtaacaggacttctggaaaggtgtaaagcagaaccatcattttatccccggaactgtctgatgcagcttatccaaacgcatgtgctttcttacagtttgtgccccgacttaatggagattgccttaaaaaagaaagatgtacagttgttacaactctgtctacagcagttccctgacattcctgaatcagtcacctgtgcttgcttaaaaattttcttgagcattggtgatgacagtcttcaagaaacagatgttaatatggagtcagtttttgactatagtataaattctgtacatgatgagaaaatggaagagcaaactgaaattcttcaaaatggcttcaatcctgaagaagataaatgcaataactgtgatcaagagttaaataaaaagccccaggacgaaacaaaggagagcacttcatgccctgtggtacaaaaaagagcagctctacttaatgcaattcttcattcagcatatagcgagacatttcttctgcctcatttgaaagacatcccagcacagcatatcacgctgtttcttaagtatttgtatttcctgtacctgaagtgtagcgaaaatgctactatgactcttcctggaatacacccacctaccttgaaccagattatggattggatatgtctacttctggatgcgaattttactgttgttgtaatgatgccagaagcaaagaggctactgataaatctttacaagcttgtaaaatctcagatatctgtttattctgagctcaacaagattgaagtaagttttcgggagctacagaaattaaatcaagaaaagaataatagaggattatattcaattgaagtgctggagctcttctgatattatcaattctccttcatagacattttataaagctcttttatgtgaactcttgcttcatccaggcaagaacggtgttttgtttgcgaccatctcagtgtcaagagaaacgtgtcagtgagtacctggaccatcacttaactgatgctccggggtaggactgcaggtttcacatgaacctgttctaggctgtggacattggtgtggagaggttctgcaattttttaaaaatatgtaactgggttgattttaagtaaaattatttgtgtattgataaaagtctaatttcttatcatgtgttttgaattttttcttttaataaaaaatgaccattgaagcagtga

SEQ ID NO: 295559 - DNA, 2346 bp, Homo sapiens
agcgggccgggagtgagcgcggccgtacttaggtttgctcaaaatggcagcgctggaggaagaattcacgttgtcttcggtagtcctgagcgccgggcctgaaggactcctaggcgtggagcagagcgacaaaacagaccagtttctagtgacagacagcggcaggacagtcatcctctataaggtttctgatcagaaacccttggggagctggtcagtgaaacaaggtcaaattataacatgtccagctgtgtgcaactttcaaactggagagtatgttgttgtacacgataataaggttttaagaatatggaataatgaagatgtaaacctggataaagtatttaaagctacattgtcagcagaagtatataggatactttcagtgcaagggacagaacccttggtgctcttcaaggaaggtgctgttcgtggtttagaggccttgcttgcagacccccagcagaaaattgaaactgttatctctgatgaagaagtgattaaatggacaaagtttttcgtagtattcagacatcctgttttaatttttattactgaaaaacatggaaattactttgcttacgtgcaaatgtttaactcacgtatcttaaccaaatatacactcttacttggacaagacgaaaactctgttataaagagttttactgcatctgtagatcggaaattcatctctttgatgtcattaagctctgatggttgtatatatgaaaccttgataccaatacgtccagctgacccagaaaaaaatcagagcttagttaaatcactgctgctcaaggctgttgtatctggtaacgctcgaaatggagttgcactcactgccctggatcaggatcacgtcgcagtcctaggaagtccactagcagcttctaagggaactcatgtcgtgtcccattttgtaaactgggagacacctcaaggatgtggacttgggttccagaactcagagcagtcaagaagaattttaaggagacgaaaaattgaagtgagtttacagccagaggttccaccatccaaacaacttttgtcaaccataatgaaagattcagaaaaacacattgaagtagaagtacggaaatttttggctctgaagcagacacctgactttcatactgtcattggggacacagtaacaggacttctggaaaggtgtaaagcagaaccatcattttatccccggaactgtctgatgcagcttatccaaacgcatgtgctttcttacagtttgtgccccgacttaatggagattgccttaaaaaagaaagatgtacagttgttacaactctgtctacagcagttccctgacattcctgaatcagtcacctgtgcttgcttaaaaattttcttgagcattggtgatgacagtcttcaagaaacagatgttaatatggagtcagtttttgactatagtataaattctgtacatgatgagaaaatggaagagcaaactgaaattcttcaaaatggcttcaatcctgaagaagataaatgcaataactgtgatcaagagttaaataaaaagccccaggacgaaacaaaggagagcacttcatgccctgtggtacaaaaaagagcagctctacttaatgcaattcttcattcagcatatagcgagacatttcttctgcctcatttgaaagacatcccagcacagcatatcacgctgtttcttaagtatttgtatttcctgtacctgaagtgtagcgaaaatgctactatgactcttcctggaatacacccacctaccttgaaccagattatggattggatatgtctacttctggatgcgaattttactgttgttgtaatgatgccagaagcaaagaggctactgataaatctttacaagcttgtaaaatctcagatatctgtttattctgagctcaacaagattgaagtaagttttcgggagctacagaaattaaatcaagaaaagaataatagaggattatattcaattgaagtgctggagctcttctgatattatcaattctccttcatagacattttataaagctcttttatgtgaactcttgcttcatccaggcaagaacggtgttttgtttgcgaccatctcagtgtcaagagaaacgtgtcagtgagtacctggaccatcacttaactgatgctccggggtaggactgcaggtttcacatgaacctgttctaggctgtggacattggtgtggagaggttctgcaattttttaaaaatatgtaactgggttgattttaagtaaaattatttgtgtattgataaaagtctaatttcttatcatgtgttttgaattttttcttttaataaaaaatgaccattgaagcagtga

SEQ ID NO: 295560 - DNA, 2477 bp, Homo sapiens
gaaatccttggaggatttgagttctagttgccgctttgccacaaactgtgcagccagtaacttctctatgcctcagcttcctctatattgagatcttaatgttttcctcagaacacgagtcccaaaagtaactctgaagaaaatgaggtaggggagtcaatttaagtttgggaagcactgcatctcccctcttagaactttaaaattcacattatcatctggggagttcaataacctgcatttaatccagagctgcatttgacaaatgcgtattgcttgtggtatatgtttcaaaacgcccaattaagtgttctctgatgtctttctggttctaaaaaatatttaatgaaaactttgattaaattttgattgatatgtgtctcccagctggtgatttttgcatcctataatttttcttttttctttttttgtagatggacaaagtttttcgtagtattcagacatcctgttttaatttttattactgaaaaacatggaaattactttgcttacgtgcaaatgtttaactcacgtatcttaaccaaatatacactcttacttggacaagacgaaaactctgttataaagagttttactgcatctgtagatcggaaattcatctctttgatgtcattaagctctgatggttgtatatatgaaaccttgataccaatacgtccagctgacccagaaaaaaatcagagcttagttaaatcactgctgctcaaggctgttgtatctggtaacgctcgaaatggagttgcactcactgccctggatcaggatcacgtcgcagtcctaggaagtccactagcagcttctaaggaatgcctctctgtatggaacataaaatttcaaacactacagacttcaaaagagttaccacaagggaccagtggtcaactctggtattatggagaacatttgtttatgctacatggaaaatctctaactgtgattccatacaagtgtgaagtgtcatcattagcaggtgctcttggaaaactcaagcatagtcaagatccaggaactcatgtcgtgtcccattttgtaaactgggagacacctcaaggatgtggacttgggttccagaactcagagcagtcaagaagaattttaaggagacgaaaaattgaagtgagtttacagccagaggttccaccatccaaacaacttttgtcaaccataatgaaagattcagaaaaacacattgaagtagaagtacggaaatttttggctctgaagcagacacctgactttcatactgtcattggggacacagtaacaggacttctggaaaggtgtaaagcagaaccatcattttatccccggaactgtctgatgcagcttatccaaacgcatgtgctttcttacagtttgtgccccgacttaatggagattgccttaaaaaagaaagatgtacagttgttacaactctgtctacagcagttccctgacattcctgaatcagtcacctgtgcttgcttaaaaattttcttgagcattggtgatgacagtcttcaagaaacagatgttaatatggagtcagtttttgactatagtataaattctgtacatgatgagaaaatggaagagcaaactgaaattcttcaaaatggcttcaatcctgaagaagataaatgcaataactgtgatcaagagttaaataaaaagccccaggacgaaacaaaggagagcacttcatgccctgtggtacaaaaaagagcagctctacttaatgcaattcttcattcagcatatagcgagacatttcttctgcctcatttgaaagacatcccagcacagcatatcacgctgtttcttaagtatttgtatttcctgtacctgaagtgtagcgaaaatgctactatgactcttcctggaatacacccacctaccttgaaccagattatggattggatatgtctacttctggatgcgaattttactgttgttgtaatgatgccagaagcaaagaggctactgataaatctttacaagcttgtaaaatctcagatatctgtttattctgagctcaacaagattgaagtaagttttcgggagctacagaaattaaatcaagaaaagaataatagaggattatattcaattgaagtgctggagctcttctgatattatcaattctccttcatagacattttataaagctcttttatgtgaactcttgcttcatccaggcaagaacggtgttttgtttgcgaccatctcagtgtcaagagaaacgtgtcagtgagtacctggaccatcacttaactgatgctccggggtaggactgcaggtttcacatgaacctgttctaggctgtggacattggtgtggagaggttctgcaattttttaaaaatatgtaactgggttgattttaagtaaaattatttgtgtattgataaaagtctaatttcttatcatgtgttttgaattttttcttttaataaaaaatgaccattgaagcagtga

SEQ ID NO: 295561 - DNA, 2085 bp, Homo sapiens
cacgcatttcactcggcaggaggtttaaaacaacaacagtcaatggacaaagtttttcgtagtattcagacatcctgttttaatttttattactgaaaaacatggaaattactttgcttacgtgcaaatgtttaactcacgtatcttaaccaaatatacactcttacttggacaagacgaaaactctgttataaagagttttactgcatctgtagatcggaaattcatctctttgatgtcattaagctctgatggttgtatatatgaaaccttgataccaatacgtccagctgacccagaaaaaaatcagagcttagttaaatcactgctgctcaaggctgttgtatctggtaacgctcgaaatggagttgcactcactgccctggatcaggatcacgtcgcagtcctaggaagtccactagcagcttctaaggaatgcctctctgtatggaacataaaatttcaaacactacagacttcaaaagagttaccacaagggaccagtggtcaactctggtattatggagaacatttgtttatgctacatggaaaatctctaactgtgattccatacaagtgtgaagtgtcatcattagcaggtgctcttggaaaactcaagcatagtcaagatccaggaactcatgtcgtgtcccattttgtaaactgggagacacctcaaggatgtggacttgggttccagaactcagagcagtcaagaagaattttaaggagacgaaaaattgaagtgagtttacagccagaggttccaccatccaaacaacttttgtcaaccataatgaaagattcagaaaaacacattgaagtagaagtacggaaatttttggctctgaagcagacacctgactttcatactgtcattggggacacagtaacaggacttctggaaaggtgtaaagcagaaccatcattttatccccggaactgtctgatgcagcttatccaaacgcatgtgctttcttacagtttgtgccccgacttaatggagattgccttaaaaaagaaagatgtacagttgttacaactctgtctacagcagttccctgacattcctgaatcagtcacctgtgcttgcttaaaaattttcttgagcattggtgatgacagtcttcaagaaacagatgttaatatggagtcagtttttgactatagtataaattctgtacatgatgagaaaatggaagagcaaactgaaattcttcaaaatggcttcaatcctgaagaagataaatgcaataactgtgatcaagagttaaataaaaagccccaggacgaaacaaaggagagcacttcatgccctgtggtacaaaaaagagcagctctacttaatgcaattcttcattcagcatatagcgagacatttcttctgcctcatttgaaagacatcccagcacagcatatcacgctgtttcttaagtatttgtatttcctgtacctgaagtgtagcgaaaatgctactatgactcttcctggaatacacccacctaccttgaaccagattatggattggatatgtctacttctggatgcgaattttactgttgttgtaatgatgccagaagcaaagaggctactgataaatctttacaagcttgtaaaatctcagatatctgtttattctgagctcaacaagattgaagtaagttttcgggagctacagaaattaaatcaagaaaagaataatagaggattatattcaattgaagtgctggagctcttctgatattatcaattctccttcatagacattttataaagctcttttatgtgaactcttgcttcatccaggcaagaacggtgttttgtttgcgaccatctcagtgtcaagagaaacgtgtcagtgagtacctggaccatcacttaactgatgctccggggtaggactgcaggtttcacatgaacctgttctaggctgtggacattggtgtggagaggttctgcaattttttaaaaatatgtaactgggttgattttaagtaaaattatttgtgtattgataaaagtctaatttcttatcatgtgttttgaattttttcttttaataaaaaatgaccattgaagcagtga

SEQ ID NO: 295562 - DNA, 2812 bp, Homo sapiens
  misc_feature (2776)..(2776): n is a, c, g, or t
  misc_feature (2803)..(2804): n is a, c, g, or t
agcgggccgggagtgagcgcggccgtacttaggtttgctcaaaatggcagcgctggaggaagaattcacgttgtcttcggtagtcctgagcgccgggcctgaaggactcctaggcgtggagcagagcgacaaaacagaccagtttctagtgacagacagcggcaggacagtcatcctctataaggtttctgatcagaaacccttggggagctggtcagtgaaacaaggtcaaattataacatgtccagctgtgtgcaactttcaaactggagagtatgttgttgtacacgataataaggttttaagaatatggaataatgaagatgtaaacctggataaagtatttaaagctacattgtcagcagaagtatataggatactttcagtgcaagggacagaacccttggtgctcttcaaggaaggtgctgttcgtggtttagaggccttgcttgcagacccccagcagaaaattgaaactgttatctctgatgaagaagtgattaaatggacaaagtttttcgtagtattcagacatcctgttttaatttttattactgaaaaacatggaaattactttgcttacgtgcaaatgtttaactcacgtatcttaaccaaatatacactcttacttggacaagacgaaaactctgttataaagagttttactgcatctgtagatcggaaattcatctctttgatgtcattaagctctgatggttgtatatatgaaaccttgataccaatacgtccagctgacccagaaaaaaatcagagcttagttaaatcactgctgctcaaggctgttgtatctggtaacgctcgaaatggagttgcactcactgccctggatcaggatcacgtcgcagtcctaggaagtccactagcagcttctaaggaatgcctctctgtatggaacataaaatttcaaacactacagacttcaaaagagttaccacaagggaccagtggtcaactctggtattatggagaacatttgtttatgctacatggaaaatctctaactgtgattccatacaagtgtgaagtgtcatcattagcaggtgctcttggaaaactcaagcatagtcaagatccaggaactcatgtcgtgtcccattttgtaaactgggagacacctcaaggatgtggacttgggttccagaactcagagcagtcaagaagaattttaaggagacgaaaaattgaagtgagtttacagccagaggttccaccatccaaacaacttttgtcaaccataatgaaagattcagaaaaacacattgaagtagaagtacggaaatttttggctctgaagcagacacctgactttcatactgtcattggggacacagtaacaggacttctggaaaggtgtaaagcagaaccatcattttatccccggaactgtctgatgcagcttatccaaacgcatgtgctttcttacagtttgtgccccgacttaatggagattgccttaaaaaagaaagatgtacagttgttacaactctgtctacagcagttccctgacattcctgaatcagtcacctgtgcttgcttaaaaattttcttgagcattggtgatgacagtcttcaagaaacagatgttaatatggagtcagtttttgactatagtataaattctgtacatgatgagaaaatggaagagcaaactgaaattcttcaaaatggcttcaatcctgaagaagataaatgcaataactgtgatcaagagttaaataaaaagccccaggacgaaacaaaggagagcacttcatgccctgtggtacaaaaaagagcagctctacttaatgcaattcttcattcagcatatagcgagacatttcttctgcctcatttgaaagacatcccagcacagcatatcacgctgtttcttaagtatttgtatttcctgtacctgaagtgtagcgaaaatgctactatgactcttcctggaatacacccacctaccttgaaccagattatggattggatatgtctacttctggatgcgaattttactgttgttgtaatgatgccagaagcaaagaggctactgataaatctttacaagcttgtaaaatctcagatatctgtttattctgagctcaacaagattgaagtaagttttcgggagctacagaaattaaatcaagaaaagaataatagaggattatattcaattgaagtgctggagctcttctgatattatcaattctccttcatagacattttataaagctcttttatgtgaactcttgcttcatccaggcaagaacggtgttttgtttgcgaccatctcagtgtcaagagaaacgtgtcagtgagtacctggaccatcacttaactgatgctccggggtaggactgcaggtttcacatgaacctgttctaggctgtggacattggtgtggagaggttctgcaattttttaaaaatatgtaactggattcagataggaggcctcctatctgaatccagatttagatctccttaggagccttctctagtctccctagaaacctgtctctataactaataaactcctttttacactcttaatatcattaccagttttgatatccaaaccaaacattgggggtaggagggttcaccccaacactatggggtggaccagaacaaatatgtaaatttttgagattgggttttttaaaactcagcttaatctcttgagattcatccataatgttacatgtattggccattcattccattttaatgctgggtaacacttcatggtatgacacaccacacatatnattcaagacatctgattcagataggannaggatccg

SEQ ID NO: 295563 - DNA, 2562 bp, Homo sapiens
agcgggccgggagtgagcgcggccgtacttaggtttgctcaaaatggcagcgctggaggaagaattcacgttgtcttcggtagtcctgagcgccgggcctgaaggactcctaggcgtggagcagagcgacaaaacagaccagtttctagtgacagacagcggcaggacagtcatcctctataaggtttctgatcagaaacccttggggagctggtcagtgaaacaaggtcaaattataacatgtccagctgtgtgcaactttcaaactggagagtatgttgttgtacacgataataaggttttaagaatatggaataatgaagatgtaaacctggataaagtatttaaagctacattgtcagcagaagtatataggatactttcagtgcaagggacagaacccttggtgctcttcaaggaaggtgctgttcgtggtttagaggccttgcttgcagacccccagcagaaaattgaaactgttatctctgatgaagaagtgattaaatggacaaagtttttcgtagtattcagacatcctgttttaatttttattactgaaaaacatggaaattactttgcttacgtgcaaatgtttaactcacgtatcttaaccaaatatacactcttacttggacaagacgaaaactctgttataaagagttttactgcatctgtagatcggaaattcatctctttgatgtcattaagctctgatggttgtatatatgaaaccttgataccaatacgtccagctgacccagaaaaaaatcagagcttagttaaatcactgctgctcaaggctgttgtatctggtaacgctcgaaatggagttgcactcactgccctggatcaggatcacgtcgcagtcctaggaagtccactagcagcttctaaggaatgcctctctgtatggaacataaaatttcaaacactacagacttcaaaagagttaccacaagggaccagtggtcaactctggtattatggagaacatttgtttatgctacatggaaaatctctaactgtgattccatacaagtgtgaagtgtcatcattagcaggtgctcttggaaaactcaagcatagtcaagatccaggaactcatgtcgtgtcccattttgtaaactgggagacacctcaaggatgtggacttgggttccagaactcagagcagtcaagaagaattttaaggagacgaaaaattgaagtgagtttacagccagaggttccaccatccaaacaacttttgtcaaccataatgaaagattcagaaaaacacattgaagtagaagtacggaaatttttggctctgaagcagacacctgactttcatactgtcattggggacacagtaacaggacttctggaaaggtgtaaagcagaaccatcattttatccccggaactgtctgatgcagcttatccaaacgcatgtgctttcttacagtttgtgccccgacttaatggagattgccttaaaaaagaaagatgtacagttgttacaactctgtctacagcagttccctgacattcctgaatcagtcacctgtgcttgcttaaaaattttcttgagcattggtgatgacagtcttcaagaaacagatgttaatatggagtcagtttttgactatagtataaattctgtacatgatgagaaaatggaagagcaaactgaaattcttcaaaatggcttcaatcctgaagaagataaatgcaataactgtgatcaagagttaaataaaaagccccaggacgaaacaaaggagagcacttcatgccctgtggtacaaaaaagagcagctctacttaatgcaattcttcattcagcatatagcgagacatttcttctgcctcatttgaaagacatcccagcacagcatatcacgctgtttcttaagtatttgtatttcctgtacctgaagtgtagcgaaaatgctactatgactcttcctggaatacacccacctaccttgaaccagattatggattggatatgtctacttctggatgcgaattttactgttgttgtaatgatgccagaagcaaagaggctactgataaatctttacaagcttgtaaaatctcagatatctgtttattctgagctcaacaagattgaagtaagttttcgggagctacagaaattaaatcaagaaaagaataatagaggattatattcaattgaagtgctggagctcttctgatattatcaattctccttcatagacattttataaagctcttttatgtgaactcttgcttcatccaggcaagaacggtgttttgtttgcgaccatctcagtgtcaagagaaacgtgtcagtgagtacctggaccatcacttaactgatgctccggggtaggactgcaggtttcacatgaacctgttctaggctgtggacattggtgtggagaggttctgcaattttttaaaaatatgtaactggattcagataggaggcctcctatctgaatccagatgcgacgacaataaaagtacaaggccatcctctcatttttgtcatcatggcaatctgattcaataggagagggatctctagatc

SEQ ID NO: 295564 - DNA, 2376 bp, Homo sapiens
  misc_feature (2368)..(2368): n is a, c, g, or t
agcgggccgggagtgagcgcggccgtacttaggtttgctcaaaatggcagcgctggaggaagaattcacgttgtcttcggtagtcctgagcgccgggcctgaaggactcctaggcgtggagcagagcgacaaaacagaccagtttctagtgacagacagcggcaggacagtcatcctctataaggtttctgatcagaaacccttggggagctggtcagtgaaacaaggtcaaattataacatgtccagctgtgtgcaactttcaaactggagagtatgttgttgtacacgataataaggttttaagaatatggaataatgaagatgtaaacctggataaagtatttaaagctacattgtcagcagaagtatataggatactttcagtgcaagggacagaacccttggtgctcttcaaggaaggtgctgttcgtggtttagaggccttgcttgcagacccccagcagaaaattgaaactgttatctctgatgaagaagtgattaaatggacaaagtttttcgtagtattcagacatcctgttttaatttttattactgaaaaacatggaaattactttgcttacgtgcaaatgtttaactcacgtatcttaaccaaatatacactcttacttggacaagacgaaaactctgttataaagagttttactgcatctgtagatcggaaattcatctctttgatgtcattaagctctgatggttgtatatatgaaaccttgataccaatacgtccagctgacccagaaaaaaatcagagcttagttaaatcactgctgctcaaggctgttgtatctggtaacgctcgaaatggagttgcactcactgccctggatcaggatcacgtcgcagtcctaggaagtccactagcagcttctaaggaatgcctctctgtatggaacataaaatttcaaacactacagacttcaaaagagttaccacaagggaccagtggtcaactctggtattatggagaacatttgtttatgctacatggaaaatctctaactgtgattccatacaagtgtgaagtgtcatcattagcaggtgctcttggaaaactcaagcatagtcaagatccaggaactcatgtcgtgtcccattttgtaaactgggagacacctcaaggatgtggacttgggttccagaactcagagcagtcaagaagaattttaaggagacgaaaaattgaagtgagtttacagccagaggttccaccatccaaacaacttttgtcaaccataatgaaagattcagaaaaacacattgaagtagaagtacggaaatttttggctctgaagcagacacctgactttcatactgtcattggggacacagtaacaggacttctggaaaggtgtaaagcagaaccatcattttatccccggaactgtctgatgcagcttatccaaacgcatgtgctttcttacagtttgtgccccgacttaatggagattgccttaaaaaagaaagatgtacagttgttacaactctgtctacagcagttccctgacattcctgaatcagtcacctgtgcttgcttaaaaattttcttgagcattggtgatgacagtcttcaagaaacagatgttaatatggagtcagtttttgactatagtataaattctgtacatgatgagaaaatggaagagcaaactgaaattcttcaaaatggcttcaatcctgaagaagataaatgcaataactgtgatcaagagttaaataaaaagccccaggacgaaacaaaggagagcacttcatgccctgtggtacaaaaaagagcagctctacttaatgcaattcttcattcagcatatagcgagacatttcttctgcctcatttgaaagacatcccagcacagcatatcacgctgtttcttaagtatttgtatttcctgtacctgaagtgtagcgaaaatgctactatgactcttcctggaatacacccacctaccttgaaccagattatggattggatatgtctacttctggatgcgaattttactgttgttgtaatgatgccagaagcaaagaggctactgataaatctttacaagcttgtaaaatctcagatatctgtttattctgagctcaacaagattgaagtaagttttcgggagctacagaaattaaatcaagaaaagaataatagaggattatattcaattgaagtgctggagctcttctgatattatcaattctccttcatagacattttataaagctcttttatgtgaactcttgcttcatccaggcaagaacggtgttttgtttgcgaccacaccaatgtccacagcctagaacaggttcatgtgaaacctgcagtcctaccccggagcatcagttaagtgatnggtcaggt

SEQ ID NO: 295565 - DNA, 2365 bp, Homo sapiens
agcgggccgggagtgagcgcggccgtacttaggtttgctcaaaatggcagcgctggaggaagaattcacgttgtcttcggtagtcctgagcgccgggcctgaaggactcctaggcgtggagcagagcgacaaaacagaccagtttctagtgacagacagcggcaggacagtcatcctctataaggtttctgatcagaaacccttggggagctggtcagtgaaacaaggtcaaattataacatgtccagctgtgtgcaactttcaaactggagagtatgttgttgtacacgataataaggttttaagaatatggaataatgaagatgtaaacctggataaagtatttaaagctacattgtcagcagaagtatataggatactttcagtgcaagggacagaacccttggtgctcttcaaggaaggtgctgttcgtggtttagaggccttgcttgcagacccccagcagaaaattgaaactgttatctctgatgaagaagtgattaaatggacaaagtttttcgtagtattcagacatcctgttttaatttttattactgaaaaacatggaaattactttgcttacgtgcaaatgtttaactcacgtatcttaaccaaatatacactcttacttggacaagacgaaaactctgttataaagagttttactgcatctgtagatcggaaattcatctctttgatgtcattaagctctgatggttgtatatatgaaaccttgataccaatacgtccagctgacccagaaaaaaatcagagcttagttaaatcactgctgctcaaggctgttgtatctggtaacgctcgaaatggagttgcactcactgccctggatcaggatcacgtcgcagtcctaggaagtccactagcagcttctaaggaatgcctctctgtatggaacataaaatttcaaacactacagacttcaaaagagttaccacaagggaccagtggtcaactctggtattatggagaacatttgtttatgctacatggaaaatctctaactgtgattccatacaagtgtgaagtgtcatcattagcaggtgctcttggaaaactcaagcatagtcaagatccaggaactcatgtcgtgtcccattttgtaaactgggagacacctcaaggatgtggacttgggttccagaactcagagcagtcaagaagaattttaaggagacgaaaaattgaagtgagtttacagccagaggttccaccatccaaacaacttttgtcaaccataatgaaagattcagaaaaacacattgaagtagaagtacggaaatttttggctctgaagcagacacctgactttcatactgtcattggggacacagtaacaggacttctggaaaggtgtaaagcagaaccatcattttatccccggaactgtctgatgcagcttatccaaacgcatgtgctttcttacagtttgtgccccgacttaatggagattgccttaaaaaagaaagatgtacagttgttacaactctgtctacagcagttccctgacattcctgaatcagtcacctgtgcttgcttaaaaattttcttgagcattggtgatgacagtcttcaagaaacagatgttaatatggagtcagtttttgactatagtataaattctgtacatgatgagaaaatggaagagcaaactgaaattcttcaaaatggcttcaatcctgaagaagataaatgcaataactgtgatcaagagttaaataaaaagccccaggacgaaacaaaggagagcacttcatgccctgtggtacaaaaaagagcagctctacttaatgcaattcttcattcagcatatagcgagacatttcttctgcctcatttgaaagacatcccagcacagcatatcacgctgtttcttaagtatttgtatttcctgtacctgaagtgtagcgaaaatgctactatgactcttcctggaatacacccacctaccttgaaccagattatggattggatatgtctacttctggatgcgaattttactgttgttgtaatgatgccagaagcaaagaggctactgataaatctttacaagcttgtaaaatctcaggcaagaacggtgttttgtttgcgaccatctcagtgtcaagagaaacgtgtcagtgagtacctggaccatcacttaactgatgctccggggtaggactgcaggtttcacatgaacctgttctaggctgtggacattggtgtggagaggttctgcaattttttaaaaatatgtaactgggttgattttaagtaaaattatttgtgtattgataaaagtctaatttcttatcatgtgttttgaattttttcttttaataaaaaatgaccattgaagcagtga

SEQ ID NO: 295566 - DNA, 2059 bp, Homo sapiens
agcgggccgggagtgagcgcggccgtacttaggtttgctcaaaatggcagcgctggaggaagaattcacgttgtcttcggtagtcctgagcgccgggcctgaaggactcctaggcgtggagcagagcgacaaaacagaccagtttctagtgacagacagcggcaggacagtcatcctctataaggtttctgatcagaaacccttggggagctggtcagtgaaacaaggtcaaattataacatgtccagctgtgtgcaactttcaaactggagagtatgttgttgtacacgataataaggttttaagaatatggaataatgaagatgtaaacctggataaagtatttaaagctacattgtcagcagaagtatataggatactttcagtgcaagggacagaacccttggtgctcttcaaggaaggtgctgttcgtggtttagaggccttgcttgcagacccccagcagaaaattgaaactgttatctctgatgaagaagtgattaaatggacaaagtttttcgtagtattcagacatcctgttttaatttttattactgaaaaacatggaaattactttgcttacgtgcaaatgtttaactcacgtatcttaaccaaatatacactcttacttggacaagacgaaaactctgttataaagagttttactgcatctgtagatcggaaattcatctctttgatgtcattaagctctgatggttgtatatatgaaaccttgataccaatacgtccagctgacccagaaaaaaatcagagcttagttaaatcactgctgctcaaggctgttgtatctggtaacgctcgaaatggagttgcactcactgccctggatcaggatcacgtcgcagtcctaggaagtccactagcagcttctaaggaatgcctctctgtatggaacataaaatttcaaacactacagacttcaaaagagttaccacaagggaccagtggtcaactctggtattatggagaacatttgtttatgctacatggaaaatctctaactgtgattccatacaagtgtgaagtgtcatcattagcaggtgctcttggaaaactcaagcatagtcaagatccaggaactcatgtcgtgtcccattttgtaaactgggagacacctcaaggatgtggacttgggttccagaactcagagcagtcaagaagaattttaaggagacgaaaaattgaagtgagtttacagccagaggttccaccatccaaacaacttttgtcaaccataatgaaagattcagaaaaacacattgaagtagaagtacggaaatttttggctctgaagcagacacctgactttcatactgtcattggggacacagtaacaggacttctggaaaggtgtaaagcagaaccatcattttatccccggaactgtctgatgcagcttatccaaacgcatgtgctttcttacagtttgtgccccgacttaatggagattgccttaaaaaagaaagatgtacagttgttacaactctgtctacagcagttccctgacattcctgaatcagtcacctgtgcttgcttaaaaattttcttgagcattggtgatgacagtcttcaagaaacagatgttaatatggagtcagtttttgactatagtataaattctgtacatgatgagaaaatggaagagcaaactgaaattcttcaaaatggcttcaatcctgaagaagataaatgcaataactgtgatcaagagttaaataaaaagccccaggacgaaacaaaggagagcacttcatgccctgtggtacaaaaaagagcagctctacttaatgcaattcttcattcagcatatagcgagacatttcttctgcctcatttgaaagacatcccagcacagcatatcacgctgtttcttaagtatttgtatttcctgtacctgaagtcatccttgattcttcttttagcacccatatccaatccattagcaaatctggtagaccctaccttcacaatatatctaaagctgaccacctctttttgacctctactattaacggcctattccaaggcaccatcatct

SEQ ID NO: 295567 - DNA, 2123 bp, Homo sapiens
  misc_feature (1163)..(1163): n is a, c, g, or t
tttgtgatcctaatcaatttacttaattccagttaaggagacgaaaaattgaagtgagtttacagccagaggttccaccatccaaacaacttttgtcaaccataatgaaagattcagaaaaacacattgaagtagaagtacggaaatttttggctctgaagcagacacctgactttcatactgtcattggggacacagtaacaggacttctggaaaggtgtaaagcagaaccatcattttatccccggaactgtctgatgcagcttatccaaacgcatgtgctttcttacaggtagctgtttgtgtgtaccacactgtacgtgcataattcttctgaccttgttttttatagttctaatcttctgaaactctcaaaaggcttataaatgttctgcagttgagaattttcttaatatgtaatagtgattcagatttttttgtcttagtttgtgccccgacttaatggagattgccttaaaaaagaaagatgtacagttgttacaactctgtctacagcagttccctgacattcctgaatcagtcacctgtgcttgcttaaaaattttcttgagcattggtgatgacagtcttcaagaaacagatgttaatatggagtcagtttttgactatagtataaattctgtacatgatgagaaaatggaagagcaaactgaaattcttcaaaatggcttcaatcctgaagaagataaatgcaataactgtgatcaagagttaaataaaaagccccaggacgaaacaaaggagagcacttcatgccctgtggtacaaaaaagagcagctctactgtatcctttgacatagagcatccctctgtttctctttatagggtatagttatatgccaagcagtaaccaaggagtaactcaataatttaaggtttttctttccttttccaattgttttttgtttctgtttgaaaatagattatgttcaatgctacgttaagtaaggtttacttaaacctgtttaatttaactaggctgggcatgggtggctcatgcctgtagtcccagcactttttgaggccgaggtgggaggattgtctgagcccaggagtctgagaccagcctgggcaacatggcgagacccccatctctacatcagatttaaaaaaaaaaaaaagaagaagctatactaacacngaagctctatcaattctgaagatcagtattctgaataaataccaattaaagtattccacatgatctccaatgattaggagagtgtttggtgatagagctcttttagagatgtaaaacttttgtataaatttagaaaactaacattgacaaaggaagttactcataagttcaatagaatagcttctatttgttgaagtacgattttcctttagtcctaagtaatgcaattcttcattcagcatatagcgagacatttcttctgcctcatttgaaagacatcccagcacagcatatcacgctgtttcttaagtatttgtatttcctgtacctgaagtgtagcgaaaatgctactatgactcttcctggaatacacccacctaccttgaaccagattatggattggatatgtctacttctggatgcgaattttactgttgttgtaatgatgccagaagcaaagaggctactgataaatctttacaagcttgtaaaatctcagatatctgtttattctgagctcaacaagattgaagtaagttttcgggagctacagaaattaaatcaagaaaagaataatagaggattatattcaattgaagtgctggagctcttctgatattatcaattctccttcatagacattttataaagctcttttatgtgaactcttgcttcatccaggcaagaacggtgttttgtttgcgaccatctcagtgtcaagagaaacgtgtcagtgagtacctggaccatcacttaactgatgctccggggtaggactgcaggtttcacatgaacctgttctaggctgtggacattggtgtggagaggttctgcaattttttaaaaatatgtaactgggttgattttaagtaaaattatttgtgtattgataaaagtctaatttcttatcatgtgttttgaattttttcttttaataaaaaatgaccattgaagcagtga

SEQ ID NO: 295568 - DNA, 1059 bp, Homo sapiens
caaaattttgatgcttaggaaatgaaatttttcccaaaagcttggtgataaggattaacctcttgctttcaactaccatcatagcattggtgatgacagtcttcaagaaacagatgttaatatggagtcagtttttgactatagtataaattctgtacatgatgagaaaatggaagagcaaactgaaattcttcaaaatggcttcaatcctgaagaagataaatgcaataactgtgatcaagagttaaataaaaagccccaggacgaaacaaaggagagcacttcatgccctgtggtacaaaaaagagcagctctacttaatgcaattcttcattcagcatatagcgagacatttcttctgcctcatttgaaagacatcccagcacagcatatcacgctgtttcttaagtatttgtatttcctgtacctgaagtgtagcgaaaatgctactatgactcttcctggaatacacccacctaccttgaaccagattatggattggatatgtctacttctggatgcgaattttactgttgttgtaatgatgccagaagcaaagaggctactgataaatctttacaagcttgtaaaatctcagatatctgtttattctgagctcaacaagattgaagtaagttttcgggagctacagaaattaaatcaagaaaagaataatagaggattatattcaattgaagtgctggagctcttctgatattatcaattctccttcatagacattttataaagctcttttatgtgaactcttgcttcatccaggcaagaacggtgttttgtttgcgaccatctcagtgtcaagagaaacgtgtcagtgagtacctggaccatcacttaactgatgctccggggtaggactgcaggtttcacatgaacctgttctaggctgtggacattggtgtggagaggttctgcaattttttaaaaatatgtaactgggttgattttaagtaaaattatttgtgtattgataaaagtctaatttcttatcatgtgttttgaattttttcttttaataaaaaatgaccattgaagcagtga

SEQ ID NO: 295569 - DNA, 1457 bp, Homo sapiens
agcgggccgggagtgagcgcggccgtacttaggtttgctcaaaatggcagcgctggaggaagaattcacgttgtcttcggtagtcctgagcgccgggcctgaaggactcctaggcgtggagcagagcgacaaaacagaccagtttctagtgacagacagcggcaggacagtcatcctctataaggtttctgatcagaaacccttggggagctggtcagtgaaacaaggtcaaattataacatgtccagctgtgtgcaactttcaaactggagagtatgttgttgtacacgataataaggttttaagaatatggaataatgaagatgtaaacctggataaagtatttaaagctacattgtcagcagaagtatataggatactttcagtgcaagggacagaacccttggtgctcttcaaggaaggtgctgttcgtggtttagaggccttgcttgcagacccccagcagaaaattgaaactgttatctctgatgaagaagtgattaaatggacaaagtttttcgtagtattcagacatcctgttttaatttttattactgaaaaacatggaaattactttgcttacgtgcaaatgtttaactcacgtatcttaaccaaatatacactcttacttgtgatcaagagttaaataaaaagccccaggacgaaacaaaggagagcacttcatgccctgtggtacaaaaaagagcagctctacttaatgcaattcttcattcagcatatagcgagacatttcttctgcctcatttgaaagacatcccagcacagcatatcacgctgtttcttaagtatttgtatttcctgtacctgaagtgtagcgaaaatgctactatgactcttcctggaatacacccacctaccttgaaccagattatggattggatatgtctacttctggatgcgaattttactgttgttgtaatgatgccagaagcaaagaggctactgataaatctttacaagcttgtaaaatctcagatatctgtttattctgagctcaacaagattgaagtaagttttcgggagctacagaaattaaatcaagaaaagaataatagaggattatattcaattgaagtgctggagctcttctgatattatcaattctccttcatagacattttataaagctcttttatgtgaactcttgcttcatccaggcaagaacggtgttttgtttgcgaccatctcagtgtcaagagaaacgtgtcagtgagtacctggaccatcacttaactgatgctccggggtaggactgcaggtttcacatgaacctgttctaggctgtggacattggtgtggagaggttctgcaattttttaaaaatatgtaactgggttgattttaagtaaaattatttgtgtattgataaaagtctaatttcttatcatgtgttttgaattttttcttttaataaaaaatgaccattgaagcagtga

SEQ ID NO: 295570 - DNA, 1276 bp, Homo sapiens
agcgggccgggagtgagcgcggccgtacttaggtttgctcaaaatggcagcgctggaggaagaattcacgttgtcttcggtagtcctgagcgccgggcctgaaggactcctaggcgtggagcagagcgacaaaacagaccagtttctagtgacagacagcggcaggacagtcatcctctataaggtttctgatcagaaacccttggggagctggtcagtgaaacaaggtcaaattataacatgtccagctgtgtgcaactttcaaactggagagtatgttgttgtacacgataataaggttttaagaatatggaataatgaagatgtaaacctggataaagtatttaaagctacattgtcagcagaagtatataggatactttcagtgcaagggacagaacccttggtgctcttcaaggaaggtgctgttcgtggtttagaggccttgcttgcagacccccagcagaaaattgaaactgttatctctgatgaagaagtgattaaatggacaaagtttttcgtagtattcagacatcctgttttaatttttattactgaaaaacatggaaattactttgcttacgtgcaaatgtttaactcacgtatcttaaccaaatatacactcttacttggacaagacgaaaactctgttataaagagttttactgcatctgtagatcggaaattcatctctttgatgtcattaagctctgatggttgtatatatgaaaccttgataccaatacgtccagctgacccagaaaaaaatcagagcttagttaaatcactgctgctcaaggctgttgtatctggtaacgctcgaaatggagttgcactcactgccctggatcaggatcacgtcgcagtcctaggaagtccactagcagcttctaagggtaactgacatccaattcattaagaaggcctttgtatgtttccttcacggtgtaccttttagtcttccttttctttttcatttcgttattacccagactaattcattctctttatcagcatactcaattttttttgtgccttcctaattcttcttgaattggtttttatttttattttgcattgatctttcaaaaacacttcttgctatcaccaccatgctcataactatgtcataaagaaataaaaatggcgaatatactagtcaccatcatactagcctgcaggtatttgaaacattagtaagcctacatttgaggattggattcttggcaacatttcacatcatggaaatccactggacatgaacaccttgaaatgt

SEQ ID NO: 295571 - DNA, 1707 bp, Homo sapiens
ggcacgagggagagatcgtccaggaggcggtgttgatgcggcaaagggcaacaggaagggcattaggacttgaaatcggagacgcacgcaggggagggagtcagtgtcggaacctggtaggccctgggagaactccggcttttcgtctgcgtgagctggagaagagccgaaggtttctgcgcacagcacggacctgcgtgcctcagctttaaggaaatcaccgtggccgccgctgtgaacgcagagaagggcgcgagcgtgggagcaggaacccaaggcggtgggaaacggtggggctttctgagtgtattggaaagtagagcccacagatctgctgcagaccagaaaggggcgcgagaaagagcggacagaggcagacgccggggctggcggcgatggagcagcagtcggaggacgcggaaggcctgcgagagtcgcccgcggcccagcgccggccttcgggtcccaccttgcgggtgatgttgtgcacgtaggggcacgtgttgcaggcgaagcggtggcagcgttgtccctcctccacgatcagcccgttcccgcagccggggcagaacagcagcatggtctcgaactccgcaggctccaactcccggcagctcccactgccgctcagcgccgatgcgccgcccgcctcgagctcacattggtcctggcagccttcccgccacaccaaccaaccaatagacagggcgattctgcgctcccggccctgctgcaggctgtctcgcacttgtcattggtcactgcagccgccccaccccccccggcgcgccagtggctgggcggcctcgctggggcgggccgcagttcctgcgcgtgcgcgcttggcctccctagtgcgggctggcagtgcgggcagagcccggctgagaggggcggccctggaggagacggaggccgcgggtgggcccgaggcgcaagaggaagatgaggacgaagaagaggcgctgccgcactccgaggccatggacgtgttccaggagggtctggctatggtggtgcaggacccgctgctctgcgatctgccgatccaggttactctggaagaagtcaactcccaaatagccctagaatacggccaggcaatgacggtccgagtgtgcaagatggatggagaagtaatgcccgtggttgtagtgcagagtgccacagtcctggacctgaagaaggccatccagagatacgtgcagctcaagcaggagcgtgaagggggcattcagcacatcagctggtcctacgtgtggaggacgtaccatctgacctctgcaggagagaaactcacggaagacagaaagaagctccgagactacggcatccggaatcgagacgaggtttccttcatcaaaaagctgaggcaaaagtgagcctccagacaggacaaccctcttcatcactggtggctgagctttttcccagcaggaatgggtcctcgaatcatcgtgcctctttcacagaaaggacgttgtggtggcctcaccccaggcatgcccaacaggaactgtcagcataaacctgggggccctcaggactaggacagggtgagccagtgctccctcctttcatgtacttggcctgagactgacctctccctaggtccaaatgccctagtcacatggcagacccacggcctggccccactgtataaaataaacctgtttgcttcttagtttgaaaagtagaaagccacag

SEQ ID NO: 295572 - DNA, 1222 bp, Homo sapiens
ggcacgagggagagatcgtccaggaggcggtgttgatgcggcaaagggcaacaggaagggcattaggacttgaaatcggagacgcacgcaggggagggagtcagtgtcggaacctggtaggccctgggagaactccggcttttcgtctgcgtgagctggagaagagccgaaggtttctgcgcacagcacggacctgcgtgcctcagctttaaggaaatcaccgtggccgccgctgtgaacgcagagaagggcgcgagcgtgggagcaggaacccaaggcggtgggaaacggtggggctttctgagtgtattggaaagtagagcccacagatctgctgcagaccagaaaggggcgcgagaaagagcggacagaggcagacgccggggctggcggcgatggagcagcagtcggaggacgcggaaggcctgcgagagtcgcccgcggcccagcgccggccttcgggtcccaccttgcgggtgatgttgtgcacgtaggggcacgtgttgcaggcgaagcggtggcagcgttgtccctcctccacgatcagcccgttcccgcagccggggcagaacagcagcatggtctcgaactccgcaggctccaactcccggcagctcccactgccgctcagcgccgatgcgccgcccgcctcgagctcacattggtcctggcagccttcccgccacaccaaccaaccaatagacagggcgattctgcgctcccggccctgctgcaggctgtctcgcacttgtcattggtcactgcagccgccccaccccccccggcgcgccagtggctgggcggcctcgctggggcgggccgcagttcctgcgcgtgcgcgcttggcctccctagtgcgggctggcagtgcgggcagagcccggctgagaggggcggccctggaggagacggaggccgcgggtgggcccgaggcgcaagaggaagatgaggacgaagaagaggcgctgccgcactccgaggccatggacgtgttccaggagggtctggctatggtggtgcaggacccgctgctctgcgatctgccgatccaggttactctggaagaagtcaactcccaaatagccctagaatacggccaggcaatgacggtccgagtgtgcaagatggatggagaagtaatgcctacttgggaggctgaggtaggagtatcatttacacctggaaggttgaggctgcagtgagctgtgatcgtgccactgca

SEQ ID NO: 295573 - DNA, 1976 bp, Homo sapiens
ggcacgagggagagatcgtccaggaggcggtgttgatgcggcaaagggcaacaggaagggcattaggacttgaaatcggagacgcacgcaggggagggagtcagtgtcggaacctggtaggccctgggagaactccggcttttcgtctgcgtgagctggagaagagccgaaggtttctgcgcacagcacggacctgcgtgcctcagctttaaggaaatcaccgtggccgccgctgtgaacgcagagaagggcgcgagcgtgggagcaggaacccaaggcggtgggaaacggtggggctttctgagtgtattggaaagtagagcccacagatctgctgcagaccagaaaggggcgcgagaaagagcggacagaggcagacgccggggctggcggcgatggagcagcagtcggaggacgcggaaggcctgcgagagtcgcccgcggcccagcgccggccttcgggtcccaccttgcgggtgatgttgtgcacgtaggggcacgtgttgcaggcgaagcggtggcagcgttgtccctcctccacgatcagcccgttcccgcagccggggcagaacagcagcatggtctcgaactccgcaggctccaactcccggcagctcccactgccgctcagcgccgatgcgccgcccgcctcgagctcacattggtcctggcagccttcccgccacaccaaccaaccaatagacagggcgattctgcgctcccggccctgctgcaggctgtctcgcacttgtcattggtcactgcagccgccccaccccccccggcgcgccagtggctgggcggcctcgctggggcgggccgcagttcctgcgcgtgcgcgcttggcctccctagtgcgggctggcagtgcgggcagagcccggctgagaggggcggccctggaggagacggaggccgcgggtgggcccgaggcgcaagaggaagatgaggacgaagaagaggcgctgccgcactccgaggccatggacgtgttccaggagggtctggctatggtggtgcaggacccgctgctctgcgatctgccgatccaggttactctggaagaagtcaactcccaaatagccctagaatacggccaggcaatgacggtccgagtgtgcaagatggatggagaagtaatgcccgtggttgtagtgcagagtgccacagtcctggacctgaagaaggccatccagagatacgtgcagctcaagcaggagcgtgaagggggcattcagcacatcagctggtcctacgtgtggaggacgtaccatctgacctctgcaggagagaaactcacggaagacagaaagaagctccgagactacggcatccggaatcgagacgaggtttccttcatcaaaaagctgaggcaaaagtgagcctccagacaggacaaccctcttcatcactggtggctgagctttttcccagcaggaatgggtcctcgaatcatcgtgcctctttcacagaaaggacgttgtggtggcctcaccccaggcatgcccaacaggaactgtcagcataaacctgggggccctcaggactaggacagggtgagccagtgctccctcctttcatgtacttggcctgagactgacctctccctaggtccaaatgccctagtcacatggcagacccacggcctggccccactgtataaaataaacctgtttgcttcttagtttgaaaagtagaaagccacaggaaactcgtaccaaaacccaaggtagaaaagtagcttgcggggcggcggttggcgcaatacaggggtcctctacagcatcagagggggcgccgcgggaccagataagctatcctgaaaaggcaggaagccggcttcccagagggaccgggggccaagacacataccgggatacttccaatgaaacccgcgcggctgacagacgagtgtgaaagacaccgagggggcgcgggccgaacggcgttaacagggcctccgggggaataaatcg

SEQ ID NO: 295574 - DNA, 1918 bp, Homo sapiens
ggcacgagggagagatcgtccaggaggcggtgttgatgcggcaaagggcaacaggaagggcattaggacttgaaatcggagacgcacgcaggggagggagtcagtgtcggaacctggtaggccctgggagaactccggcttttcgtctgcgtgagctggagaagagccgaaggtttctgcgcacagcacggacctgcgtgcctcagctttaaggaaatcaccgtggccgccgctgtgaacgcagagaagggcgcgagcgtgggagcaggaacccaaggcggtgggaaacggtggggctttctgagtgtattggaaagtagagcccacagatctgctgcagaccagaaaggggcgcgagaaagagcggacagaggcagacgccggggctggcggcgatggagcagcagtcggaggacgcggaaggcctgcgagagtcgcccgcggcccagcgccggccttcgggtcccaccttgcgggtgatgttgtgcacgtaggggcacgtgttgcaggcgaagcggtggcagcgttgtccctcctccacgatcagcccgttcccgcagccggggcagaacagcagcatggtctcgaactccgcaggctccaactcccggcagctcccactgccgctcagcgccgatgcgccgcccgcctcgagctcacattggtcctggcagccttcccgccacaccaaccaaccaatagacagggcgattctgcgctcccggccctgctgcaggctgtctcgcacttgtcattggtcactgcagccgccccaccccccccggcgcgccagtggctgggcggcctcgctggggcgggccgcagttcctgcgcgtgcgcgcttggcctccctagtgcgggctggcagtgcgggcagagcccggctgagaggggcggccctggaggagacggaggccgcgggtgggcccgaggcgcaagaggaagatgaggacgaagaagaggcgctgccgcactccgaggccatggacgtgttccaggagggtctggctatggtggtgcaggacccgctgctctgcgatctgccgatccaggttactctggaagaagtcaactcccaaatagccctagaatacggccaggcaatgacggtccgagtgtgcaagatggatggagaagtaatgcccgtggttgtagtgcagagtgccacagtcctggacctgaagaaggccatccagagatacgtgcagctcaagcaggagcgtgaagggggcattcagcacatcagctggtcctacgtgtggaggacgtaccatctgacctctgcaggagagaaactcacggaagacagaaagaagctccgagactacggcatccggaatcgagacgaggtttccttcatcaaaaagctgaggcaaaagtgagcctccagacaggacaaccctcttcatcactggtggctgagctttttcccagcaggaatgggtcctcgaatcatcgtgcctctttcacagaaaggacgttgtggtggcctcaccccaggcatgcccaacaggaactgtcagcataaacctgggggccctcaggactaggacagggtgagccagtgctccctcctttcatgtacttggcctgagactgacctctccctaggtccaaatgccctagtcacatggcagacccacggcctggccccactgtataaaataaacctgtttgcttcttagtttgaaaagtagaaagccacagtaacctgggtagcaaagactgagattgccccatcacagaggtgagttaaggggagagaattggtacaggcgagtcctatagtccaagatggcgccacaccaccaaagccttgaggccacaccactccccaaaccacacaactgtgttaccatgatctccacagcaaggaggaaataaaagcagagcggctttagggtttgcatcctggagc

SEQ ID NO: 295575 - DNA, 2363 bp, Homo sapiens
ggcacgagggagagatcgtccaggaggcggtgttgatgcggcaaagggcaacaggaagggcattaggacttgaaatcggagacgcacgcaggggagggagtcagtgtcggaacctggtaggccctgggagaactccggcttttcgtctgcgtgagctggagaagagccgaaggtttctgcgcacagcacggacctgcgtgcctcagctttaaggaaatcaccgtggccgccgctgtgaacgcagagaagggcgcgagcgtgggagcaggaacccaaggcggtgggaaacggtggggctttctgagtgtattggaaagtagagcccacagatctgctgcagaccagaaaggggcgcgagaaagagcggacagaggcagacgccggggctggcggcgatggagcagcagtcggaggacgcggaaggcctgcgagagtcgcccgcggcccagcgccggccttcgggtcccaccttgcgggtgatgttgtgcacgtaggggcacgtgttgcaggcgaagcggtggcagcgttgtccctcctccacgatcagcccgttcccgcagccggggcagaacagcagcatggtctcgaactccgcaggctccaactcccggcagctcccactgccgctcagcgccgatgcgccgcccgcctcgagctcacattggtcctggcagccttcccgccacaccaaccaaccaatagacagggcgattctgcgctcccggccctgctgcaggctgtctcgcacttgtcattggtcactgcagccgccccaccccccccggcgcgccagtggctgggcggcctcgctggggcgggccgcagttcctgcgcgtgcgcgcttggcctccctagtgcgggctggcagtgcgggcagagcccggctgagaggggcggccctggaggagacggaggccgcgggtgggcccgaggcgcaagaggaagatgaggacgaagaagaggcgctgccgcactccgaggccatggacgtgttccaggagggtctggctatggtggtgcaggacccgctgctctgcgatctgccgatccaggttactctggaagaagtcaactcccaaatagccctagaatacggccaggcaatgacggtccgagtgtgcaagatggatggagaagtaatgcccgtggttgtagtgcagagtgccacagtcctggacctgaagaaggccatccagagatacgtgcagctcaagcaggagcgtgaagggggcattcagcacatcagctggtaagtggaacaacattcccttcattatagcccttcgtggggctagtgcccttcttggcactgtcaccaggcaccacctggaaacagctctcagctctgcatgagtacagcaccactgaagtgatgagctccctgtcacaagagtgatgagctccctgtcacagacagtgcgggtcgttctgtgcctgggactcctgcctcggccatccccaacattctgctcttccatcggcatcaccccatccgagctgctgggtatcttcacttggggacactgtcgggaatttccagtgtgtctggaagtggcctccctagttttggatggtacacctgtaggggctcccatccccttctcacctgggtgctgtcagccctcactctcctattggatcaactatcctgttcactgagtctcaacactgtcgcctgttgcattagcaaggtttgtttggccaagccgccccagacagccctctgagaacagagcctccttgtagctgcctcagacccaatctgcacattgtacagaacagcccaggtagggaggacagctgccccaggtcccataggactgcatgcctcaagcccacgtcatgcagagccactcagctcaccctgctcagggcacgtggtttacctgcattcccctcttgcaggtcctacgtgtggaggacgtaccatctgacctctgcaggagagaaactcacggaagacagaaagaagctccgagactacggcatccggaatcgagacgaggtttccttcatcaaaaagctgaggcaaaagtgagcctccagacaggacaaccctcttcatcactggtggctgagctttttcccagcaggaatgggtcctcgaatcatcgtgcctctttcacagaaaggacgttgtggtggcctcaccccaggcatgcccaacaggaactgtcagcataaacctgggggccctcaggactaggacagggtgagccagtgctccctcctttcatgtacttggcctgagactgacctctccctaggtccaaatgccctagtcacatggcagacccacggcctggccccactgtataaaataaacctgtttgcttcttagtttgaaaagtagaaagccacag

SEQ ID NO: 295576 - DNA, 2123 bp, Homo sapiens
tcgtgtttcggtgagtgtggcggagatggagagccgggatcccgcccagccgatgtcgcctggagaagcgacgcagagtggcgcccggcctgccgaccgctatggcctattgaagcacagtcgcgagttcttggacttcttctgggacattgcgaagcctgagcaggagacgcgacttgcggccacggagaagctgctggagtatctgcgtggcaggccgaaggggtccgagatgaaatatgccctgaagcgtctaatcacgggactcggggtcgggcgagaaacagcccggccctgctacagtttggccctggcacagctgttacagtcttttgaagacctccccttgtgcagcatcctgcagcagatacaagaaaaatatgacctgcatcaggtgaagaaggcaatgctgagacctgctctctttgcaaacctgtttggagtgctcgccctctttcagtcaggtcggctggtgaaggaccaggaggcactgatgaagtcggtgaagctgctgcaggccctggcccagtaccaaaaccacttgcaggagcagccccggaaggccctggtggacatcctctccgaggtctcgaaggccacattgcaggagatcctgccggaggtcctcaaagccgacttgaatataatactcagctcccctgaacagctagagctcttcctcctggcccagcagaaggtgccctccaagctcaagaagctggtgggatccgtgaacctattctcagatgagaatgtccccaggctggtgaatgtgctgaagatggccgcctcctctgtgaagaaggaccgcaagctgcccgccattgctctggacctgctccgcctggcgctcaaggaagacaagttcccacggttctggaaggaggtggtggaacaagggctgctgaagatgcagttctggccagccagctacctgtgtttccacctgctgggcgcggccctgcccctgctgaccaaggagcagctgcacctggtgatgcagggagacgtgatccgccattacggggagcacgtgtgcactgctaagctcccaaagcagttcaagtttgccccagagatggacgattacgtgggcaccttcctagaggggtgccaggatgaccctgagcggcagctggccgtgctagtggccttctcatctgtcaccaaccaaggcctccctgtcacgcctactttctggcgggtcgtgcggttcctgagccctccggccctgcagggctatgtggcctggctgcgggccatgtttctccagccagacctggactccttggttgacttcagcaccaacaaccagaagaaagcccaggattcatcgctccacatgcctgagcgagctgtgttccggctgaggaaatggatcatctttcgattggtgagcattgtggacagcctgcacctggagatggaggaggccttgactgagcaggtggccaggttttgtttgttccactcgttctttgtcacaaagaagcccacatcccagatccctgagacaaagcacccgttctccttccctttggaaaaccaggcccgagaggctgtcagcagtgccttcttcagtctgttgcagaccctcagcacgcagttcaagcaggcaccgggccagacccagggtgggcagccctggacctaccacctggtgcagttcgcagacctcctgttgaatcacagccacaacgtgaccaccgtgacacccttcactgcgcagcagcgccaggcctgggaccggatgctgcagactctgaaggagctggaggcccactccgcagaggccagggctgctgccttccagcaccttctgctcctcgtgggcatccacctcctcaaggtactggggcctgggagggaggggctgtgagcctggggttctatggcacaatgggccccctaccgagaggcttttgagggctgtgcgggtttccaggaaaggttctgggggagttaagttgggaggtttttgaagccaactttgtcacaggtggaaacatccctccggccacttagcggcaccagctggtgtcctaggctttccatgcaggatctcgtaatccccacagctttgaggcagacaccccctctccatgtttgacatggagaaacta

SEQ ID NO: 295577 - DNA, 777 bp, Homo sapiens
  misc_feature (21)..(22): n is a, c, g, or t
tcggcggtacggcccgagtanntgatatcgtcgaccacgccgcctcttctgactggatattgtgaggccccagagcgctgtcctggtgagcacgggcacagctgtccctgccccactggcttggctgtgggtacatggtctctgaagggggtggccgtgccctggcccctgccacacagtgaacacacaggagctgagggggcagggccagcctcactcccgcagccactgctgcccatctggccacacacaggatgcccctggtagtgtctgctctggtgccagggctgttgggggcaggctggaggaagatggcactaagccaataatgggcaggaattgtcccaacctgaggtcccacctctatccagctgggaggccttggtgtccccacctgcacacaaaggcacaggagcaggtagtcacagagcccagagcagcaggcagcctcacacgctgcccacagcagtgcccagcgggcccccgagccctcatgcatccctgagccgtgagcacccaacgtgccaaggctcctgccacccacctttgcccacccacaggcctgcctgctgctccagaagaccctgtccatgcgggaggtgaggtcgtgctttgaggaccccgagtggaagcagctgatgggccaggtcctagcaaaggtcaccgaggtaacagccggggggcgccctttccccaccccctcagaatcagttctccgggagaccgatctctgggaaagaagtgaggattggagcctgagtccagagtcgggagaac

SEQ ID NO: 295578 - DNA, 4663 bp, Homo sapiens
tcgtgtttcggtgagtgtggcggagatggagagccgggatcccgcccagccgatgtcgcctggagaagcgacgcagagtggcgcccggcctgccgaccgctatggcctattgaagcacagtcgcgagttcttggacttcttctgggacattgcgaagcctgagcaggagacgcgacttgcggccacggagaagctgctggagtatctgcgtggcaggccgaaggggtccgagatgaaatatgccctgaagcgtctaatcacgggactcggggtcgggcgagaaacagcccggccctgctacagtttggccctggcacagctgttacagtcttttgaagacctccccttgtgcagcatcctgcagcagatacaagaaaaatatgacctgcatcaggtgaagaaggcaatgctgagacctgctctctttgcaaacctgtttggagtgctcgccctctttcagtcaggtcggctggtgaaggaccaggaggcactgatgaagtcggtgaagctgctgcaggccctggcccagtaccaaaaccacttgcaggagcagccccggaaggccctggtggacatcctctccgaggtctcgaaggccacattgcaggagatcctgccggaggtcctcaaagccgacttgaatataatactcagctcccctgaacagctagagctcttcctcctggcccagcagaaggtgccctccaagctcaagaagctggtgggatccgtgaacctattctcagatgagaatgtccccaggctggtgaatgtgctgaagatggccgcctcctctgtgaagaaggaccgcaagctgcccgccattgctctggacctgctccgcctggcgctcaaggaagacaagttcccacggttctggaaggaggtggtggaacaagggctgctgaagatgcagttctggccagccagctacctgtgtttccacctgctgggcgcggccctgcccctgctgaccaaggagcagctgcacctggtgatgcagggagacgtgatccgccattacggggagcacgtgtgcactgctaagctcccaaagcagttcaagtttgccccagagatggacgattacgtgggcaccttcctagaggggtgccaggatgaccctgagcggcagctggccgtgctagtggccttctcatctgtcaccaaccaaggcctccctgtcacgcctactttctggcgggtcgtgcggttcctgagccctccggccctgcagggctatgtggcctggctgcgggccatgtttctccagccagacctggactccttggttgacttcagcaccaacaaccagaagaaagcccaggattcatcgctccacatgcctgagcgagctgtgttccggctgaggaaatggatcatctttcgattggtgagcattgtggacagcctgcacctggagatggaggaggccttgactgagcaggtggccaggttttgtttgttccactcgttctttgtcacaaagaagcccacatcccagatccctgagacaaagcacccgttctccttccctttggaaaaccaggcccgagaggctgtcagcagtgccttcttcagtctgttgcagaccctcagcacgcagttcaagcaggcaccgggccagacccagggtgggcagccctggacctaccacctggtgcagttcgcagacctcctgttgaatcacagccacaacgtgaccaccgtgacacccttcactgcgcagcagcgccaggcctgggaccggatgctgcagactctgaaggagctggaggcccactccgcagaggccagggctgctgccttccagcaccttctgctcctcgtgggcatccacctcctcaagtcccctgcagagagctgtgacctgctgggtgacatccagacctgcatcaggaaaagtctgggagagaagccccgccggagccgcaccaagaccatcgacccccaggaacccccgtgggtagaggtgctggtggagatcttgctggccctgttggcccagcccagccacctcatgcgccaggtggcccggagcgtgtttggccacatctgctcccacctgaccccgcgtgccctgcagctaattctggatgtgctgaaccccgagaccagtgaggatgagaatgaccgtgtggtggtgacggacgattctgatgagcggcggctgaagggtgcagaggacaagagcgaggaaggtgaggacaacagaagctcagagagtgaagaggagagcgagggggaggagagcgaggaggaggagcgcgacggggacgtggatcagggcttccgggaacagctgatgaccgtgctgcaggctgggaaggcgctgggtggagaggacagtgagaacgaggaggagctgggggatgaggccatgatggccctggaccagagcctcgccagcctctttgccgagcagaagctgcgtatccaggcccggcgagacgagaagaacaagctgcagaaggagaaggctctgcggcgcgacttccagatccgggtgctggacctggtggaggtgctagtgaccaagcagcccgagaatgccctggtcctggagctgctggagccgctgctgagcatcatccggcgcagcctgcgcagcagcagctccaaacaggagcaggaccttctgcacaagacggcgcgcatcttcacgcaccacctgtgccgtgcccggcgctactgccacgacttgggtgagcgcgcaggggccctgcacgcccaggtggagcggttggtgcagcaggctggccgccagcccgactcccccaccgccctctaccacttcaacgcctctctctacctgctccgggtcttgaagggcaacactgctgagggctgcgtgcatgagacacaggagaagcagaaagctggcactgaccccagccacatgcccacgggcccgcaggctgccagctgcttggacttgaacctggtgacccgggtgtactcgacagcactgagctccttcctgaccaagcgcaacagccccctcacagttcccatgttcctcagcctcttctcccggcacccggtgctctgtcagagcctgctccccatcctggtccagcatatcacgggcccggtgcggccccgtcatcaggcctgcctgctgctccagaagaccctgtccatgcgggaggtgaggtcgtgctttgaggaccccgagtggaagcagctgatgggccaggtcctagcaaaggtcaccgagaacttgcgcgtgctgggggaggcgcagaccaaggcgcagcatcagcaggcactgtcctccctggagctgctcaacgttctcttcaggacctgcaaacatgagaagctgaccttggacctgacggtgctcctgggtgtgctgcaggggcaacagcagagcctacagcagggggcacactccaccggctccagccgcctgcacgacctctactggcaggccatgaaaaccctgggagtccagcgccccaagttggagaagaaggatgccaaggagatccccagtgccacccagagccccatcagtaagaagcggaagaaaaagggattcttgccagagacgaagaagcgcaagaaacgcaagtcagaggatggcacgccagcggaggatggcacacctgcagccaccggcgggagccagccccccagcatgggcaggaagaagaggaacaggacaaaggctaaggtcccagcccaggcaaacgggacgccaaccaccaagagtccagcccctggcgcccccacccggagccccagcacccctgccaaatccccaaaactgcagaagaaaaaccagaagccgtcccaggtgaatggagctcccgggtcccccacggaacctgcaggccaaaagcagcatcagaaggctcttcccaaaaagggggtcttgggcaaatcaccactgtccgcgctggcacggaaaaaggcaaggctgtctttggtcatcaggagtcccagcctgcttcagagtggggccaagaagaaagcacaggtgaggaaggcagggaagccctgagcacaggtacgggcccccctcagcccctgcctccatctgcctgagacgcctatttttttttttttttttaaaaccatgattttaatacgcaagctgtttctaaggcgctgccactggggagggtggctgttgccgcctgcccgggcatcctgctctggcaagcacagcctgagccattcctgcaggggtcccagggtgcagagacctccccacccccggttctgggctgggaccctggctccagggccatgtccagggctctggtgtttgcctgggttggtgcaggttgatgtgctggctgcaggcaggtgtgaccatctctcgtgcctgccacctctttgcccccaggcttttttgctgtgagggagccaccagggggtgatttaaataggtttatttcttcatttacaagaggaatatatttggcttctctcttaagactctgagattcacaatcagcagctctaaaaaataaaggagcagtttggcttccggaaggaagaggaggcaaaaaaaaaacagacagaataaacagagaaaaagaaagcatagtaataaaaataaaaataaaaaaagagggggggggggaaaaaatatggagggggagaaatatgtgaccctttttagaaagggcctaagagggagtataaa

SEQ ID NO: 295579 - DNA, 5439 bp, Homo sapiens
tcgtgtttcggtgagtgtggcggagatggagagccgggatcccgcccagccgatgtcgcctggagaagcgacgcagagtggcgcccggcctgccgaccgctatggcctattgaagcacagtcgcgagttcttggacttcttctgggacattgcgaagcctgagcaggagacgcgacttgcggccacggagaagctgctggagtatctgcgtggcaggccgaaggggtccgagatgaaatatgccctgaagcgtctaatcacgggactcggggtcgggcgagaaacagcccggccctgctacagtttggccctggcacagctgttacagtcttttgaagacctccccttgtgcagcatcctgcagcagatacaagaaaaatatgacctgcatcaggtgaagaaggcaatgctgagacctgctctctttgcaaacctgtttggagtgctcgccctctttcagtcaggtcggctggtgaaggaccaggaggcactgatgaagtcggtgaagctgctgcaggccctggcccagtaccaaaaccacttgcaggagcagccccggaaggccctggtggacatcctctccgaggtctcgaaggccacattgcaggagatcctgccggaggtcctcaaagccgacttgaatataatactcagctcccctgaacagctagagctcttcctcctggcccagcagaaggtgccctccaagctcaagaagctggtgggatccgtgaacctattctcagatgagaatgtccccaggctggtgaatgtgctgaagatggccgcctcctctgtgaagaaggaccgcaagctgcccgccattgctctggacctgctccgcctggcgctcaaggaagacaagttcccacggttctggaaggaggtggtggaacaagggctgctgaagatgcagttctggccagccagctacctgtgtttccacctgctgggcgcggccctgcccctgctgaccaaggagcagctgcacctggtgatgcagggagacgtgatccgccattacggggagcacgtgtgcactgctaagctcccaaagcagttcaagtttgccccagagatggacgattacgtgggcaccttcctagaggggtgccaggatgaccctgagcggcagctggccgtgctagtggccttctcatctgtcaccaaccaaggcctccctgtcacgcctactttctggcgggtcgtgcggttcctgagccctccggccctgcagggctatgtggcctggctgcgggccatgtttctccagccagacctggactccttggttgacttcagcaccaacaaccagaagaaagcccaggattcatcgctccacatgcctgagcgagctgtgttccggctgaggaaatggatcatctttcgattggtgagcattgtggacagcctgcacctggagatggaggaggccttgactgagcaggtggccaggttttgtttgttccactcgttctttgtcacaaagaagcccacatcccagatccctgagacaaagcacccgttctccttccctttggaaaaccaggcccgagaggctgtcagcagtgccttcttcagtctgttgcagaccctcagcacgcagttcaagcaggcaccgggccagacccagggtgggcagccctggacctaccacctggtgcagttcgcagacctcctgttgaatcacagccacaacgtgaccaccgtgacacccttcactgcgcagcagcgccaggcctgggaccggatgctgcagactctgaaggagctggaggcccactccgcagaggccagggctgctgccttccagcaccttctgctcctcgtgggcatccacctcctcaagtcccctgcagagagctgtgacctgctgggtgacatccagacctgcatcaggaaaagtctgggagagaagccccgccggagccgcaccaagaccatcgacccccaggaacccccgtgggtagaggtgctggtggagatcttgctggccctgttggcccagcccagccacctcatgcgccaggtggcccggagcgtgtttggccacatctgctcccacctgaccccgcgtgccctgcagctaattctggatgtgctgaaccccgagaccagtgaggatgagaatgaccgtgtggtggtgacggacgattctgatgagcggcggctgaagggtgcagaggacaagagcgaggaaggtgaggacaacagaagctcagagagtgaagaggagagcgagggggaggagagcgaggaggaggagcgcgacggggacgtggatcagggcttccgggaacagctgatgaccgtgctgcaggctgggaaggcgctgggtggagaggacagtgagaacgaggaggagctgggggatgaggccatgatggccctggaccagagcctcgccagcctctttgccgagcagaagctgcgtatccaggcccggcgagacgagaagaacaagctgcagaaggagaaggctctgcggcgcgacttccagatccgggtgctggacctggtggaggtgctagtgaccaagcagcccgagaatgccctggtcctggagctgctggagccgctgctgagcatcatccggcgcagcctgcgcagcagcagctccaaacaggagcaggaccttctgcacaagacggcgcgcatcttcacgcaccacctgtgccgtgcccggcgctactgccacgacttgggtgagcgcgcaggggccctgcacgcccaggtggagcggttggtgcagcaggctggccgccagcccgactcccccaccgccctctaccacttcaacgcctctctctacctgctccgggtcttgaagggcaacactgctgagggctgcgtgcatgagacacaggagaagcagaaagctggcactgaccccagccacatgcccacgggcccgcaggctgccagctgcttggacttgaacctggtgacccgggtgtactcgacagcactgagctccttcctgaccaagcgcaacagccccctcacagttcccatgttcctcagcctcttctcccggcacccggtgctctgtcagagcctgctccccatcctggtccagcatatcacgggcccggtgcggccccgtcatcaggcctgcctgctgctccagaagaccctgtccatgcgggaggtgaggtcgtgctttgaggaccccgagtggaagcagctgatgggccaggtcctagcaaaggtcaccgagaacttgcgcgtgctgggggaggcgcagaccaaggcgcagcatcagcaggcactgtcctccctggagctgctcaacgttctcttcaggacctgcaaacatgagaagctgaccttggacctgacggtgctcctgggtgtgctgcaggggcaacagcagagcctacagcagggggcacactccaccggctccagccgcctgcacgacctctactggcaggccatgaaaaccctgggagtccagcgccccaagttggagaagaaggatgccaaggagatccccagtgccacccagagccccatcagtaagaagcggaagaaaaagggattcttgccagagacgaagaagcgcaagaaacgcaagtcagaggatggcacgccagcggaggatggcacacctgcagccaccggcgggagccagccccccagcatgggcaggaagaagaggaacaggacaaaggctaaggtcccagcccaggcaaacgggacgccaaccaccaagagtccagcccctggcgcccccacccggagccccagcacccctgccaaatccccaaaactgcagaagaaaaaccagaagccgtcccaggtgaatggagctcccgggtcccccacggaacctgcaggccaaaagcagcatcagaaggctcttcccaaaaagggggtcttgggcaaatcaccactgtccgcgctggcacggaaaaaggcaaggctgtctttggtcatcaggagtcccagcctgcttcagagtggggccaagaagaaagcacaggtgaggaaggcagggaagccctgagcacaggtacgggcccccctcagcccctgcctccatctgcctgagacgcctatttttttttttttttttaaaaccatgattttaatacgcaagctgtttctaaggcgctgccactggggagggtggctgttgccgcctgcccgggcatcctgctctggcaagcacagcctgagccattcctgcaggggtcccagggtgcagagacctccccacccccggttctgggctgggaccctggctccagggccatgtccagggctctggtgtttgcctgggttggtgcaggttgatgtgctggctgcaggcaggtgtgaccatctctcgtgcctgccacctctttgcccccaggcttttttgctgtgagggagccaccagggggtgatttaaataggtttatttcttcatttacaagaggaatatatttggcttctctcttaagactctgagattcacaatcagcagctctaaaaaataaaggagcagtttggcttccggaaggaagaggaggcaacactcggacctggttcttgtacaacaagaaaacatcgctggggccccgctgaggctggagtgggggtggaggctggtctttggaggatgccacccccaccccatcctcttgtcaggccctcggggtaccccagagcttggtgggtgagtattccacctgcttacacaccactgaagccacagccagccagtaactaaggggcaagaagagcattgtccaagctggctcttggggggtcccccattggccacaaggcctcaccccccaccccacccccgcaccagaaccaccttgattgcagcagaagtgcagggagtgggtgacgcagggggctaagctcccccaaagcgggttggggctggtgtgaagttggcagctgcatcctggtgtgtgcatggatgggaggtgggtgatcgaaggcctggcccccccctggggtcacttggtggaatgccagcagccagtgtttgggtaggggccgcctctcccggggcctcagcctcagctctggggcaggaagctttgtggatagctgcttcctccagcagccggagccctggctactgccccatggattctgggaatggtctcctgggccctgcccctggaaaaggctcagctcagcctcggggaaggagtggggtcctggcttggggggtggtggcagggagagaagccctgcagagttgggctggtgtgcacctgccagagaccttgagcctgggggcacaggtggtgtacagctgcagccagggccttcacccctggtgatgccagcttgtcagaacagtccccatctgggacctccaggctgggagccaacccgagacagtgagacagtgtcctccagggagtacccagagacttgggcgcccagcttcatttgccaggttgcgtccaatatccccaaggtccg

SEQ ID NO: 295580 - DNA, 4976 bp, Homo sapiens
tcgtgtttcggtgagtgtggcggagatggagagccgggatcccgcccagccgatgtcgcctggagaagcgacgcagagtggcgcccggcctgccgaccgctatggcctattgaagcacagtcgcgagttcttggacttcttctgggacattgcgaagcctgagcaggagacgcgacttgcggccacggagaagctgctggagtatctgcgtggcaggccgaaggggtccgagatgaaatatgccctgaagcgtctaatcacgggactcggggtcgggcgagaaacagcccggccctgctacagtttggccctggcacagctgttacagtcttttgaagacctccccttgtgcagcatcctgcagcagatacaagaaaaatatgacctgcatcaggtgaagaaggcaatgctgagacctgctctctttgcaaacctgtttggagtgctcgccctctttcagtcaggtcggctggtgaaggaccaggaggcactgatgaagtcggtgaagctgctgcaggccctggcccagtaccaaaaccacttgcaggagcagccccggaaggccctggtggacatcctctccgaggtctcgaaggccacattgcaggagatcctgccggaggtcctcaaagccgacttgaatataatactcagctcccctgaacagctagagctcttcctcctggcccagcagaaggtgccctccaagctcaagaagctggtgggatccgtgaacctattctcagatgagaatgtccccaggctggtgaatgtgctgaagatggccgcctcctctgtgaagaaggaccgcaagctgcccgccattgctctggacctgctccgcctggcgctcaaggaagacaagttcccacggttctggaaggaggtggtggaacaagggctgctgaagatgcagttctggccagccagctacctgtgtttccacctgctgggcgcggccctgcccctgctgaccaaggagcagctgcacctggtgatgcagggagacgtgatccgccattacggggagcacgtgtgcactgctaagctcccaaagcagttcaagtttgccccagagatggacgattacgtgggcaccttcctagaggggtgccaggatgaccctgagcggcagctggccgtgctagtggccttctcatctgtcaccaaccaaggcctccctgtcacgcctactttctggcgggtcgtgcggttcctgagccctccggccctgcagggctatgtggcctggctgcgggccatgtttctccagccagacctggactccttggttgacttcagcaccaacaaccagaagaaagcccaggattcatcgctccacatgcctgagcgagctgtgttccggctgaggaaatggatcatctttcgattggtgagcattgtggacagcctgcacctggagatggaggaggccttgactgagcaggtggccaggttttgtttgttccactcgttctttgtcacaaagaagcccacatcccagatccctgagacaaagcacccgttctccttccctttggaaaaccaggcccgagaggctgtcagcagtgccttcttcagtctgttgcagaccctcagcacgcagttcaagcaggcaccgggccagacccagggtgggcagccctggacctaccacctggtgcagttcgcagacctcctgttgaatcacagccacaacgtgaccaccgtgacacccttcactgcgcagcagcgccaggcctgggaccggatgctgcagactctgaaggagctggaggcccactccgcagaggccagggctgctgccttccagcaccttctgctcctcgtgggcatccacctcctcaagtcccctgcagagagctgtgacctgctgggtgacatccagacctgcatcaggaaaagtctgggagagaagccccgccggagccgcaccaagaccatcgacccccaggaacccccgtgggtagaggtgctggtggagatcttgctggccctgttggcccagcccagccacctcatgcgccaggtggcccggagcgtgtttggccacatctgctcccacctgaccccgcgtgccctgcagctaattctggatgtgctgaaccccgagaccagtgaggatgagaatgaccgtgtggtggtgacggacgattctgatgagcggcggctgaagggtgcagaggacaagagcgaggaaggtgaggacaacagaagctcagagagtgaagaggagagcgagggggaggagagcgaggaggaggagcgcgacggggacgtggatcagggcttccgggaacagctgatgaccgtgctgcaggctgggaaggcgctgggtggagaggacagtgagaacgaggaggagctgggggatgaggccatgatggccctggaccagagcctcgccagcctctttgccgagcagaagctgcgtatccaggcccggcgagacgagaagaacaagctgcagaaggagaaggctctgcggcgcgacttccagatccgggtgctggacctggtggaggtgctagtgaccaagcagcccgagaatgccctggtcctggagctgctggagccgctgctgagcatcatccggcgcagcctgcgcagcagcagctccaaacaggagcaggaccttctgcacaagacggcgcgcatcttcacgcaccacctgtgccgtgcccggcgctactgccacgacttgggtgagcgcgcaggggccctgcacgcccaggtggagcggttggtgcagcaggctggccgccagcccgactcccccaccgccctctaccacttcaacgcctctctctacctgctccgggtcttgaagggcaacactgctgagggctgcgtgcatgagacacaggagaagcagaaagctggcactgaccccagccacatgcccacgggcccgcaggctgccagctgcttggacttgaacctggtgacccgggtgtactcgacagcactgagctccttcctgaccaagcgcaacagccccctcacagttcccatgttcctcagcctcttctcccggcacccggtgctctgtcagagcctgctccccatcctggtccagcatatcacgggcccggtgcggccccgtcatcaggcctgcctgctgctccagaagaccctgtccatgcgggaggtgaggtcgtgctttgaggaccccgagtggaagcagctgatgggccaggtcctagcaaaggtcaccgagaacttgcgcgtgctgggggaggcgcagaccaaggcgcagcatcagcaggcactgtcctccctggagctgctcaacgttctcttcaggacctgcaaacatgagaagctgaccttggacctgacggtgctcctgggtgtgctgcaggggcaacagcagagcctacagcagggggcacactccaccggctccagccgcctgcacgacctctactggcaggccatgaaaaccctgggagtccagcgccccaagttggagaagaaggatgccaaggagatccccagtgccacccagagccccatcagtaagaagcggaagaaaaagggattcttgccagagacgaagaagcgcaagaaacgcaagtcagaggatggcacgccagcggaggatggcacacctgcagccaccggcgggagccagccccccagcatgggcaggaagaagaggaacaggacaaaggctaaggtcccagcccaggcaaacgggacgccaaccaccaagagtccagcccctggcgcccccacccggagccccagcacccctgccaaatccccaaaactgcagaagaaaaaccagaagccgtcccaggtgaatggagctcccgggtcccccacggaacctgcaggccaaaagcagcatcagaaggctcttcccaaaaagggggtcttgggcaaatcaccactgtccgcgctggcacggaaaaaggcaaggctgtctttggtcatcaggagtcccagcctgcttcagagtggggccaagaagaaagcacagactctgagattcacaatcagcagctctaaaaaataaaggagcagtttggcttccggaaggaagaggaggcaacactcggacctggttcttgtacaacaagaaaacatcgctggggccccgctgaggctggagtgggggtggaggctggtctttggaggatgccacccccaccccatcctcttgtcaggccctcggggtaccccagagcttggtgggtgagtattccacctgcttacacaccactgaagccacagccagccagtaactaaggggcaagaagagcattgtccaagctggctcttggggggtcccccattggccacaaggcctcaccccccaccccacccccgcaccagaaccaccttgattgcagcagaagtgcagggagtgggtgacgcagggggctaagctcccccaaagcgggttggggctggtgtgaagttggcagctgcatcctggtgtgtgcatggatgggaggtgggtgatcgaaggcctggcccccccctggggtcacttggtggaatgccagcagccagtgtttgggtaggggccgcctctcccggggcctcagcctcagctctggggcaggaagctttgtggatagctgcttcctccagcagccggagccctggctactgccccatggattctgggaatggtctcctgggccctgcccctggaaaaggctcagctcagcctcggggaaggagtggggtcctggcttggggggtggtggcagggagagaagccctgcagagttgggctggtgtgcacctgccagagaccttgagcctgggggcacaggtggtgtacagctgcagccagggccttcacccctggtgatgccagcttgtcagaacagtccccatctgggacctccaggctgggagccaacccgagacagtgagacagtgtcctccagggagtacccagagacttgggcgcccagcttcatttgccaggttgcgtccaatatccccaaggtccg

SEQ ID NO: 295581 - DNA, 4584 bp, Homo sapiens
tcgtgtttcggtgagtgtggcggagatggagagccgggatcccgcccagccgatgtcgcctggagaagcgacgcagagtggcgcccggcctgccgaccgctatggcctattgaagcacagtcgcgagttcttggacttcttctgggacattgcgaagcctgagcaggagacgcgacttgcggccacggagaagctgctggagtatctgcgtggcaggccgaaggggtccgagatgaaatatgccctgaagcgtctaatcacgggactcggggtcgggcgagaaacagcccggccctgctacagtttggccctggcacagctgttacagtcttttgaagacctccccttgtgcagcatcctgcagcagatacaagaaaaatatgacctgcatcaggtgaagaaggcaatgctgagacctgctctctttgcaaacctgtttggagtgctcgccctctttcagtcaggtcggctggtgaaggaccaggaggcactgatgaagtcggtgaagctgctgcaggccctggcccagtaccaaaaccacttgcaggagcagccccggaaggccctggtggacatcctctccgaggtctcgaaggccacattgcaggagatcctgccggaggtcctcaaagccgacttgaatataatactcagctcccctgaacagctagagctcttcctcctggcccagcagaaggtgccctccaagctcaagaagctggtgggatccgtgaacctattctcagatgagaatgtccccaggctggtgaatgtgctgaagatggccgcctcctctgtgaagaaggaccgcaagctgcccgccattgctctggacctgctccgcctggcgctcaaggaagacaagttcccacggttctggaaggaggtggtggaacaagggctgctgaagatgcagttctggccagccagctacctgtgtttccacctgctgggcgcggccctgcccctgctgaccaaggagcagctgcacctggtgatgcagggagacgtgatccgccattacggggagcacgtgtgcactgctaagctcccaaagcagttcaagtttgccccagagatggacgattacgtgggcaccttcctagaggggtgccaggatgaccctgagcggcagctggccgtgctagtggccttctcatctgtcaccaaccaaggcctccctgtcacgcctactttctggcgggtcgtgcggttcctgagccctccggccctgcagggctatgtggcctggctgcgggccatgtttctccagccagacctggactccttggttgacttcagcaccaacaaccagaagaaagcccaggattcatcgctccacatgcctgagcgagctgtgttccggctgaggaaatggatcatctttcgattggtgagcattgtggacagcctgcacctggagatggaggaggccttgactgagcaggtggccaggttttgtttgttccactcgttctttgtcacaaagaagcccacatcccagatccctgagacaaagcacccgttctccttccctttggaaaaccaggcccgagaggctgtcagcagtgccttcttcagtctgttgcagaccctcagcacgcagttcaagcaggcaccgggccagacccagggtgggcagccctggacctaccacctggtgcagttcgcagacctcctgttgaatcacagccacaacgtgaccaccgtgacacccttcactgcgcagcagcgccaggcctgggaccggatgctgcagactctgaaggagctggaggcccactccgcagaggccagggctgctgccttccagcaccttctgctcctcgtgggcatccacctcctcaagtcccctgcagagagctgtgacctgctgggtgacatccagacctgcatcaggaaaagtctgggagagaagccccgccggagccgcaccaagaccatcgacccccaggaacccccgtgggtagaggtgctggtggagatcttgctggccctgttggcccagcccagccacctcatgcgccaggtggcccggagcgtgtttggccacatctgctcccacctgaccccgcgtgccctgcagctaattctggatgtgctgaaccccgagaccagtgaggatgagaatgaccgtgtggtggtgacggacgattctgatgagcggcggctgaagggtgcagaggacaagagcgaggaaggtgaggacaacagaagctcagagagtgaagaggagagcgagggggaggagagcgaggaggaggagcgcgacggggacgtggatcagggcttccgggaacagctgatgaccgtgctgcaggctgggaaggcgctgggtggagaggacagtgagaacgaggaggagctgggggatgaggccatgatggccctggaccagagcctcgccagcctctttgccgagcagaagctgcgtatccaggcccggcgagacgagaagaacaagctgcagaaggagaaggctctgcggcgcgacttccagatccgggtgctggacctggtggaggtgctagtgaccaagcagcccgagaatgccctggtcctggagctgctggagccgctgctgagcatcatccggcgcagcctgcgcagcagcagctccaaacaggagcaggaccttctgcacaagacggcgcgcatcttcacgcaccacctgtgccgtgcccggcgctactgccacgacttgggtgagcgcgcaggggccctgcacgcccaggtggagcggttggtgcagcaggctggccgccagcccgactcccccaccgccctctaccacttcaacgcctctctctacctgctccgggtcttgaagggcaacactgctgagggctgcgtgcatgagacacaggagaagcagaaagctggcactgaccccagccacatgcccacgggcccgcaggctgccagctgcttggacttgaacctggtgacccgggtgtactcgacagcactgagctccttcctgaccaagcgcaacagccccctcacagttcccatgttcctcagcctcttctcccggcacccggtgctctgtcagagcctgctccccatcctggtccagcatatcacgggcccggtgcggccccgtcatcaggcctgcctgctgctccagaagaccctgtccatgcgggaggtgaggtcgtgctttgaggaccccgagtggaagcagctgatgggccaggtcctagcaaaggtcaccgagaacttgcgcgtgctgggggaggcgcagaccaaggcgcagcatcagcaggcactgtcctccctggagctgctcaacgttctcttcaggacctgcaaacatgagaagctgaccttggacctgacggtgctcctgggtgtgctgcaggggcaacagcagagcctacagcagggggcacactccaccggctccagccgcctgcacgacctctactggcaggccatgaaaaccctgggagtccagcgccccaagttggagaagaaggatgccaaggagatccccagtgccacccagagccccatcagtaagaagcggaagaaaaagggattcttgccagagacgaagaagcgcaagaaacgcaagtcagaggatggcacgccagcggaggatggcacacctgcagccaccggcgggagccagccccccagcatgggcaggaagaagaggaacaggacaaaggctaaggtcccagcccaggcaaacgggacgccaaccaccaagagtcccaggtgaatggagctcccgggtcccccacggaacctgcaggccaaaagcagcatcagaaggctcttcccaaaaagggggtcttgggcaaatcaccactgtccgcgctggcacggaaaaaggcaaggctgtctttggtcatcaggagtcccagcctgcttcagagtggggccaagaagaaagcacaggtgaggaaggcagggaagccctgagcacaggtacgggcccccctcagcccctgcctccatctgcctgagacgcctatttttttttttttttttaaaaccatgattttaatacgcaagctgtttctaaggcgctgccactggggagggtggctgttgccgcctgcccgggcatcctgctctggcaagcacagcctgagccattcctgcaggggtcccagggtgcagagacctccccacccccggttctgggctgggaccctggctccagggccatgtccagggctctggtgtttgcctgggttggtgcaggttgatgtgctggctgcaggcaggtgtgaccatctctcgtgcctgccacctctttgcccccaggcttttttgctgtgagggagccaccagggggtgatttaaataggtttatttcttcatttacaagaggaatatatttggcttctctcttaagactctgagattcacaatcagcagctctaaaaaataaaggagcagtttggcttccggaaggaagaggaggcaaaaaaaaaacagacagaataaacagagaaaaagaaagcatagtaataaaaataaaaataaaaaaagagggggggggggaaaaaatatggagggggagaaatatgtgaccctttttagaaagggcctaagagggagtataaa

SEQ ID NO: 295582 - DNA, 5006 bp, Homo sapiens
tcgtgtttcggtgagtgtggcggagatggagagccgggatcccgcccagccgatgtcgcctggagaagcgacgcagagtggcgcccggcctgccgaccgctatggcctattgaagcacagtcgcgagttcttggacttcttctgggacattgcgaagcctgagcaggagacgcgacttgcggccacggagaagctgctggagtatctgcgtggcaggccgaaggggtccgagatgaaatatgccctgaagcgtctaatcacgggactcggggtcgggcgagaaacagcccggccctgctacagtttggccctggcacagctgttacagtcttttgaagacctccccttgtgcagcatcctgcagcagatacaagaaaaatatgacctgcatcaggtgaagaaggcaatgctgagacctgctctctttgcaaacctgtttggagtgctcgccctctttcagtcaggtcggctggtgaaggaccaggaggcactgatgaagtcggtgaagctgctgcaggccctggcccagtaccaaaaccacttgcaggagcagccccggaaggccctggtggacatcctctccgaggtctcgaaggccacattgcaggagatcctgccggaggtcctcaaagccgacttgaatataatactcagctcccctgaacagctagagctcttcctcctggcccagcagaaggtgccctccaagctcaagaagctggtgggatccgtgaacctattctcagatgagaatgtccccaggctggtgaatgtgctgaagatggccgcctcctctgtgaagaaggaccgcaagctgcccgccattgctctggacctgctccgcctggcgctcaaggaagacaagttcccacggttctggaaggaggtggtggaacaagggctgctgaagatgcagttctggccagccagctacctgtgtttccacctgctgggcgcggccctgcccctgctgaccaaggagcagctgcacctggtgatgcagggagacgtgatccgccattacggggagcacgtgtgcactgctaagctcccaaagcagttcaagtttgccccagagatggacgattacgtgggcaccttcctagaggggtgccaggatgaccctgagcggcagctggccgtgctagtggccttctcatctgtcaccaaccaaggcctccctgtcacgcctactttctggcgggtcgtgcggttcctgagccctccggccctgcagggctatgtggcctggctgcgggccatgtttctccagccagacctggactccttggttgacttcagcaccaacaaccagaagaaagcccaggattcatcgctccacatgcctgagcgagctgtgttccggctgaggaaatggatcatctttcgattggtgagcattgtggacagcctgcacctggagatggaggaggccttgactgagcaggtggccaggttttgtttgttccactcgttctttgtcacaaagaagcccacatcccagatccctgagacaaagcacccgttctccttccctttggaaaaccaggcccgagaggctgtcagcagtgccttcttcagtctgttgcagaccctcagcacgcagttcaagcaggcaccgggccagacccagggtgggcagccctggacctaccacctggtgcagttcgcagacctcctgttgaatcacagccacaacgtgaccaccgtgacacccttcactgcgcagcagcgccaggcctgggaccggatgctgcagactctgaaggagctggaggcccactccgcagaggccagggctgctgccttccagcaccttctgctcctcgtgggcatccacctcctcaagtcccctgcagagagctgtgacctgctgggtgacatccagacctgcatcaggaaaagtctgggagagaagccccgccggagccgcaccaagaccatcgacccccaggaacccccgtgggtagaggtgctggtggagatcttgctggccctgttggcccagcccagccacctcatgcgccaggtggcccggagcgtgtttggccacatctgctcccacctgaccccgcgtgccctgcagctaattctggatgtgctgaaccccgagaccagtgaggatgagaatgaccgtgtggtggtgacggacgattctgatgagcggcggctgaagggtgcagaggacaagagcgaggaaggtgaggacaacagaagctcagagagtgaagaggagagcgagggggaggagagcgaggaggaggagcgcgacggggacgtggatcagggcttccgggaacagctgatgaccgtgctgcaggctgggaaggcgctgggtggagaggacagtgagaacgaggaggagctgggggatgaggccatgatggccctggaccagagcctcgccagcctctttgccgagcagaagctgcgtatccaggcccggcgagacgagaagaacaagctgcagaaggagaaggctctgcggcgcgacttccagatccgggtgctggacctggtggaggtgctagtgaccaagcagcccgagaatgccctggtcctggagctgctggagccgctgctgagcatcatccggcgcagcctgcgcagcagcagctccaaacaggagcaggaccttctgcacaagacggcgcgcatcttcacgcaccacctgtgccgtgcccggcgctactgccacgacttgggtgagcgcgcaggggccctgcacgcccaggtggagcggttggtgcagcaggctggccgccagcccgactcccccaccgccctctaccacttcaacgcctctctctacctgctccgggtcttgaagggcaacactgctgagggctgcgtgcatgagacacaggagaagcagaaagctggcactgaccccagccacatgcccacgggcccgcaggctgccagctgcttggacttgaacctggtgacccgggtgtactcgacagcactgagctccttcctgaccaagcgcaacagccccctcacagttcccatgttcctcagcctcttctcccggcacccggtgctctgtcagagcctgctccccatcctggtccagcatatcacgggcccggtgcggccccgtcatcaggcctgcctgctgctccagaagaccctgtccatgcgggaggtgaggtcgtgctttgaggaccccgagtggaagcagctgatgggccaggtcctagcaaaggtcaccgagaacttgcgcgtgctgggggaggcgcagaccaaggcgcagcatcagcaggcactgtcctccctggagctgctcaacgttctcttcaggacctgcaaacatgagaagctgaccttggacctgacggtgctcctgggtgtgctgcaggggcaacagcagagcctacagcagggggcacactccaccggctccagccgcctgcacgacctctactggcaggccatgaaaaccctgggagtccagcgccccaagttggagaagaaggatgccaaggagatccccagtgccacccagagccccatcagtaagaagcggaagaaaaagggattcttgccagagacgaagaagcgcaagaaacgcaagtcagaggatggcacgccagcggaggatggcacacctgcagccaccggcgggagccagccccccagcatgggcaggaagaagaggaacaggacaaaggctaaggtcccagcccaggcaaacgggacgccaaccaccaagagtccagcccctggcgcccccacccggagccccagcacccctgccaaatccccaaaactgcagaagaaaaaccagaagccttctgggctgggaccctggctccagggccatgtccagggctctggtgtttgcctgggttggtgcaggttgatgtgctggctgcaggcaggtgtgaccatctctcgtgcctgccacctctttgcccccaggcttttttgctgtgagggagccaccagggggtgatttaaataggtttatttcttcatttacaagaggaatatatttggcttctctcttaagactctgagattcacaatcagcagctctaaaaaataaaggagcagtttggcttccggaaggaagaggaggcaacactcggacctggttcttgtacaacaagaaaacatcgctggggccccgctgaggctggagtgggggtggaggctggtctttggaggatgccacccccaccccatcctcttgtcaggccctcggggtaccccagagcttggtgggtgagtattccacctgcttacacaccactgaagccacagccagccagtaactaaggggcaagaagagcattgtccaagctggctcttggggggtcccccattggccacaaggcctcaccccccaccccacccccgcaccagaaccaccttgattgcagcagaagtgcagggagtgggtgacgcagggggctaagctcccccaaagcgggttggggctggtgtgaagttggcagctgcatcctggtgtgtgcatggatgggaggtgggtgatcgaaggcctggcccccccctggggtcacttggtggaatgccagcagccagtgtttgggtaggggccgcctctcccggggcctcagcctcagctctggggcaggaagctttgtggatagctgcttcctccagcagccggagccctggctactgccccatggattctgggaatggtctcctgggccctgcccctggaaaaggctcagctcagcctcggggaaggagtggggtcctggcttggggggtggtggcagggagagaagccctgcagagttgggctggtgtgcacctgccagagaccttgagcctgggggcacaggtggtgtacagctgcagccagggccttcacccctggtgatgccagcttgtcagaacagtccccatctgggacctccaggctgggagccaacccgagacagtgagacagtgtcctccagggagtacccagagacttgggcgcccagcttcatttgccaggttgcgtccaatatccccaaggtccg

SEQ ID NO: 295583 - DNA, 1225 bp, Homo sapiens
ccccgtcccgatggccatggcccgtccccgtcccgtgctgtaggctctgctgttgcccctgcagcacacccagagccccatcagtaagaagcggaagaaaaagggattcttgccagagacgaagaagcgcaagaaacgcaagtcagaggatggcacgccagcggaggatggcacacctgcagccaccggcgggagccagccccccagcatgggcaggaagaagaggaacaggacaaaggctaaggtcccagcccaggcaaacgggacgccaaccaccaagagtccagcccctggcgcccccacccggagccccagcacccctgccaaatccccaaaactgcagaagaaaaaccagaagccgtcccaggtgaatggagctcccgggtcccccacggaacctgcaggccaaaagcagcatcagaaggctcttcccaaaaagggggtcttgggcaaatcaccactgtccgcgctggcacggaaaaaggcaaggctgtctttggtcatcaggagtcccagcctgcttcagagtggggccaagaagaaagcacaggtgaggaaggcagggaagccctgagcacaggtacgggcccccctcagcccctgcctccatctgcctgagacgcctatttttttttttttttttaaaaccatgattttaatacgcaagctgtttctaaggcgctgccactggggagggtggctgttgccgcctgcccgggcatcctgctctggcaagcacagcctgagccattcctgcaggggtcccagggtgcagagacctccccacccccggttctgggctgggaccctggctccagggccatgtccagggctctggtgtttgcctgggttggtgcaggttgatgtgctggctgcaggcaggtgtgaccatctctcgtgcctgccacctctttgcccccaggcttttttgctgtgagggagccaccagggggtgatttaaataggtttatttcttcatttacaagaggaatatatttggcttctctcttaagactctgagattcacaatcagcagctctaaaaaataaaggagcagtttggcttccggaaggaagaggaggcaaaaaaaaaacagacagaataaacagagaaaaagaaagcatagtaataaaaataaaaataaaaaaagagggggggggggaaaaaatatggagggggagaaatatgtgaccctttttagaaagggcctaagagggagtataaa

SEQ ID NO: 295584 - DNA, 1255 bp, Homo sapiens
cccacctgctccacataagcccaaatctgacctgttctcattttcccttctgggctgggaccctggctccagggccatgtccagggctctggtgtttgcctgggttggtgcaggttgatgtgctggctgcaggcaggtgtgaccatctctcgtgcctgccacctctttgcccccaggcttttttgctgtgagggagccaccagggggtgatttaaataggtttatttcttcatttacaagaggaatatatttggcttctctcttaagactctgagattcacaatcagcagctctaaaaaataaaggagcagtttggcttccggaaggaagaggaggcaacactcggacctggttcttgtacaacaagaaaacatcgctggggccccgctgaggctggagtgggggtggaggctggtctttggaggatgccacccccaccccatcctcttgtcaggccctcggggtaccccagagcttggtgggtgagtattccacctgcttacacaccactgaagccacagccagccagtaactaaggggcaagaagagcattgtccaagctggctcttggggggtcccccattggccacaaggcctcaccccccaccccacccccgcaccagaaccaccttgattgcagcagaagtgcagggagtgggtgacgcagggggctaagctcccccaaagcgggttggggctggtgtgaagttggcagctgcatcctggtgtgtgcatggatgggaggtgggtgatcgaaggcctggcccccccctggggtcacttggtggaatgccagcagccagtgtttgggtaggggccgcctctcccggggcctcagcctcagctctggggcaggaagctttgtggatagctgcttcctccagcagccggagccctggctactgccccatggattctgggaatggtctcctgggccctgcccctggaaaaggctcagctcagcctcggggaaggagtggggtcctggcttggggggtggtggcagggagagaagccctgcagagttgggctggtgtgcacctgccagagaccttgagcctgggggcacaggtggtgtacagctgcagccagggccttcacccctggtgatgccagcttgtcagaacagtccccatctgggacctccaggctgggagccaacccgagacagtgagacagtgtcctccagggagtacccagagacttgggcgcccagcttcatttgccaggttgcgtccaatatccccaaggtccg

SEQ ID NO: 295585 - DNA, 464 bp, Homo sapiens
aagtgggacttgggttggctctgcttggcggagcagggtggaccgagaatgttctgaccagctctcgtcctcaccacccacaggcaccacctgtgccgtgcccggcgctactgccacgacttgggtgagcgcgcaggggccctgcacgcccaggtggagcggttggtgcagcaggctggccgccagcccgactcccccaccgccctctaccacttcaacgcctctctctacctgctccgggtcttgaagggcaacactgctgagggctgcgtgcatgagacacaggagaagcagaaagctggcactgaccccagccacatgcccacgggcccgcaggtgagcagggcctggcccaggagcagccccaggcatttcacagccagggagtggaggccgggacttccccagggcccaaccctcagccttctgatgaaggtaggccaggctctgctcccatcccaggg

SEQ ID NO: 295586 - DNA, 1498 bp, Homo sapiens
cacttggcgcatgggagacatgtgctgggtctgtggggccgtggcccggtggccaggcgagttcttctccagcacgttcagccgggcctccagcttggagatgacctgctgcagctcctgtaccacactgcgcaggctctggttctccactttcagactggtgatccggacgacgagctcgctgtggtctccgctggggccgctggaggccccggggcctgagtttccggccagggatttctggatgttctctctggctctcgcgatgtcacggaggatcacgctggcgtcgttctcttggcgggaggcaccggccacaggcccattcatctgctcgtagaatctcctttctgcgtcgtcatatttgaacttgtcgaaccagatcttctcatgtactaggaagtttgtagccatttttctgacgcctgccaaggacgcgacgaccagggaggaggaatcggcggacgcgggacacctgaggaaagggtactaccttaaaaatcttttcctatagtcttggtaaattttaaatgatagctctataaatgatatttataagttatggttatttttttttttagtttttcattaattttgatcaattgtatcttactaggagatcacccatttactgtaggtagtattctcttcctactatatttcatatctacctactacatttcatatcattcctactacatttcatatctacctacatttacatgtaggtagatatgaaatgattcaatatccatgtctccttttactcattacaaatcttacataattttgctctctcttatctctttaccttactcgggtttatgtgaggtatttagtttactaaggttttaaaatattttcatattcattttagtaggaaaaggacggattattttataaatttcattgcctgaataagtttaggtatggtttcgggtacaataagaaagagataaaatggaatgctttatgccaaacatgtttatttttatcacacagctaaagtctgtagttaagttgctgctacttttgagtcaataacatcaagaccagtgttggtgaatcttttggcctttccccaatgcttgaaagaagatcaccactgctggaggcataatgtacaaggcaggaaaagggatggaattgatggtgacagctaagtctgtcttttttcttaggaaataaaggttttcctaggatacatttaagtgttttgcttctcttgggctgaggcaggtcatttggccactaccagtttcagaagatgatgatgttacagcactattcacaatagcaaagacatggaatcaacctaaatgctcatcaatagtagactgcataaagaaaatgtggtacatatacatcatggaatactatgcagccattaaaaagaatgagatcatgtcctttgcagggatatggatggagctgaaggccattatccttagcaaactaacgcaggaacagaaaaccaaacatcacatattctcactta

SEQ ID NO: 295587 - DNA, 982 bp, Homo sapiens
cacttggcgcatgggagacatgtgctgggtctgtggggccgtggcccggtggccaggcgagttcttctccagcacgttcagccgggcctccagcttggagatgacctgctgcagctcctgtaccacactgcgcaggctctggttctccactttcagactggtgatccggacgacgagctcgctgtggtctccgctggggccgctggaggccccggggcctgagtttccggccagggatttctggatgttctctctggctctcgcgatgtcacggaggatcacgctggcgtcgttctcttggcgggaggcaccggccacaggcccattcatctgctcgtagaatctcctttctgcgtcgtcatatttgaacttgtcgaaccagatcttctcatgtactaggaagtttgtagccatttttctgacgcctgccaaggacgcgacgaccagggaggaggaatcggcggacgcgggacacctgaggaaaggctaaagtctgtagttaagttgctgctacttttgagtcaataacatcaagaccagtgttggtgaatcttttggcctttccccaatgcttgaaagaagatcaccactgctggaggcataatgtacaaggcaggaaaagggatggaattgatggtgacagctaagtctgtcttttttcttaggaaataaaggttttcctaggatacatttaagtgttttgcttctcttgggctgaggcaggtcatttggccactaccagtttcagaagatgatgatgttacagcactattcacaatagcaaagacatggaatcaacctaaatgctcatcaatagtagactgcataaagaaaatgtggtacatatacatcatggaatactatgcagccattaaaaagaatgagatcatgtcctttgcagggatatggatggagctgaaggccattatccttagcaaactaacgcaggaacagaaaaccaaacatcacatattctcactta

SEQ ID NO: 295588 - DNA, 1626 bp, Homo sapiens
gggcctggttgtggaggccccttttgcaaaacctcagtctgaatttagtagacagaagtcactaggaatgccttgacaggatcctgccttagctaaggctccctccagctgcagagggtgtttttgttagactcacacactgcgtgaaactgctcagaatagagccatgatctcaaccacgaaatgggaacttagattttggagaaactaacggggacggacttctttcctagcctgagtgttgagcagtgtcatgccttggcgtttcagctcctcgttgtctaggtggtgaaatgacagaactcattcgcttctttgattggtgattttgaaataatctttcatcaagttccatctcctttaccctcatatggaatatatctctctgtctgttgttaaactatgatgacatgtctgtagctatcagaaagagaagctgggaagaacatgtgacccactggatgggacagccttttaattctgatgatcgtaacacagcatgtcatcatggactagtagctgacagcttgcaggcaagtatggaaaaagatgcaactctaaatgtggaccgcaaagagaagtgtgtttcactacctgactgctgtcatggatcagagctgagagattttcctgggaggccaatgggtcatctttcaaaggatgtggacgaaaatgacagccatgaaggtgaagatcagtttctttctctggaagccagcacagaaacactagtgcatgtttctgatgaggataacaatgctgatttatgccttacagatgataaacaggttttaaatacccaagggcagaaaacatcaggccaacatatgatccaaggagcaggctccttagaaaaggcactgcccatcatacaaagtaaccaagtttcttctaactcctggggaatagctggtgaaactgaattagcactggtaaaagaaagtggggagagaaaagttactgactctataagtaaaagcctggagctttgcaatgaaataagcttaagtgaaataaaagatgcacccaaagtaaatgcagtggatactttgaacgtgaaagatattgcacctgagaaacaattgcttaactctgctgtaattgctcagcaacgaaggaaacctgacccccctaaagatgaaaatgaaagaagcacctgcaatgtagtacacgatgagttcttggatattccttgcacaaacagaggactgccattattaaaaacagattttggaagctgccttctgcagcctccttcctgccccaatggaatgtcagctgaaaatggcctggagaagagtggtttttcacaacatcaaaacaaaagtccaccaaaggtcaaggcagaagatggcatgcagtgtttacaattaaaggagaccctggccacccaggaacccacagataaccaagtcagacttcgtaagagaaaggtaagacatatgcacagattctctggcttttgaaattttgtaaatatccttggatttatcagttatcattttgcttggattaaaaagatatgaagatggttcttttgccctgttatgcagatgtgtaattcaacgactacccacttggtcaaaccatcaaaatatgtaaaaattaaagaataataatctatcc

SEQ ID NO: 295589 - DNA, 7447 bp, Homo sapiens
gggcctggttgtggaggccccttttgcaaaacctcagtctgaatttagtagacagaagtcactaggaatgccttgacaggatcctgccttagctaaggctccctccagctgcagagggtgtttttgttagactcacacactgcgtgaaactgctcagaatagagccatgatctcaaccacgaaatgggaacttagattttggagaaactaacggggacggacttctttcctagcctgagtgttgagcagtgtcatgccttggcgtttcagctcctcgttgtctaggtggtgaaatgacagaactcattcgcttctttgattggtgattttgaaataatctttcatcaagttccatctcctttaccctcatatggaatatatctctctgtctgttgttaaactatgatgacatgtctgtagctatcagaaagagaagctgggaagaacatgtgacccactggatgggacagccttttaattctgatgatcgtaacacagcatgtcatcatggactagtagctgacagcttgcaggcaagtatggaaaaagatgcaactctaaatgtggaccgcaaagagaagtgtgtttcactacctgactgctgtcatggatcagagctgagagattttcctgggaggccaatgggtcatctttcaaaggatgtggacgaaaatgacagccatgaaggtgaagatcagtttctttctctggaagccagcacagaaacactagtgcatgtttctgatgaggataacaatgctgatttatgccttacagatgataaacaggttttaaatacccaagggcagaaaacatcaggccaacatatgatccaaggagcaggctccttagaaaaggcactgcccatcatacaaagtaaccaagtttcttctaactcctggggaatagctggtgaaactgaattagcactggtaaaagaaagtggggagagaaaagttactgactctataagtaaaagcctggagctttgcaatgaaataagcttaagtgaaataaaagatgcacccaaagtaaatgcagtggatactttgaacgtgaaagatattgcacctgagaaacaattgcttaactctgctgtaattgctcagcaacgaaggaaacctgacccccctaaagatgaaaatgaaagaagcacctgcaatgtagtacacgatgagttcttggatattccttgcacaaacagaggactgccattattaaaaacagattttggaagctgccttctgcagcctccttcctgccccaatggaatgtcagctgaaaatggcctggagaagagtggtttttcacaacatcaaaacaaaagtccaccaaaggtcaaggcagaagatggcatgcagtgtttacaattaaaggagaccctggccacccaggaacccacagataaccaagtcagacttcgtaagagaaaggaaataagagaagatcgagatagggcgcggctggactccatggtgctgctgattatgaaactggaccagcttgatcaggacatagaaaatgccctcagcaccagctcctctccatcaggcacaccaacaaacctgcggcggcacgttcctgatctggaatcaggatctgaaagtggagcagataccatttcagtaaatcagacacgagtaaatttgtcttctgacactgagtccacggacctcccatcttccactccagtagccaattctggaaccaaacccaagactacggctattcaaggtatttcagagaaggaaaaggctgaaattgaagccaaggaagcttgtgattggctacgggcaactggtttcccccagtatgcacagctttatgaagatttcctgttccccatcgatatttccttggtcaagagagagcatgattttttggacagagatgccattgaggctctatgcaggcgtctaaatactttaaacaaatgtgcggtgatgaagctagaaattagtcctcatcggaaacgaagtgacgattcagacgaggatgagccttgtgccatcagtggcaaatggactttccaaagggacagcaagaggtggtcccggcttgaagagtttgatgtcttttctccaaaacaagacctggtccctgggtccccagacgactcccacccgaaggacggccccagccccggaggcacgctgatggacctcagcgagcgccaggaggtgtcttccgtccgcagcctcagcagcactggcagcctccccagccacgcgccccccagcgaggatgctgccaccccccggactaactccgtcatcagcgtttgctcctccagcaacttggcaggcaatgacgactctttcggcagcctgccctctcccaaggaactgtccagcttcagcttcagcatgaaaggccacgaaaaaactgccaagtccaagacgcgcagtctgctgaaacggatggagagcctgaagctcaagagctcccatcacagcaagcacaaagcgccctcaaagctggggttgatcatcagcgggcccatcttgcaagaggggatggatgaggagaagctgaagcagctcaactgcgtggagatctccgccctcaatggcaaccgcatcaacgtccccatggtacgaaagaggagcgtttccaactccacgcagaccagcagcagcagcagccagtcggagaccagcagcgcggtcagcacgcccagccctgttacgaggacccggagcctcagtgcgtgcaacaagcgggtgggcatgtacttagagggcttcgatcctttcaatcagtcaacatttaacaacgtggtggagcagaactttaagaaccgcgagagctacccagaggacacggtgttctacatccctgaagatcacaagcctggcactttccccaaagctctcaccaatggcagtttctccccctcggggaataacggctctgtgaactggaggacgggaagcttccacggccctggccacatcagcctcaggagggaaaacagtagcgacagccccaaggaactgaagagacgcaattcttccagctccatgagcagccgcctgagcatctacgacaacgtgccgggctccatcctctactccagttcaggggacctggcggatctggagaacgaggacatcttccccgagctggacgacatcctctaccacgtgaaggggatgcagcggatagtcaatcagtggtcggagaagttttctgatgagggagattcggactcagccctggactcggtctctccctgcccgtcctctccaaaacagatacacctggatgtggacaacgaccgaaccacacccagcgacctggacagcacaggcaactccctgaatgaaccggaagagccctccgagatcccggaaagaagggattctggggttggggcttccctaaccaggtccaacaggcaccgactgagatggcacagtttccagagctcacatcggccaagcctcaactctgtatcactacagattaactgccagtctgtggcccagatgaacctgctgcagaaatactcactcctaaagctaacggccctgctggagaaatacacaccttctaacaagcatggttttagctgggccgtgcccaagttcatgaagaggatcaaggttccagactacaaggaccggagtgtgtttggggtcccactgacggtcaacgtgcagcgcacaggacaaccgttgcctcagagcatccagcaggccatgcgatacctccggaaccattgtttggatcaggttgggctcttcagaaaatcgggggtcaagtcccggattcaggctctgcgccagatgaatgaaggtgccatagactgtgtcaactacgaaggacagtctgcttatgacgtggcagacatgctgaagcagtattttcgagatcttcctgagccactaatgacgaacaaactctcggaaacctttctacagatctaccaatatgtgcccaaggaccagcgcctgcaggccatcaaggctgccatcatgctgctgcctgacgagaaccgggaggttctgcagaccctgctttatttcctgagcgatgtcacagcagccgtaaaagaaaaccagatgaccccaaccaacctggccgtgtgcttagcgccttccctcttccatctcaacaccctgaagagagagaattcctctcccagggtaatgcaaagaaaacaaagtttgggcaaaccagatcagaaagatttgaatgaaaacctagctgccactcaagggctggcccatatgatcgccgagtgcaagaagcttttccaggttcccgaggaaatgagccgatgtcgtaattcctataccgaacaagagctgaagcccctcactctggaagcactcgggcacctgggtaatgatgactcagctgactaccaacacttcctccaggactgtgtggatggcctgtttaaagaagtcaaagagaagtttaaaggctgggtcagctactccacttcggagcaggctgagctgtcctataagaaggtgagcgaaggaccccctctgaggctttggaggtcagtcattgaagtccctgctgtgccagaggaaatcttaaagcgcctacttaaagaacagcacctctgggatgtagacctgttggattcaaaagtgatcgaaattctggacagccaaactgaaatttaccagtatgtccaaaacagtatggcacctcatcctgctcgagactacgttgttttaagaacctggaggactaatttacccaaaggagcctgtgcccttttactaacctctgtggatcacgatcgcgcacctgtggtgggtgtgagggttaatgtgctcttgtccaggtatttgattgaaccctgtgggccaggaaaatccaaactcacctacatgtgcagagttgacttaaggggccacatgccagaatggtacacaaaatcttttggacatttgtgtgcagctgaagttgtaaagatccgggattccttcagtaaccagaacactgaaaccaaagacaccaaatctaggtgatcactgaagcaacgcaaccgcttccaccaccatggtgtttgtttctagaacttttgccagtccttgaagaatgggttctgtgtctaatcctgaaacaaagaaaactacaagctggagtgtaggaattgactatagcaatttgatacatttttaaagctgcttcctgtttgttgagggtctgtattcatagaccttgactggaatatgtaagactgtgcaaaaaaaaaaaaaaaatttatgtgtattcttattcagattgcttctgagaagcaaaactctttaaatacattatggaagataatgaagatacttcattctcttgtgatatcagtgtatgcgtacctgtgtcgctttatttgcagtgtgttgagggactggtgtatccactggaatagttggtactcttggatgtgttttctcaccaagatgagcaaagaaaggtttgcacagaggagtgtgaatgtgtgtttgttgctggctgaatggcaatagatgtctaaggtggattcagtgtctggcacactgagacacctccaagaaggagattgatgcatcaggttcagtttaacctggaatatctgactacccctgaatccacccagaaagggggcccaacacccttgtccatttatgggtattttttttcgaagttattaagcatattccttttccacgaacctcttctgtactttgattgtaataggttggctcttacacccattccaaatgcagtttatttttagacccgattgcaaatagtgatgtagttttaaccagtatggattagttcagggatgaactgctccctccagccttactggctctgatccacagggttttgttttgttttgttttgttttttgtttaagtcgagatataaaaactgaacacgataacacttactcttaaatcaagcatcaacactttttccctgttagaattctttgcatttttgtgtttgtaacagaaacgccttaagacactatgtttgggaatataggaaactatgtgtgtcccaaggaaatccctgtaaatttaactcacctacaaaaggctttttccccgcctttggttgttaacggcattcctgaaagccacatgtgtttattcattgggcttgttcttatcagcaaataggttttctggttttatgactttttgtcttattttatttttcctacatttctttttttttttttttcctttagaatgccctggaaatatatttaagtggtaatgaaaaatagtaatcatagtaaaacgcaacaagaagaaaaccaacccaaaccagtgaagttttttagaacctttagaagggtggtctttattcaggttttactgtaatggtaaggattgactcaagagacagtattagtaaatttattgtgtatggatcaaaagtgaataatgtatgaatgagagctgtaagaaggatttttattttgttataatttagttaccattttcagtgttatttcaaaggttctttgaagaattttggggcagggcatcagattagagttttaaaatttgagtattttggatatcagtgttcctcatgaagatatacatggatattcaattttgatggcttccagatttgtaagattgtatgttgtatataccattctattaagaaacatgtccactgtgctttcaaacatagataaagcatgataaagattattatttaagatatacttgtatttatacctcagatattcttttgggttttgtacctcaaggcttttttcttcttattgtaaatacactttacgtgaatacagtctaagtgaagaaaataaataaaaggaagaggtttataacttgctctatatctgtacagattataatcaataagtgcactattattaaatgtttaaagtaagggaaaagtctgggctgccttccttaatattgcatctcactcccacccttaaaaccacagattgcaaagcatagcattttagcatcaactacaatcaaaagagcgatttgctgaaggaaaaatcggactgcaaatcattccaaggccaaactgcaactgagccacccactcccaaacaggaaaccctggtgaaggttcaggaagcacggagattctctccaacaaaggtccagttaggaaacgacgctgagaggatgacgacaacgtgcaacagcagaaagatgcttgcaagcagagtcagggtcaccagtgaatgccacaaaagttctctttcccactgtttaatttgacaagagaagaatttgaaggatatgaacattttcaagaactctgctgaggtcacttagagcgccatcacaacttatttgtgtgactaattgcctagattgtaagctctttgagggcagggcttgtctcttacacatctttataatcccctgcagcggctttcagtattttgtacttgtaggcacctaataaatttattatttgctatactgaa

SEQ ID NO: 295590 - DNA, 1961 bp, Homo sapiens
gggcctggttgtggaggccccttttgcaaaacctcagtctgaatttagtagacagaagtcactaggaatgccttgacaggatcctgccttagctaaggctccctccagctgcagagggtgtttttgttagactcacacactgcgtgaaactgctcagaatagagccatgatctcaaccacgaaatgggaacttagattttggagaaactaacggggacggacttctttcctagcctgagtgttgagcagtgtcatgccttggcgtttcagctcctcgttgtctaggtggtgaaatgacagaactcattcgcttctttgattggtgattttgaaataatctttcatcaagttccatctcctttaccctcatatggaatatatctctctgtctgttgttaaactatgatgacatgtctgtagctatcagaaagagaagctgggaagaacatgtgacccactggatgggacagccttttaattctgatgatcgtaacacagcatgtcatcatggactagtagctgacagcttgcaggcaagtatggaaaaagatgcaactctaaatgtggaccgcaaagagaagtgtgtttcactacctgactgctgtcatggatcagagctgagagattttcctgggaggccaatgggtcatctttcaaaggatgtggacgaaaatgacagccatgaaggtgaagatcagtttctttctctggaagccagcacagaaacactagtgcatgtttctgatgaggataacaatgctgatttatgccttacagatgataaacaggttttaaatacccaagggcagaaaacatcaggccaacatatgatccaaggagcaggctccttagaaaaggcactgcccatcatacaaagtaaccaagtttcttctaactcctggggaatagctggtgaaactgaattagcactggtaaaagaaagtggggagagaaaagttactgactctataagtaaaagcctggagctttgcaatgaaataagcttaagtgaaataaaagatgcacccaaagtaaatgcagtggatactttgaacgtgaaagatattgcacctgagaaacaattgcttaactctgctgtaattgctcagcaacgaaggaaacctgacccccctaaagatgaaaatgaaagaagcacctgcaatgtagtacacgatgagttcttggatattccttgcacaaacagaggactgccattattaaaaacagattttggaagctgccttctgcagcctccttcctgccccaatggaatgtcagctgaaaatggcctggagaagagtggtttttcacaacatcaaaacaaaagtccaccaaaggtcaaggcagaagatggcatgcagtgtttacaattaaaggagaccctggccacccaggaacccacagataaccaagtcagacttcgtaagagaaaggaaataagagaagatcgagatagggcgcggctggactccatggtgctgctgattatgaaactggaccagcttgatcaggacatagaaaatgccctcagcaccagctcctctccatcaggcacaccaacaaacctgcggcggcacgttcctgatctggaatcaggatctgaaagtggagcagataccatttcagtaaatcagacacgagtaaatttgtcttctgacactgagtccacggacctcccatcttccactccagtagccaattctggaaccaaacccaagactacggctattcaaggtatttcagagaaggaaaaggctgcagcggtaaaatcagtaaagttggaagtggatgaagataagagcacaaagggatccaatttttccaactcggaagtggcaattggtttgtctccttacacctttccccagaagaggcttttccatgttgctggagaagaaaacatcacctaggccggtgtgtgcctggcagaacactgcactccaatttcctcgggcagccac

SEQ ID NO: 295591 - DNA, 6050 bp, Homo sapiens
tatgggctcgagcggccgcccgggcaggtgcccgagcgagggcgcttcgctcccagccaggacatggccgcacctctccgcatcaggagcgccggctcacggacttctcgcccaactccctgagcgctccctcgtttcgatctttagaaaaccccgctttctttctggggccgtgacgaggggcagggagcggcgagcaaggatgcgttgaggaccgcgagggcgcgcgtctcgggtgccgccgtgggtcccgacgcggaagccgagccgcctccgcctgcctcgacttccccacagcgcttccgccgccgcctgccgtgcttgatgtgcagaaagaagccggacaccatgatcctaacacaaattgaagccaaggaagcttgtgattggctacgggcaactggtttcccccagtatgcacagctttatgaagatttcctgttccccatcgatatttccttggtcaagagagagcatgattttttggacagagatgccattgaggctctatgcaggcgtctaaatactttaaacaaatgtgcggtgatgaagctagaaattagtcctcatcggaaacgaagtgacgattcagacgaggatgagccttgtgccatcagtggcaaatggactttccaaagggacagcaagaggtggtcccggcttgaagagtttgatgtcttttctccaaaacaagacctggtccctgggtccccagacgactcccacccgaaggacggccccagccccggaggcacgctgatggacctcagcgagcgccaggaggtgtcttccgtccgcagcctcagcagcactggcagcctccccagccacgcgccccccagcgaggatgctgccaccccccggactaactccgtcatcagcgtttgctcctccagcaacttggcaggcaatgacgactctttcggcagcctgccctctcccaaggaactgtccagcttcagcttcagcatgaaaggccacgaaaaaactgccaagtccaagacgcgcagtctgctgaaacggatggagagcctgaagctcaagagctcccatcacagcaagcacaaagcgccctcaaagctggggttgatcatcagcgggcccatcttgcaagaggggatggatgaggagaagctgaagcagctcaactgcgtggagatctccgccctcaatggcaaccgcatcaacgtccccatggtacgaaagaggagcgtttccaactccacgcagaccagcagcagcagcagccagtcggagaccagcagcgcggtcagcacgcccagccctgttacgaggacccggagcctcagtgcgtgcaacaagcgggtgggcatgtacttagagggcttcgatcctttcaatcagtcaacatttaacaacgtggtggagcagaactttaagaaccgcgagagctacccagaggacacggtgttctacatccctgaagatcacaagcctggcactttccccaaagctctcaccaatggcagtttctccccctcggggaataacggctctgtgaactggaggacgggaagcttccacggccctggccacatcagcctcaggagggaaaacagtagcgacagccccaaggaactgaagagacgcaattcttccagctccatgagcagccgcctgagcatctacgacaacgtgccgggctccatcctctactccagttcaggggacctggcggatctggagaacgaggacatcttccccgagctggacgacatcctctaccacgtgaaggggatgcagcggatagtcaatcagtggtcggagaagttttctgatgagggagattcggactcagccctggactcggtctctccctgcccgtcctctccaaaacagatacacctggatgtggacaacgaccgaaccacacccagcgacctggacagcacaggcaactccctgaatgaaccggaagagccctccgagatcccggaaagaagggattctggggttggggcttccctaaccaggtccaacaggcaccgactgagatggcacagtttccagagctcacatcggccaagcctcaactctgtatcactacagattaactgccagtctgtggcccagatgaacctgctgcagaaatactcactcctaaagctaacggccctgctggagaaatacacaccttctaacaagcatggttttagctgggccgtgcccaagttcatgaagaggatcaaggttccagactacaaggaccggagtgtgtttggggtcccactgacggtcaacgtgcagcgcacaggacaaccgttgcctcagagcatccagcaggccatgcgatacctccggaaccattgtttggatcaggttgggctcttcagaaaatcgggggtcaagtcccggattcaggctctgcgccagatgaatgaaggtgccatagactgtgtcaactacgaaggacagtctgcttatgacgtggcagacatgctgaagcagtattttcgagatcttcctgagccactaatgacgaacaaactctcggaaacctttctacagatctaccaatatgtgcccaaggaccagcgcctgcaggccatcaaggctgccatcatgctgctgcctgacgagaaccgggaggttctgcagaccctgctttatttcctgagcgatgtcacagcagccgtaaaagaaaaccagatgaccccaaccaacctggccgtgtgcttagcgccttccctcttccatctcaacaccctgaagagagagaattcctctcccagggtaatgcaaagaaaacaaagtttgggcaaaccagatcagaaagatttgaatgaaaacctagctgccactcaagggctggcccatatgatcgccgagtgcaagaagcttttccaggttcccgaggaaatgagccgatgtcgtaattcctataccgaacaagagctgaagcccctcactctggaagcactcgggcacctgggtaatgatgactcagctgactaccaacacttcctccaggactgtgtggatggcctgtttaaagaagtcaaagagaagtttaaaggctgggtcagctactccacttcggagcaggctgagctgtcctataagaaggtgagcgaaggaccccctctgaggctttggaggtcagtcattgaagtccctgctgtgccagaggaaatcttaaagcgcctacttaaagaacagcacctctgggatgtagacctgttggattcaaaagtgatcgaaattctggacagccaaactgaaatttaccagtatgtccaaaacagtatggcacctcatcctgctcgagactacgttgttttaagaacctggaggactaatttacccaaaggagcctgtgcccttttactaacctctgtggatcacgatcgcgcacctgtggtgggtgtgagggttaatgtgctcttgtccaggtatttgattgaaccctgtgggccaggaaaatccaaactcacctacatgtgcagagttgacttaaggggccacatgccagaatggtacacaaaatcttttggacatttgtgtgcagctgaagttgtaaagatccgggattccttcagtaaccagaacactgaaaccaaagacaccaaatctaggtgatcactgaagcaacgcaaccgcttccaccaccatggtgtttgtttctagaacttttgccagtccttgaagaatgggttctgtgtctaatcctgaaacaaagaaaactacaagctggagtgtaggaattgactatagcaatttgatacatttttaaagctgcttcctgtttgttgagggtctgtattcatagaccttgactggaatatgtaagactgtgcaaaaaaaaaaaaaaaatttatgtgtattcttattcagattgcttctgagaagcaaaactctttaaatacattatggaagataatgaagatacttcattctcttgtgatatcagtgtatgcgtacctgtgtcgctttatttgcagtgtgttgagggactggtgtatccactggaatagttggtactcttggatgtgttttctcaccaagatgagcaaagaaaggtttgcacagaggagtgtgaatgtgtgtttgttgctggctgaatggcaatagatgtctaaggtggattcagtgtctggcacactgagacacctccaagaaggagattgatgcatcaggttcagtttaacctggaatatctgactacccctgaatccacccagaaagggggcccaacacccttgtccatttatgggtattttttttcgaagttattaagcatattccttttccacgaacctcttctgtactttgattgtaataggttggctcttacacccattccaaatgcagtttatttttagacccgattgcaaatagtgatgtagttttaaccagtatggattagttcagggatgaactgctccctccagccttactggctctgatccacagggttttgttttgttttgttttgttttttgtttaagtcgagatataaaaactgaacacgataacacttactcttaaatcaagcatcaacactttttccctgttagaattctttgcatttttgtgtttgtaacagaaacgccttaagacactatgtttgggaatataggaaactatgtgtgtcccaaggaaatccctgtaaatttaactcacctacaaaaggctttttccccgcctttggttgttaacggcattcctgaaagccacatgtgtttattcattgggcttgttcttatcagcaaataggttttctggttttatgactttttgtcttattttatttttcctacatttctttttttttttttttcctttagaatgccctggaaatatatttaagtggtaatgaaaaatagtaatcatagtaaaacgcaacaagaagaaaaccaacccaaaccagtgaagttttttagaacctttagaagggtggtctttattcaggttttactgtaatggtaaggattgactcaagagacagtattagtaaatttattgtgtatggatcaaaagtgaataatgtatgaatgagagctgtaagaaggatttttattttgttataatttagttaccattttcagtgttatttcaaaggttctttgaagaattttggggcagggcatcagattagagttttaaaatttgagtattttggatatcagtgttcctcatgaagatatacatggatattcaattttgatggcttccagatttgtaagattgtatgttgtatataccattctattaagaaacatgtccactgtgctttcaaacatagataaagcatgataaagattattatttaagatatacttgtatttatacctcagatattcttttgggttttgtacctcaaggcttttttcttcttattgtaaatacactttacgtgaatacagtctaagtgaagaaaataaataaaaggaagaggtttataacttgctctatatctgtacagattataatcaataagtgcactattattaaatgtttaaagtaagggaaaagtctgggctgccttccttaatattgcatctcactcccacccttaaaaccacagattgcaaagcatagcattttagcatcaactacaatcaaaagagcgatttgctgaaggaaaaatcggactgcaaatcattccaaggccaaactgcaactgagccacccactcccaaacaggaaaccctggtgaaggttcaggaagcacggagattctctccaacaaaggtccagttaggaaacgacgctgagaggatgacgacaacgtgcaacagcagaaagatgcttgcaagcagagtcagggtcaccagtgaatgccacaaaagttctctttcccactgtttaatttgacaagagaagaatttgaaggatatgaacattttcaagaactctgctgaggtcacttagagcgccatcacaacttatttgtgtgactaattgcctagattgtaagctctttgagggcagggcttgtctcttacacatctttataatcccctgcagcggctttcagtattttgtacttgtaggcacctaataaatttattatttgctatactgaa

SEQ ID NO: 295592 - DNA, 5995 bp, Homo sapiens
tatgggctcgagcggccgcccgggcaggtgcccgagcgagggcgcttcgctcccagccaggacatggccgcacctctccgcatcaggagcgccggctcacggacttctcgcccaactccctgagcgctccctcgtttcgatctttagaaaaccccgctttctttctggggccgtgacgaggggcagggagcggcgagcaaggatgcgttgaggaccgcgagggcgcgcgtctcgggtgccgccgtgggtcccgacgcggaagccgagccgcctccgcctgcctcgacttccccacagcgcttccgccgccgcctgccgtgcttgatgtgcagaaagaagccggacaccatgatcctaacacaaattgaagccaaggaagcttgtgattggctacgggcaactggtttcccccagtatgcacagctttatgaagatttcctgttccccatcgatatttccttggtcaagagagagcatgattttttggacagagatgccattgaggctctatgcaggcgtctaaatactttaaacaaatgtgcggtgatgaagctagaaattagtcctcatcggaaacgaagtgacgattcagacgaggatgagccttgtgccatcagtggcaaatggactttccaaagggacagcaagaggtggtcccggcttgaagagtttgatgtcttttctccaaaacaagacctggtccctgggtccccagacgactcccacccgaaggacggccccagccccggaggcacgctgatggacctcagcgagcgccaggaggtgtcttccgtccgcagcctcagcagcactggcagcctccccagccacgcgccccccagcgaggatgctgccaccccccggactaactccgtcatcagcgtttgctcctccagcaacttggcaggcaatgacgactctttcggcagcctgccctctcccaaggaactgtccagcttcagcttcagcatgaaaggccacgaaaaaactgccaagtccaagacgcgcagtctgctgaaacggatggagagcctgaagctcaagagctcccatcacagcaagcacaaagcgccctcaaagctggggttgatcatcagcgggcccatcttgcaagaggggatggatgaggagaagctgaagcagctcaactgcgtggagatctccgccctcaatggcaaccgcatcaacgtccccatggtacgaaagaggagcgtttccaactccacgcagaccagcagcagcagcagccagtcggagaccagcagcgcggtcagcacgcccagccctgttacgaggacccggagcctcagtgcgtgcaacaagcgggtgggcatgtacttagagggcttcgatcctttcaatcagtcaacatttaacaacgtggtggagcagaactttaagaaccgcgagagctacccagaggacacggtgttctacatccctgaagatcacaagcctggcactttccccaaagctctcaccaatggcagtttctccccctcggggaataacggctctgtgaactggaggacgggaagcttccacggccctggccacatcagcctcaggagggaaaacagtagcgacagccccaaggaactgaagagacgcaattcttccagctccatgagcagccgcctgagcatctacgacaacgtgccgggctccatcctctactccagttcaggggacctggcggatctggagaacgaggacatcttccccgagctggacgacatcctctaccacgtgaaggggatgcagcggatagtcaatcagtggtcggagaagttttctgatgagggagattcggactcagccctggactcggtctctccctgcccgtcctctccaaaacagatacacctggatgtggacaacgaccgaaccacacccagcgacctggacagcacaggcaactccctgaatgaaccggaagagccctccgagatcccggaaagaagggattctggggttggggcttccctaaccaggtccaacaggcaccgactgagatggcacagtttccagagctcacatcggccaagcctcaactctgtatcactacagattaactgccagtctgtggcccagatgaacctgctgcagaaatactcactcctaaagctaacggccctgctggagaaatacacaccttctaacaagcatggttttagctgggccgtgcccaagttcatgaagaggatcaaggttccagactacaaggaccggagtgtgtttggggtcccactgacggtcaacgtgcagcgcacaggacaaccgttgcctcagagcatccagcaggccatgcgatacctccggaaccattgtttggatcaggttgggctcttcagaaaatcgggggtcaagtcccggattcaggctctgcgccagatgaatgaaggtgccatagactgtgtcaactacgaaggacagtctgcttatgacgtggcagacatgctgaagcagtattttcgagatcttcctgagccactaatgacgaacaaactctcggaaacctttctacagatctaccaatatgtgcccaaggaccagcgcctgcaggccatcaaggctgccatcatgctgctgcctgacgagaaccgggaggttctgcagaccctgctttatttcctgagcgatgtcacagcagccgtaaaagaaaaccagatgaccccaaccaacctggccgtgtgcttagcgccttccctcttccatctcaacaccctgaagagagagaattcctctcccagggtaatgcaaagaaaacaaagtttgggcaaaccagatcagaaagatttgaatgaaaacctagctgccactcaagggctggcccatatgatcgccgagtgcaagaagcttttccaggttcccgaggaaatgagccgatgtcgtaattcctataccgaacaagagctgaagcccctcactctggaagcactcgggcacctgggtaatgatgactcagctgactaccaacacttcctccaggactgtgtggatggcctgtttaaagaagtcaaagagaagtttaaaggctgggtcagctactccacttcggagcaggctgagctgtcctataagaaggtgagcgaaggaccccctctgaggctttggaggtcagtcattgaagtccctgctgtgccagaggaaatcttaaagcgcctacttaaagaacagcacctctgggatgtagacctgttggattcaaaagtgatcgaaattctggacagccaaactgaaatttaccagtatgtccaaaacagtatggcacctcatcctgctcgagactacgttgttttaagaacctggaggactaatttacccaaaggagcctgtgcccttttactaacctctgtggatcacgatcgcgcacctgtggtgggtgtgagggttaatgtgctcttgtccaggtatttgattgaaccctgtgggccaggaaaatccaaactcacctacatgtgcagagttgacttaaggggccacatgccagaatggtacacaaaatcttttggacatttgtgtgcagctgaagttgtaaagatccgggattccttcagtaaccagaacactgaaaccaaagacaccaaatctaggtgatcactgaagcaacgcaaccgcttccaccaccatggtgtttgtttctagaacttttgccagtccttgaagaatgggttctgtgtctaatcctgaaacaaagaaaactacaagctggagtgtaggaattgactatagcaatttgatacatttttaaagctgcttcctgtttgttgagggtctgtattcatagaccttgactggaatatgtaagactgtgcaaaaaaaaaaaaaaaatttatgtgtattcttattcagattgcttctgagaagcaaaactctttaaatacattatggaagataatgaagatacttcattctcttgtgatatcagtgtatgcgtacctgtgtcgctttatttgcagtgtgttgagggactggtgtatccactggaatagttggtactcttggatgtgttttctcaccaagatgagcaaagaaaggtttgcacagaggagtgtgaatgtgtgtttgttgctggctgaatggcaatagatgtctaaggtggattcagtgtctggcacactgagacacctccaagaaggagattgatgcatcaggttcagtttaacctggaatatctgactacccctgaatccacccagaaagggggcccaacacccttgtccatttatgggtattttttttcgaagttattaagcatattccttttccacgaacctcttctgtactttgattgtaataggttggctcttacacccattccaaatgcagtttatttttagacccgattgcaaatagtgatgtagttttaaccagtatggattagttcagggatgaactgctccctccagccttactggctctgatccacagggttttgttttgttttgttttgttttttgtttaagtcgagatataaaaactgaacacgataacacttactcttaaatcaagcatcaacactttttccctgttagaattctttgcatttttgtgtttgtaacagaaacgccttaagacactatgtttgggaatataggaaactatgtgtgtcccaaggaaatccctgtaaatttaactcacctactttattcattgggcttgttcttatcagcaaataggttttctggttttatgactttttgtcttattttatttttcctacatttctttttttttttttttcctttagaatgccctggaaatatatttaagtggtaatgaaaaatagtaatcatagtaaaacgcaacaagaagaaaaccaacccaaaccagtgaagttttttagaacctttagaagggtggtctttattcaggttttactgtaatggtaaggattgactcaagagacagtattagtaaatttattgtgtatggatcaaaagtgaataatgtatgaatgagagctgtaagaaggatttttattttgttataatttagttaccattttcagtgttatttcaaaggttctttgaagaattttggggcagggcatcagattagagttttaaaatttgagtattttggatatcagtgttcctcatgaagatatacatggatattcaattttgatggcttccagatttgtaagattgtatgttgtatataccattctattaagaaacatgtccactgtgctttcaaacatagataaagcatgataaagattattatttaagatatacttgtatttatacctcagatattcttttgggttttgtacctcaaggcttttttcttcttattgtaaatacactttacgtgaatacagtctaagtgaagaaaataaataaaaggaagaggtttataacttgctctatatctgtacagattataatcaataagtgcactattattaaatgtttaaagtaagggaaaagtctgggctgccttccttaatattgcatctcactcccacccttaaaaccacagattgcaaagcatagcattttagcatcaactacaatcaaaagagcgatttgctgaaggaaaaatcggactgcaaatcattccaaggccaaactgcaactgagccacccactcccaaacaggaaaccctggtgaaggttcaggaagcacggagattctctccaacaaaggtccagttaggaaacgacgctgagaggatgacgacaacgtgcaacagcagaaagatgcttgcaagcagagtcagggtcaccagtgaatgccacaaaagttctctttcccactgtttaatttgacaagagaagaatttgaaggatatgaacattttcaagaactctgctgaggtcacttagagcgccatcacaacttatttgtgtgactaattgcctagattgtaagctctttgagggcagggcttgtctcttacacatctttataatcccctgcagcggctttcagtattttgtacttgtaggcacctaataaatttattatttgctatactgaa

SEQ ID NO: 295593 - DNA, 5976 bp, Homo sapiens
  misc_feature (162)..(162): n is a, c, g, or t
gcagttggcgcttcccggggccgcagtgccagccgcaatgccggcctcctgaaggcaggcgacagcctgcggccgggagcacagcgcggggcggagtaccgaggcatggtcgcggcgcccgggctgcgctgaaggcgtctgcgagcggatgggggaccccanggcccacgtgatggcgcgccccctgcgagcccctctccggaggtcctttagcgatcacatcagggactccacggccagagccctggatgtcatttggaaaaacactagagacagacggctggcagaaattgaagccaaggaagcttgtgattggctacgggcaactggtttcccccagtatgcacagctttatgaagatttcctgttccccatcgatatttccttggtcaagagagagcatgattttttggacagagatgccattgaggctctatgcaggcgtctaaatactttaaacaaatgtgcggtgatgaagctagaaattagtcctcatcggaaacgaagtgacgattcagacgaggatgagccttgtgccatcagtggcaaatggactttccaaagggacagcaagaggtggtcccggcttgaagagtttgatgtcttttctccaaaacaagacctggtccctgggtccccagacgactcccacccgaaggacggccccagccccggaggcacgctgatggacctcagcgagcgccaggaggtgtcttccgtccgcagcctcagcagcactggcagcctccccagccacgcgccccccagcgaggatgctgccaccccccggactaactccgtcatcagcgtttgctcctccagcaacttggcaggcaatgacgactctttcggcagcctgccctctcccaaggaactgtccagcttcagcttcagcatgaaaggccacgaaaaaactgccaagtccaagacgcgcagtctgctgaaacggatggagagcctgaagctcaagagctcccatcacagcaagcacaaagcgccctcaaagctggggttgatcatcagcgggcccatcttgcaagaggggatggatgaggagaagctgaagcagctcaactgcgtggagatctccgccctcaatggcaaccgcatcaacgtccccatggtacgaaagaggagcgtttccaactccacgcagaccagcagcagcagcagccagtcggagaccagcagcgcggtcagcacgcccagccctgttacgaggacccggagcctcagtgcgtgcaacaagcgggtgggcatgtacttagagggcttcgatcctttcaatcagtcaacatttaacaacgtggtggagcagaactttaagaaccgcgagagctacccagaggacacggtgttctacatccctgaagatcacaagcctggcactttccccaaagctctcaccaatggcagtttctccccctcggggaataacggctctgtgaactggaggacgggaagcttccacggccctggccacatcagcctcaggagggaaaacagtagcgacagccccaaggaactgaagagacgcaattcttccagctccatgagcagccgcctgagcatctacgacaacgtgccgggctccatcctctactccagttcaggggacctggcggatctggagaacgaggacatcttccccgagctggacgacatcctctaccacgtgaaggggatgcagcggatagtcaatcagtggtcggagaagttttctgatgagggagattcggactcagccctggactcggtctctccctgcccgtcctctccaaaacagatacacctggatgtggacaacgaccgaaccacacccagcgacctggacagcacaggcaactccctgaatgaaccggaagagccctccgagatcccggaaagaagggattctggggttggggcttccctaaccaggtccaacaggcaccgactgagatggcacagtttccagagctcacatcggccaagcctcaactctgtatcactacagattaactgccagtctgtggcccagatgaacctgctgcagaaatactcactcctaaagctaacggccctgctggagaaatacacaccttctaacaagcatggttttagctgggccgtgcccaagttcatgaagaggatcaaggttccagactacaaggaccggagtgtgtttggggtcccactgacggtcaacgtgcagcgcacaggacaaccgttgcctcagagcatccagcaggccatgcgatacctccggaaccattgtttggatcaggttgggctcttcagaaaatcgggggtcaagtcccggattcaggctctgcgccagatgaatgaaggtgccatagactgtgtcaactacgaaggacagtctgcttatgacgtggcagacatgctgaagcagtattttcgagatcttcctgagccactaatgacgaacaaactctcggaaacctttctacagatctaccaatatgtgcccaaggaccagcgcctgcaggccatcaaggctgccatcatgctgctgcctgacgagaaccgggaggttctgcagaccctgctttatttcctgagcgatgtcacagcagccgtaaaagaaaaccagatgaccccaaccaacctggccgtgtgcttagcgccttccctcttccatctcaacaccctgaagagagagaattcctctcccagggtaatgcaaagaaaacaaagtttgggcaaaccagatcagaaagatttgaatgaaaacctagctgccactcaagggctggcccatatgatcgccgagtgcaagaagcttttccaggttcccgaggaaatgagccgatgtcgtaattcctataccgaacaagagctgaagcccctcactctggaagcactcgggcacctgggtaatgatgactcagctgactaccaacacttcctccaggactgtgtggatggcctgtttaaagaagtcaaagagaagtttaaaggctgggtcagctactccacttcggagcaggctgagctgtcctataagaaggtgagcgaaggaccccctctgaggctttggaggtcagtcattgaagtccctgctgtgccagaggaaatcttaaagcgcctacttaaagaacagcacctctgggatgtagacctgttggattcaaaagtgatcgaaattctggacagccaaactgaaatttaccagtatgtccaaaacagtatggcacctcatcctgctcgagactacgttgttttaagaacctggaggactaatttacccaaaggagcctgtgcccttttactaacctctgtggatcacgatcgcgcacctgtggtgggtgtgagggttaatgtgctcttgtccaggtatttgattgaaccctgtgggccaggaaaatccaaactcacctacatgtgcagagttgacttaaggggccacatgccagaatggtacacaaaatcttttggacatttgtgtgcagctgaagttgtaaagatccgggattccttcagtaaccagaacactgaaaccaaagacaccaaatctaggtgatcactgaagcaacgcaaccgcttccaccaccatggtgtttgtttctagaacttttgccagtccttgaagaatgggttctgtgtctaatcctgaaacaaagaaaactacaagctggagtgtaggaattgactatagcaatttgatacatttttaaagctgcttcctgtttgttgagggtctgtattcatagaccttgactggaatatgtaagactgtgcaaaaaaaaaaaaaaaatttatgtgtattcttattcagattgcttctgagaagcaaaactctttaaatacattatggaagataatgaagatacttcattctcttgtgatatcagtgtatgcgtacctgtgtcgctttatttgcagtgtgttgagggactggtgtatccactggaatagttggtactcttggatgtgttttctcaccaagatgagcaaagaaaggtttgcacagaggagtgtgaatgtgtgtttgttgctggctgaatggcaatagatgtctaaggtggattcagtgtctggcacactgagacacctccaagaaggagattgatgcatcaggttcagtttaacctggaatatctgactacccctgaatccacccagaaagggggcccaacacccttgtccatttatgggtattttttttcgaagttattaagcatattccttttccacgaacctcttctgtactttgattgtaataggttggctcttacacccattccaaatgcagtttatttttagacccgattgcaaatagtgatgtagttttaaccagtatggattagttcagggatgaactgctccctccagccttactggctctgatccacagggttttgttttgttttgttttgttttttgtttaagtcgagatataaaaactgaacacgataacacttactcttaaatcaagcatcaacactttttccctgttagaattctttgcatttttgtgtttgtaacagaaacgccttaagacactatgtttgggaatataggaaactatgtgtgtcccaaggaaatccctgtaaatttaactcacctacaaaaggctttttccccgcctttggttgttaacggcattcctgaaagccacatgtgtttattcattgggcttgttcttatcagcaaataggttttctggttttatgactttttgtcttattttatttttcctacatttctttttttttttttttcctttagaatgccctggaaatatatttaagtggtaatgaaaaatagtaatcatagtaaaacgcaacaagaagaaaaccaacccaaaccagtgaagttttttagaacctttagaagggtggtctttattcaggttttactgtaatggtaaggattgactcaagagacagtattagtaaatttattgtgtatggatcaaaagtgaataatgtatgaatgagagctgtaagaaggatttttattttgttataatttagttaccattttcagtgttatttcaaaggttctttgaagaattttggggcagggcatcagattagagttttaaaatttgagtattttggatatcagtgttcctcatgaagatatacatggatattcaattttgatggcttccagatttgtaagattgtatgttgtatataccattctattaagaaacatgtccactgtgctttcaaacatagataaagcatgataaagattattatttaagatatacttgtatttatacctcagatattcttttgggttttgtacctcaaggcttttttcttcttattgtaaatacactttacgtgaatacagtctaagtgaagaaaataaataaaaggaagaggtttataacttgctctatatctgtacagattataatcaataagtgcactattattaaatgtttaaagtaagggaaaagtctgggctgccttccttaatattgcatctcactcccacccttaaaaccacagattgcaaagcatagcattttagcatcaactacaatcaaaagagcgatttgctgaaggaaaaatcggactgcaaatcattccaaggccaaactgcaactgagccacccactcccaaacaggaaaccctggtgaaggttcaggaagcacggagattctctccaacaaaggtccagttaggaaacgacgctgagaggatgacgacaacgtgcaacagcagaaagatgcttgcaagcagagtcagggtcaccagtgaatgccacaaaagttctctttcccactgtttaatttgacaagagaagaatttgaaggatatgaacattttcaagaactctgctgaggtcacttagagcgccatcacaacttatttgtgtgactaattgcctagattgtaagctctttgagggcagggcttgtctcttacacatctttataatcccctgcagcggctttcagtattttgtacttgtaggcacctaataaatttattatttgctatactgaa

SEQ ID NO: 295594 - DNA, 6074 bp, Homo sapiens
tatgggctcgagcggccgcccgggcaggtgcccgagcgagggcgcttcgctcccagccaggacatggccgcacctctccgcatcaggagcgccggctcacggacttctcgcccaactccctgagcgctccctcgtttcgatctttagaaaaccccgctttctttctggggccgtgacgaggggcagggagcggcgagcaaggatgcgttgaggaccgcgagggcgcgcgtctcgggtgccgccgtgggtcccgacgcggaagccgagccgcctccgcctgcctcgacttccccacagcgcttccgccgccgcctgccgtgcttgatgtgcagaaagaagccggacaccatgatcctaacacaaattgaagccaaggaagcttgtgattggctacgggcaactggtttcccccagtatgcacagctttatgaagatttcctgttccccatcgatatttccttggtcaagagagagcatgattttttggacagagatgccattgaggctctatgcaggcgtctaaatactttaaacaaatgtgcggtgatgaagctagaaattagtcctcatcggaaacgaagtgacgattcagacgaggatgagccttgtgccatcagtggcaaatggactttccaaagggacagcaagaggtggtcccggcttgaagagtttgatgtcttttctccaaaacaagacctggtccctgggtccccagacgactcccacccgaaggacggccccagccccggaggcacgctgatggacctcagcgagcgccaggaggtgtcttccgtccgcagcctcagcagcactggcagcctccccagccacgcgccccccagcgaggatgctgccaccccccggactaactccgtcatcagcgtttgctcctccagcaacttggcaggcaatgacgactctttcggcagcctgccctctcccaaggaactgtccagcttcagcttcagcatgaaaggccacgaaaaaactgccaagtccaagacgcgcagtctgctgaaacggatggagagcctgaagctcaagagctcccatcacagcaagcacaaagcgccctcaaagctggggttgatcatcagcgggcccatcttgcaagaggggatggatgaggagaagctgaagcagctcaactgcgtggagatctccgccctcaatggcaaccgcatcaacgtccccatggtacgaaagaggagcgtttccaactccacgcagaccagcagcagcagcagccagtcggagaccagcagcgcggtcagcacgcccagccctgttacgaggacccggagcctcagtgcgtgcaacaagcgggtgggcatgtacttagagggcttcgatcctttcaatcagtcaacatttaacaacgtggtggagcagaactttaagaaccgcgagagctacccagaggacacggtgttctacatccctgaagatcacaagcctggcactttccccaaagctctcaccaatggcagtttctccccctcggggaataacggctctgtgaactggaggacgggaagcttccacggccctggccacatcagcctcaggagggaaaacagtagcgacagccccaaggaactgaagagacgcaattcttccagctccatgagcagccgcctgagcatctacgacaacgtgccgggctccatcctctactccagttcaggggacctggcggatctggagaacgaggacatcttccccgagctggacgacatcctctaccacgtgaaggggatgcagcggatagtcaatcagtggtcggagaagttttctgatgagggagattcggactcagccctggactcggtctctccctgcccgtcctctccaaaacagatacacctggatgtggacaacgaccgaaccacacccagcgacctggacagcacaggcaactccctgaatgaaccggaagagccctccgagatcccggaaagaagggattctggggttggggcttccctaaccaggtccaacaggcaccgactgagatggcacagtttccagagctcacatcggccaagcctcaactctgtatcactacagattaactgccagtctgtggcccagatgaacctgctgcagaaatactcactcctaaagctaacggccctgctggagaaatacacaccttctaacaagcatggttttagctgggccgtgcccaagttcatgaagaggatcaaggttccagactacaaggaccggagtgtgtttggggtcccactgacggtcaacgtgcagcgcacaggacaaccgttgcctcagagcatccagcaggccatgcgatacctccggaaccattgtttggatcaggttgggctcttcagaaaatcgggggtcaagtcccggattcaggctctgcgccagatgaatgaaggtgccatagactgtgtcaactacgaaggacagtctgcttatgacgtggcagacatgctgaagcagtattttcgagatcttcctgagccactaatgacgaacaaactctcggaaacctttctacagatctaccaatatgtgcccaaggaccagcgcctgcaggccatcaaggctgccatcatgctgctgcctgacgagaaccgggaggttctgcagaccctgctttatttcctgagcgatgtcacagcagccgtaaaagaaaaccagatgaccccaaccaacctggccgtgtgcttagcgccttccctcttccatctcaacaccctgaagagagagaattcctctcccagggtaatgcaaagaaaacaaagtttgggcaaaccagatcagaaagatttgaatgaaaacctagctgccactcaagggctggcccatatgatcgccgagtgcaagaagcttttccaggttcccgaggaaatgagccgatgtcgtaattcctataccgaacaagagctgaagcccctcactctggaagcactcgggcacctgggtaatgatgactcagctgactaccaacacttcctccaggactgtgtggatggcctgtttaaagaagtcaaagagaagtttaaaggctgggtcagctactccacttcggagcaggctgagctgtcctataagaaggtgagcgaaggaccccctctgaggctttggaggtcagtcattgaagtccctgctgtgccagaggaaatcttaaagcgcctacttaaagaacagcacctctgggatgtagacctgttggattcaaaagtgatcgaaattctggacagccaaactgaaatttaccagtatgtccaaaacagtatggcacctcatcctgctcgagactacgttgttttaagaacctggaggactaatttacccaaaggagcctgtgcccttttactaacctctgtggatcacgatcgcgcacctgtggtgggtgtgagggttaatgtgctcttgtccaggtatttgattgaaccctgtgggccaggaaaatccaaactcacctacatgtgcagagttgacttaaggggccacatgccagaatggtacacaaaatcttttggacatttgtgtgcagctgaagttgtaaagatccgggattccttcagtaaccagaacactgaaaccaaagacaccaaatctaggtgatcactgaagcaacgcaaccgcttccaccaccatggtgtttgtttctagaacttttgccagtccttgaagaatgggttctgtgtctaatcctgaaacaaagaaaactacaagctggagtgtaggaattgactatagcaatttgatacatttttaaagctgcttcctgtttgttgagggtctgtattcatagaccttgactggaatatgtaagactgtgcaaaaaaaaaaaaaaaatttatgtgtattcttattcagattgcttctgagaagcaaaactctttaaatacattatggaagataatgaagatacttcattctcttgtgatatcagtgtatgcgtacctgtgtcgctttatttgcagtgtgttgagggactggtgtatccactggaatagttggtactcttggatgtgttttctcaccaagatgagcaaagaaaggtttgcacagaggagtgtgaatgtgtgtttgttgctggctgaatggcaatagatgtctaaggtggattcagtgtctggcacactgagacacctccaagaaggagattgatgcatcaggttcagtttaacctggaatatctgactacccctgaatccacccagaaagggggcccaacacccttgtccatttatgggtattttttttcgaagttattaagcatattccttttccacgaacctcttctgtactttgattgtaataggttggctcttacacccattccaaatgcagtttatttttagacccgattgcaaatagtgatgtagttttaaccagtatggattagttcagggatgaactgctccctccagccttactggctctgatccacagggttttgttttgttttgttttgttttttgtttaagtcgagatataaaaactgaacacgataacacttactcttaaatcaagcatcaacactttttccctgttagaattctttgcatttttgtgtttgtaacagaaacgccttaagacactatgtttgggaatataggaaactatgtgtgtcccaaggaaatccctgtaaatttaactcacctacaaaaggctttttccccgcctttggttgttaacggcattcctgaaagccacatgtgtttattcattgggcttgttcttatcagcaaataggttttctggttttatgactttttgtcttattttatttttcctacatttctttttttttttttttcctttagaatgccctggaaatatatttaagtggtaatgaaaaatagtaatcatagtaaaacgcaacaagaagaaaaccaacccaaaccagtgaagttttttagaacctttagaagggtggtctttattcaggttttactgtaatggtaaggattgactcaagagacagtattagtaaatttattgtgtatggatcaaaagtgaataatgtatgaatgagagctgtaagaaggatttttattttgttataatttagttaccattttcagtgttatttcaaaggttctttgaagaattttggggcagggcatcagattagagttttaaaatttgagtattttggatatcagtgttcctcatgaagatatacatggatattcaattttgatggcttccagatttgtaagattgtatgttgtatataccattctattaagaaacatgtccactgtgctttcaaacatagataaagcatgataaagattattatttaagatatacttgtatttatacctcagatattcttttgggttttgtacctcaaggcttttttcttcttattgtaaatacactttacgtgaatacagtctaagtgaagaaaataaataaaaggaagaggtttataacttgctctatatctgtacagattataatcaataagtgcactattattaaatgtttaaagtaagggaaaagtctgggctgccttccttaatattgcatctcactcccacccttaaaaccacagattgcaaagcatagcattttagcatcaactacaatcaaaagagcgatttgctgaaggaaaaatcggactgcaaatcattccaaggccaaactgcaactgagccacccactcccaaacaggaaaccctggtgaaggttcaggaagcacggagattctctccaacaaaggtccagttaggaaacgacgctgagaggatgacgacaacgtgcaacagcagaaagatgcttgcaagcagagtcagggtcaccagtgaatgccacaaaagttctctttcccactgtttaatttgacaagagaagaatttgaaggatatgaacattttcaagaactctgctgaggtcacttagagcgccatcacaacttatttgtgtgactaattgcctagattgtaagctctttgagggcagggcttgtctcttacacatctttataatcccctgcagcggctttcagtattttgtacttgtaggcacctaataaatttattatttgctatactgaaaaatattattaaaattttaaaaaa

SEQ ID NO: 295595 - DNA, 5996 bp, Homo sapiens
tatgggctcgagcggccgcccgggcaggtgcccgagcgagggcgcttcgctcccagccaggacatggccgcacctctccgcatcaggagcgccggctcacggacttctcgcccaactccctgagcgctccctcgtttcgatctttagaaaaccccgctttctttctggggccgtgacgaggggcagggagcggcgagcaaggatgcgttgaggaccgcgagggcgcgcgtctcgggtgccgccgtgggtcccgacgcggaagccgagccgcctccgcctgcctcgacttccccacagcgcttccgccgccgcctgccgtgcttgatgtgcagaaagaagccggacaccatgatcctaacacaaattgaagccaaggaagcttgtgattggctacgggcaactggtttcccccagtatgcacagctttatgaagatttcctgttccccatcgatatttccttggtcaagagagagcatgattttttggacagagatgccattgaggctctatgcaggcgtctaaatactttaaacaaatgtgcggtgatgaagctagaaattagtcctcatcggaaacgaagtgacgattcagacgaggatgagccttgtgccatcagtggcaaatggactttccaaagggacagcaagaggtggtcccggcttgaagagtttgatgtcttttctccaaaacaagacctggtccctgggtccccagacgactcccacccgaaggacggccccagccccggaggcacgctgatggacctcagcgagcgccaggaggtgtcttccgtccgcagcctcagcagcactggcagcctccccagccacgcgccccccagcgaggatgctgccaccccccggactaactccgtcatcagcgtttgctcctccagcaacttggcaggcaatgacgactctttcggcagcctgccctctcccaaggaactgtccagcttcagcttcagcatgaaaggccacgaaaaaactgccaagtccaagacgcgcagtctgctgaaacggatggagagcctgaagctcaagagctcccatcacagcaagcacaaagcgccctcaaagctggggttgatcatcagcgggcccatcttgcaagaggggatggatgaggagaagctgaagcagctcaactgcgtggagatctccgccctcaatggcaaccgcatcaacgtccccatggtacgaaagaggagcgtttccaactccacgcagaccagcagcagcagcagccagtcggagaccagcagcgcggtcagcacgcccagccctgttacgaggacccggagcctcagtgcgtgcaacaagcgggtgggcatgtacttagagggcttcgatcctttcaatcagtcaacatttaacaacgtggtggagcagaactttaagaaccgcgagagctacccagaggacacggtgttctacatccctgaagatcacaagcctggcactttccccaaagctctcaccaatggcagtttctccccctcggggaataacggctctgtgaactggaggacgggaagcttccacggccctggccacatcagcctcaggagggaaaacagtagcgacagccccaaggaactgaagagacgcaattcttccagctccatgagcagccgcctgagcatctacgacaacgtgccgggctccatcctctactccagttcaggggacctggcggatctggagaacgaggacatcttccccgagctggacgacatcctctaccacgtgaaggggatgcagcggatagtcaatcagtggtcggagaagttttctgatgagggagattcggactcagccctggactcggtctctccctgcccgtcctctccaaaacagatacacctggatgtggacaacgaccgaaccacacccagcgacctggacagcacaggcaactccctgaatgaaccggaagagccctccgagatcccggaaagaagggattctggggttggggcttccctaaccaggtccaacaggcaccgactgagatggcacagtttccagagctcacatcggccaagcctcaactctgtatcactacagattaactgccagtctgtggcccagatgaacctgctgcagaaatactcactcctaaagctaacggccctgctggagaaatacacaccttctaacaagcatggttttagctgggccgtgcccaagttcatgaagaggatcaaggttccagactacaaggaccggagtgtgtttggggtcccactgacggtcaacgtgcagcgcacaggacaaccgttgcctcagagcatccagcaggccatgcgatacctccggaaccattgtttggatcaggttgggctcttcagaaaatcgggggtcaagtcccggattcaggctctgcgccagatgaatgaaggtgccatagactgtgtcaactacgaaggacagtctgcttatgacgtggcagacatgctgaagcagtattttcgagatcttcctgagccactaatgacgaacaaactctcggaaacctttctacagatctaccaatatgtgcccaaggaccagcgcctgcaggccatcaaggctgccatcatgctgctgcctgacgagaaccgggaggttctgcagaccctgctttatttcctgagcgatgtcacagcagccgtaaaagaaaaccagatgaccccaaccaacctggccgtgtgcttagcgccttccctcttccatctcaacaccctgaagagagagaattcctctcccagggtaatgcaaagaaaacaaagtttgggcaaaccagatcagaaagatttgaatgaaaacctagctgccactcaagggctggcccatatgatcgccgagtgcaagaagcttttccaggttcccgaggaaatgagccgatgtcgtaattcctataccgaacaagagctgaagcccctcactctggaagcactcgggcacctgggtaatgatgactcagctgactaccaacacttcctccaggactgtgtggatggcctgtttaaagaagtcaaagagaagtttaaaggctgggtcagctactccacttcggagcaggctgagctgtcctataagaaggtgagcgaaggaccccctctgaggctttggaggtcagtcattgaagtccctgctgtgccagaggaaatcttaaagcgcctacttaaagaacagcacctctgggatgtagacctgttggattcaaaagtgatcgaaattctggacagccaaactgaaatttaccagtatgtccaaaacagtatggcacctcatcctgctcgagactacgttgttttaagaacctggaggactaatttacccaaaggagcctgtgcccttttactaacctctgtggatcacgatcgcgcacctgtggtgggtgtgagggttaatgtgctcttgtccaggtatttgattgaaccctgtgggccaggaaaatccaaactcacctacatgtgcagagttgacttaaggggccacatgccagaatggtacacaaaatcttttggacatttgtgtgcagctgaagttgtaaagatccgggattccttcagtaaccagaacactgaaaccaaagacaccaaatctaggtgatcactgaagcaacgcaaccgcttccaccaccatggtgtttgtttctagaacttttgccagtccttgaagaatgggttctgtgtctaatcctgaaacaaagaaaactacaagctggagtgtaggaattgactatagcaatttgatacatttttaaagctgcttcctgtttgttgagggtctgtattcatagaccttgactggaatatgtaagactgtgcaaaaaaaaaaaaaaaatttatgtgtattcttattcagattgcttctgagaagcaaaactctttaaatacattatggaagataatgaagatacttcattctcttgtgatatcagtgtatgcgtacctgtgtcgctttatttgcagtgtgttgagggactggtgtatccactggaatagttggtactcttggatgtgttttctcaccaagatgagcaaagaaaggtttgcacagaggagtgtgaatgtgtgtttgttgctggctgaatggcaatagatgtctaaggtggattcagtgtctggcacactgagacacctccaagaaggagattgatgcatcaggttcagtttaacctggaatatctgactacccctgaatccacccagaaagggggcccaacacccttgtccatttatgggtattttttttcgaagttattaagcatattccttttccacgaacctcttctgtactttgattgtaataggttggctcttacacccattccaaatgcagtttatttttagacccgattgcaaatagtgatgtagttttaaccagtatggattagttcagggatgaactgctccctccagccttactggctctgatccacagggttttgttttgttttgttttgttttttgtttaagtcgagatataaaaactgaacacgataacacttactcttaaatcaagcatcaacactttttccctgttagaattctttgcatttttgtgtttgtaacagaaacgccttaagacactatgtttgggaatataggaaactatgtgtgtcccaaggaaatccctgtaaatttaactcacctacaaaaggctttttccccgcctttggttgttaacggcattcctgaaagccacatgtgtttattcattgggcttgttcttatcagcaaataggttttctggttttatgactttttgtcttattttatttttcctacatttctttttttttttttttcctttagaatgccctggaaatatatttaagtggtaatgaaaaatagtaatcatagtaaaacgcaacaagaagaaaaccaacccaaaccagtgaagttttttagaacctttagaagggtggtctttattcaggttttactgtaatggtaaggattgactcaagagacagtattagtaaatttattgtgtatggatcaaaagtgaataatgtatgaatgagagctgtaagaaggatttttattttgttataatttagttaccattttcagtgttatttcaaaggttctttgaagaattttggggcagggcatcagattagagttttaaaatttgagtattttggatatcagtgttcctcatgaagatatacatggatattcaattttgatggcttccagatttgtaagattgtatgttgtatataccattctattaagaaacatgtccactgtgctttcaaacatagataaagcatgataaagattattatttaagatatacttgtatttatacctcagatattcttttgggttttgtacctcaaggcttttttcttcttattgtaaatacactttacgtgaatacagtctaagtgaagaaaataaataaaaggaagaggtttataacttgctctatatctgtacagattataatcaataagtgcactattattaaatgtttaaagtaagggaaaagtctgggctgccttccttaatattgcatctcactcccacccttaaaaccacagattgcaaagcatagcattttagcatcaactacaatcaaaagagcgatttgctgaaggacaaacaggaaaccctggtgaaggttcaggaagcacggagattctctccaacaaaggtccagttaggaaacgacgctgagaggatgacgacaacgtgcaacagcagaaagatgcttgcaagcagagtcagggtcaccagtgaatgccacaaaagttctctttcccactgtttaatttgacaagagaagaatttgaaggatatgaacattttcaagaactctgctgaggtcacttagagcgccatcacaacttatttgtgtgactaattgcctagattgtaagctctttgagggcagggcttgtctcttacacatctttataatcccctgcagcggctttcagtattttgtacttgtaggcacctaataaatttattatttgctatactgaa

SEQ ID NO: 295596 - DNA, 4222 bp, Homo sapiens
  misc_feature (320)..(320): n is a, c, g, or t
gctgttgcatatagtgctggggtggacctggtttcaggacaccagggagcctggggtcggctcacaaaacccccattgttccttttccatcttcctttagaaacctaaagatgtaatgttctccgggtcatcagcagcagattttattttgacttcaggtcattcactgttgagctctggagttggctcccattgtgttaggctctcattgctgttttcccatcatgtgttatctgcgccttttgaccctaaatgctttcgatctcatcaagaactcagaagtgattcttacccttttttcaagacaaaagggaccttgnttttcacactctatcagatgcacctaattaggggccgtgcccaagttcatgaagaggatcaaggttccagactacaaggaccggagtgtgtttggggtcccactgacggtcaacgtgcagcgcacaggacaaccgttgcctcagagcatccagcaggccatgcgatacctccggaaccattgtttggatcaggttgggctcttcagaaaatcgggggtcaagtcccggattcaggctctgcgccagatgaatgaaggtgccatagactgtgtcaactacgaaggacagtctgcttatgacgtggcagacatgctgaagcagtattttcgagatcttcctgagccactaatgacgaacaaactctcggaaacctttctacagatctaccaatatgtgcccaaggaccagcgcctgcaggccatcaaggctgccatcatgctgctgcctgacgagaaccgggaggttctgcagaccctgctttatttcctgagcgatgtcacagcagccgtaaaagaaaaccagatgaccccaaccaacctggccgtgtgcttagcgccttccctcttccatctcaacaccctgaagagagagaattcctctcccagggtaatgcaaagaaaacaaagtttgggcaaaccagatcagaaagatttgaatgaaaacctagctgccactcaagggctggcccatatgatcgccgagtgcaagaagcttttccaggttcccgaggaaatgagccgatgtcgtaattcctataccgaacaagagctgaagcccctcactctggaagcactcgggcacctgggtaatgatgactcagctgactaccaacacttcctccaggactgtgtggatggcctgtttaaagaagtcaaagagaagtttaaaggctgggtcagctactccacttcggagcaggctgagctgtcctataagaaggtgagcgaaggaccccctctgaggctttggaggtcagtcattgaagtccctgctgtgccagaggaaatcttaaagcgcctacttaaagaacagcacctctgggatgtagacctgttggattcaaaagtgatcgaaattctggacagccaaactgaaatttaccagtatgtccaaaacagtatggcacctcatcctgctcgagactacgttgttttaagaacctggaggactaatttacccaaaggagcctgtgcccttttactaacctctgtggatcacgatcgcgcacctgtggtgggtgtgagggttaatgtgctcttgtccaggtatttgattgaaccctgtgggccaggaaaatccaaactcacctacatgtgcagagttgacttaaggggccacatgccagaatggtacacaaaatcttttggacatttgtgtgcagctgaagttgtaaagatccgggattccttcagtaaccagaacactgaaaccaaagacaccaaatctaggtgatcactgaagcaacgcaaccgcttccaccaccatggtgtttgtttctagaacttttgccagtccttgaagaatgggttctgtgtctaatcctgaaacaaagaaaactacaagctggagtgtaggaattgactatagcaatttgatacatttttaaagctgcttcctgtttgttgagggtctgtattcatagaccttgactggaatatgtaagactgtgcaaaaaaaaaaaaaaaatttatgtgtattcttattcagattgcttctgagaagcaaaactctttaaatacattatggaagataatgaagatacttcattctcttgtgatatcagtgtatgcgtacctgtgtcgctttatttgcagtgtgttgagggactggtgtatccactggaatagttggtactcttggatgtgttttctcaccaagatgagcaaagaaaggtttgcacagaggagtgtgaatgtgtgtttgttgctggctgaatggcaatagatgtctaaggtggattcagtgtctggcacactgagacacctccaagaaggagattgatgcatcaggttcagtttaacctggaatatctgactacccctgaatccacccagaaagggggcccaacacccttgtccatttatgggtattttttttcgaagttattaagcatattccttttccacgaacctcttctgtactttgattgtaataggttggctcttacacccattccaaatgcagtttatttttagacccgattgcaaatagtgatgtagttttaaccagtatggattagttcagggatgaactgctccctccagccttactggctctgatccacagggttttgttttgttttgttttgttttttgtttaagtcgagatataaaaactgaacacgataacacttactcttaaatcaagcatcaacactttttccctgttagaattctttgcatttttgtgtttgtaacagaaacgccttaagacactatgtttgggaatataggaaactatgtgtgtcccaaggaaatccctgtaaatttaactcacctacaaaaggctttttccccgcctttggttgttaacggcattcctgaaagccacatgtgtttattcattgggcttgttcttatcagcaaataggttttctggttttatgactttttgtcttattttatttttcctacatttctttttttttttttttcctttagaatgccctggaaatatatttaagtggtaatgaaaaatagtaatcatagtaaaacgcaacaagaagaaaaccaacccaaaccagtgaagttttttagaacctttagaagggtggtctttattcaggttttactgtaatggtaaggattgactcaagagacagtattagtaaatttattgtgtatggatcaaaagtgaataatgtatgaatgagagctgtaagaaggatttttattttgttataatttagttaccattttcagtgttatttcaaaggttctttgaagaattttggggcagggcatcagattagagttttaaaatttgagtattttggatatcagtgttcctcatgaagatatacatggatattcaattttgatggcttccagatttgtaagattgtatgttgtatataccattctattaagaaacatgtccactgtgctttcaaacatagataaagcatgataaagattattatttaagatatacttgtatttatacctcagatattcttttgggttttgtacctcaaggcttttttcttcttattgtaaatacactttacgtgaatacagtctaagtgaagaaaataaataaaaggaagaggtttataacttgctctatatctgtacagattataatcaataagtgcactattattaaatgtttaaagtaagggaaaagtctgggctgccttccttaatattgcatctcactcccacccttaaaaccacagattgcaaagcatagcattttagcatcaactacaatcaaaagagcgatttgctgaaggaaaaatcggactgcaaatcattccaaggccaaactgcaactgagccacccactcccaaacaggaaaccctggtgaaggttcaggaagcacggagattctctccaacaaaggtccagttaggaaacgacgctgagaggatgacgacaacgtgcaacagcagaaagatgcttgcaagcagagtcagggtcaccagtgaatgccacaaaagttctctttcccactgtttaatttgacaagagaagaatttgaaggatatgaacattttcaagaactctgctgaggtcacttagagcgccatcacaacttatttgtgtgactaattgcctagattgtaagctctttgagggcagggcttgtctcttacacatctttataatcccctgcagcggctttcagtattttgtacttgtaggcacctaataaatttattatttgctatactgaa

SEQ ID NO: 295597 - DNA, 6101 bp, Homo sapiens
tgacttggttatctgtgggttcctgggtggccagggtctcctttaattgtaaacactgcatgccaagtcagacttcgtaagagaaaggaaataagagaagatcgagatagggcgcggctggactccatggtgctgctgattatgaaactggaccagcttgatcaggacatagaaaatgccctcagcaccagctcctctccatcaggcacaccaacaaacctgcggcggcacgttcctgatctggaatcaggatctgaaagtggagcagataccatttcagtaaatcagacacgagtaaatttgtcttctgacactgagtccacggacctcccatcttccactccagtagccaattctggaaccaaacccaagactacggctattcaaggtatttcagagaaggaaaaggctgaaattgaagccaaggaagcttgtgattggctacgggcaactggtttcccccagtatgcacagctttatgaagatttcctgttccccatcgatatttccttggtcaagagagagcatgattttttggacagagatgccattgaggctctatgcaggcgtctaaatactttaaacaaatgtgcggtgatgaagctagaaattagtcctcatcggaaacgaagtgacgattcagacgaggatgagccttgtgccatcagtggcaaatggactttccaaagggacagcaagaggtggtcccggcttgaagagtttgatgtcttttctccaaaacaagacctggtccctgggtccccagacgactcccacccgaaggacggccccagccccggaggcacgctgatggacctcagcgagcgccaggaggtgtcttccgtccgcagcctcagcagcactggcagcctccccagccacgcgccccccagcgaggatgctgccaccccccggactaactccgtcatcagcgtttgctcctccagcaacttggcaggcaatgacgactctttcggcagcctgccctctcccaaggaactgtccagcttcagcttcagcatgaaaggccacgaaaaaactgccaagtccaagacgcgcagtctgctgaaacggatggagagcctgaagctcaagagctcccatcacagcaagcacaaagcgccctcaaagctggggttgatcatcagcgggcccatcttgcaagaggggatggatgaggagaagctgaagcagctcaactgcgtggagatctccgccctcaatggcaaccgcatcaacgtccccatggtacgaaagaggagcgtttccaactccacgcagaccagcagcagcagcagccagtcggagaccagcagcgcggtcagcacgcccagccctgttacgaggacccggagcctcagtgcgtgcaacaagcgggtgggcatgtacttagagggcttcgatcctttcaatcagtcaacatttaacaacgtggtggagcagaactttaagaaccgcgagagctacccagaggacacggtgttctacatccctgaagatcacaagcctggcactttccccaaagctctcaccaatggcagtttctccccctcggggaataacggctctgtgaactggaggacgggaagcttccacggccctggccacatcagcctcaggagggaaaacagtagcgacagccccaaggaactgaagagacgcaattcttccagctccatgagcagccgcctgagcatctacgacaacgtgccgggctccatcctctactccagttcaggggacctggcggatctggagaacgaggacatcttccccgagctggacgacatcctctaccacgtgaaggggatgcagcggatagtcaatcagtggtcggagaagttttctgatgagggagattcggactcagccctggactcggtctctccctgcccgtcctctccaaaacagatacacctggatgtggacaacgaccgaaccacacccagcgacctggacagcacaggcaactccctgaatgaaccggaagagccctccgagatcccggaaagaagggattctggggttggggcttccctaaccaggtccaacaggcaccgactgagatggcacagtttccagagctcacatcggccaagcctcaactctgtatcactacagattaactgccagtctgtggcccagatgaacctgctgcagaaatactcactcctaaagctaacggccctgctggagaaatacacaccttctaacaagcatggttttagctgggccgtgcccaagttcatgaagaggatcaaggttccagactacaaggaccggagtgtgtttggggtcccactgacggtcaacgtgcagcgcacaggacaaccgttgcctcagagcatccagcaggccatgcgatacctccggaaccattgtttggatcaggttgggctcttcagaaaatcgggggtcaagtcccggattcaggctctgcgccagatgaatgaaggtgccatagactgtgtcaactacgaaggacagtctgcttatgacgtggcagacatgctgaagcagtattttcgagatcttcctgagccactaatgacgaacaaactctcggaaacctttctacagatctaccaatatgtgcccaaggaccagcgcctgcaggccatcaaggctgccatcatgctgctgcctgacgagaaccgggaggttctgcagaccctgctttatttcctgagcgatgtcacagcagccgtaaaagaaaaccagatgaccccaaccaacctggccgtgtgcttagcgccttccctcttccatctcaacaccctgaagagagagaattcctctcccagggtaatgcaaagaaaacaaagtttgggcaaaccagatcagaaagatttgaatgaaaacctagctgccactcaagggctggcccatatgatcgccgagtgcaagaagcttttccaggttcccgaggaaatgagccgatgtcgtaattcctataccgaacaagagctgaagcccctcactctggaagcactcgggcacctgggtaatgatgactcagctgactaccaacacttcctccaggactgtgtggatggcctgtttaaagaagtcaaagagaagtttaaaggctgggtcagctactccacttcggagcaggctgagctgtcctataagaaggtgagcgaaggaccccctctgaggctttggaggtcagtcattgaagtccctgctgtgccagaggaaatcttaaagcgcctacttaaagaacagcacctctgggatgtagacctgttggattcaaaagtgatcgaaattctggacagccaaactgaaatttaccagtatgtccaaaacagtatggcacctcatcctgctcgagactacgttgttttaagaacctggaggactaatttacccaaaggagcctgtgcccttttactaacctctgtggatcacgatcgcgcacctgtggtgggtgtgagggttaatgtgctcttgtccaggtatttgattgaaccctgtgggccaggaaaatccaaactcacctacatgtgcagagttgacttaaggggccacatgccagaatggtacacaaaatcttttggacatttgtgtgcagctgaagttgtaaagatccgggattccttcagtaaccagaacactgaaaccaaagacaccaaatctaggtgatcactgaagcaacgcaaccgcttccaccaccatggtgtttgtttctagaacttttgccagtccttgaagaatgggttctgtgtctaatcctgaaacaaagaaaactacaagctggagtgtaggaattgactatagcaatttgatacatttttaaagctgcttcctgtttgttgagggtctgtattcatagaccttgactggaatatgtaagactgtgcaaaaaaaaaaaaaaaatttatgtgtattcttattcagattgcttctgagaagcaaaactctttaaatacattatggaagataatgaagatacttcattctcttgtgatatcagtgtatgcgtacctgtgtcgctttatttgcagtgtgttgagggactggtgtatccactggaatagttggtactcttggatgtgttttctcaccaagatgagcaaagaaaggtttgcacagaggagtgtgaatgtgtgtttgttgctggctgaatggcaatagatgtctaaggtggattcagtgtctggcacactgagacacctccaagaaggagattgatgcatcaggttcagtttaacctggaatatctgactacccctgaatccacccagaaagggggcccaacacccttgtccatttatgggtattttttttcgaagttattaagcatattccttttccacgaacctcttctgtactttgattgtaataggttggctcttacacccattccaaatgcagtttatttttagacccgattgcaaatagtgatgtagttttaaccagtatggattagttcagggatgaactgctccctccagccttactggctctgatccacagggttttgttttgttttgttttgttttttgtttaagtcgagatataaaaactgaacacgataacacttactcttaaatcaagcatcaacactttttccctgttagaattctttgcatttttgtgtttgtaacagaaacgccttaagacactatgtttgggaatataggaaactatgtgtgtcccaaggaaatccctgtaaatttaactcacctacaaaaggctttttccccgcctttggttgttaacggcattcctgaaagccacatgtgtttattcattgggcttgttcttatcagcaaataggttttctggttttatgactttttgtcttattttatttttcctacatttctttttttttttttttcctttagaatgccctggaaatatatttaagtggtaatgaaaaatagtaatcatagtaaaacgcaacaagaagaaaaccaacccaaaccagtgaagttttttagaacctttagaagggtggtctttattcaggttttactgtaatggtaaggattgactcaagagacagtattagtaaatttattgtgtatggatcaaaagtgaataatgtatgaatgagagctgtaagaaggatttttattttgttataatttagttaccattttcagtgttatttcaaaggttctttgaagaattttggggcagggcatcagattagagttttaaaatttgagtattttggatatcagtgttcctcatgaagatatacatggatattcaattttgatggcttccagatttgtaagattgtatgttgtatataccattctattaagaaacatgtccactgtgctttcaaacatagataaagcatgataaagattattatttaagatatacttgtatttatacctcagatattcttttgggttttgtacctcaaggcttttttcttcttattgtaaatacactttacgtgaatacagtctaagtgaagaaaataaataaaaggaagaggtttataacttgctctatatctgtacagattataatcaataagtgcactattattaaatgtttaaagtaagggaaaagtctgggctgccttccttaatattgcatctcactcccacccttaaaaccacagattgcaaagcatagcattttagcatcaactacaatcaaaagagcgatttgctgaaggaaaaatcggactgcaaatcattccaaggccaaactgcaactgagccacccactcccaaacaggaaaccctggtgaaggttcaggaagcacggagattctctccaacaaaggtccagttaggaaacgacgctgagaggatgacgacaacgtgcaacagcagaaagatgcttgcaagcagagtcagggtcaccagtgaatgccacaaaagttctctttcccactgtttaatttgacaagagaagaatttgaaggatatgaacattttcaagaactctgctgaggtcacttagagcgccatcacaacttatttgtgtgactaattgcctagattgtaagctctttgagggcagggcttgtctcttacacatctttataatcccctgcagcggctttcagtattttgtacttgtaggcacctaataaatttattatttgctatactgaa

SEQ ID NO: 295598 - DNA, 3960 bp, Homo sapiens
tatgggctcgagcggccgcccgggcaggtgcccgagcgagggcgcttcgctcccagccaggacatggccgcacctctccgcatcaggagcgccggctcacggacttctcgcccaactccctgagcgctccctcgtttcgatctttagaaaaccccgctttctttctggggccgtgacgaggggcagggagcggcgagcaaggatgcgttgaggaccgcgagggcgcgcgtctcgggtgccgccgtgggtcccgacgcggaagccgagccgcctccgcctgcctcgacttccccacagcgcttccgccgccgcctgccgtgcttgatgtgcagaaagaagccggacaccatgatcctaacacaaattgaagccaaggaagcttgtgattggctacgggcaactggtttcccccagtatgcacagctttatgaagatttcctgttccccatcgatatttccttggtcaagagagagcatgattttttggacagagatgccattgaggctctatgcaggcgtctaaatactttaaacaaatgtgcggtgatgaagctagaaattagtcctcatcggaaacgaagtgacgattcagacgaggatgagccttgtgccatcagtggcaaatggactttccaaagggacagcaagaggtggtcccggcttgaagagtttgatgtcttttctccaaaacaagacctggtccctgggtccccagacgactcccacccgaaggacggccccagccccggaggcacgctgatggacctcagcgagcgccaggaggtgtcttccgtccgcagcctcagcagcactggcagcctccccagccacgcgccccccagcgaggatgctgccaccccccggactaactccgtcatcagcgtttgctcctccagcaacttggcaggcaatgacgactctttcggcagcctgccctctcccaaggaactgtccagcttcagcttcagcatgaaaggccacgaaaaaactgccaagtccaagacgcgcagtctgctgaaacggatggagagcctgaagctcaagagctcccatcacagcaagcacaaagcgccctcaaagctggggttgatcatcagcgggcccatcttgcaagaggggatggatgaggagaagctgaagcagctcaactgcgtggagatctccgccctcaatggcaaccgcatcaacgtccccatggtacgaaagaggagcgtttccaactccacgcagaccagcagcagcagcagccagtcggagaccagcagcgcggtcagcacgcccagccctgttacgaggacccggagcctcagtgcgtgcaacaagcgggtgggcatgtacttagagggcttcgatcctttcaatcagtcaacatttaacaacgtggtggagcagaactttaagaaccgcgagagctacccagaggacacggtgttctacatccctgaagatcacaagcctggcactttccccaaagctctcaccaatggcagtttctccccctcggggaataacggctctgtgaactggaggacgggaagcttccacggccctggccacatcagcctcaggagggaaaacagtagcgacagccccaaggaactgaagagacgcaattcttccagctccatgagcagccgcctgagcatctacgacaacgtgccgggctccatcctctactccagttcaggggacctggcggatctggagaacgaggacatcttccccgagctggacgacatcctctaccacgtgaaggggatgcagcggatagtcaatcagtggtcggagaagttttctgatgagggagattcggactcagccctggactcggtctctccctgcccgtcctctccaaaacagatacacctggatgtggacaacgaccgaaccacacccagcgacctggacagcacaggcaactccctgaatgaaccggaagagccctccgagatcccggaaagaagggattctggggttggggcttccctaaccaggtccaacaggcaccgactgagatggcacagtttccagagctcacatcggccaagcctcaactctgtatcactacagattaactgccagtctgtggcccagatgaacctgctgcagaaatactcactcctaaagctaacggccctgctggagaaatacacaccttctaacaagcatggttttagctgggccgtgcccaagttcatgaagaggatcaaggttccagactacaaggaccggagtgtgtttggggtcccactgacggtcaacgtgcagcgcacaggacaaccgttgcctcagagcatccagcaggccatgcgatacctccggaaccattgtttggatcaggttgggctcttcagaaaatcgggggtcaagtcccggattcaggctctgcgccagatgaatgaaggtgccatagactgtgtcaactacgaaggacagtctgcttatgacgtggcagacatgctgaagcagtattttcgagatcttcctgagccactaatgacgaacaaactctcggaaacctttctacagatctaccaatatgtgcccaaggaccagcgcctgcaggccatcaaggctgccatcatgctgctgcctgacgagaaccgggaggttctgcagaccctgctttatttcctgagcgatgtcacagcagccgtaaaagaaaaccagatgaccccaaccaacctggccgtgtgcttagcgccttccctcttccatctcaacaccctgaagagagagaattcctctcccagggtaatgcaaagaaaacaaagtttgggcaaaccagatcagaaagatttgaatgaaaacctagctgccactcaagggctggcccatatgatcgccgagtgcaagaagcttttccaggttcccgaggaaatgagccgatgtcgtaattcctataccgaacaagagctgaagcccctcactctggaagcactcgggcacctgggtaatgatgactcagctgactaccaacacttcctccaggactgtgtggatggcctgtttaaagaagtcaaagagaagtttaaaggctgggtcagctactccacttcggagcaggctgagctgtcctataagaaggtgagcgaaggaccccctctgaggctttggaggtcagtcattgaagtccctgctgtgccagaggaaatcttaaagcgcctacttaaagaacagcacctctgggatgtagacctgttggattcaaaagtgatcgaaattctggacagccaaactgaaatttaccagtatgtccaaaacagtatggcacctcatcctgctcgagactacgttgttttaagaacctggaggactaatttacccaaaggagcctgtgcccttttactaacctctgtggatcacgatcgcgcacctgtggtgggtgtgagggttaatgtgctcttgtccaggtatttgattgaaccctgtgggccaggaaaatccaaactcacctacatgtgcagagttgacttaaggggccacatgccagaatggtacacaaaatcttttggacatttgtgtgcagctgaagttgtaaagatccgggattccttcagtaaccagaacactgaaaccaaagacaccaaatctaggtgatcactgaagcaacgcaaccgcttccaccaccatggtgtttgtttctagaacttttgccagtccttgaagaatgggttctgtgtctaatcctgaaacaaagaaaactacaagctggagtgtaggaattgactatagcaatttgatacatttttaaagctgcttcctgtttgttgagggtctgtattcatagaccttgactggaatatgtaagactgtgcaaaaaaaaaaaaaaaaaaattttgtggggctcggccgcgaaaggttttaaacacttgttggggggggccgtggaaggaacgggcaaagggtcaggatcgggcggaaggggggtttcaaaaaagggggggcgggttgaattct

SEQ ID NO: 295599 - DNA, 3000 bp, Homo sapiens
gattgccttggcactgaaaaatacatcctctttccaggtgagcgaaggaccccctctgaggctttggaggtcagtcattgaagtccctgctgtgccagaggaaatcttaaagcgcctacttaaagaacagcacctctgggatgtagacctgttggattcaaaagtgatcgaaattctggacagccaaactgaaatttaccagtatgtccaaaacagtatggcacctcatcctgctcgagactacgttgttttaagaacctggaggactaatttacccaaaggagcctgtgcccttttactaacctctgtggatcacgatcgcgcacctgtggtgggtgtgagggttaatgtgctcttgtccaggtatttgattgaaccctgtgggccaggaaaatccaaactcacctacatgtgcagagttgacttaaggggccacatgccagaatggtacacaaaatcttttggacatttgtgtgcagctgaagttgtaaagatccgggattccttcagtaaccagaacactgaaaccaaagacaccaaatctaggtgatcactgaagcaacgcaaccgcttccaccaccatggtgtttgtttctagaacttttgccagtccttgaagaatgggttctgtgtctaatcctgaaacaaagaaaactacaagctggagtgtaggaattgactatagcaatttgatacatttttaaagctgcttcctgtttgttgagggtctgtattcatagaccttgactggaatatgtaagactgtgcaaaaaaaaaaaaaaaatttatgtgtattcttattcagattgcttctgagaagcaaaactctttaaatacattatggaagataatgaagatacttcattctcttgtgatatcagtgtatgcgtacctgtgtcgctttatttgcagtgtgttgagggactggtgtatccactggaatagttggtactcttggatgtgttttctcaccaagatgagcaaagaaaggtttgcacagaggagtgtgaatgtgtgtttgttgctggctgaatggcaatagatgtctaaggtggattcagtgtctggcacactgagacacctccaagaaggagattgatgcatcaggttcagtttaacctggaatatctgactacccctgaatccacccagaaagggggcccaacacccttgtccatttatgggtattttttttcgaagttattaagcatattccttttccacgaacctcttctgtactttgattgtaataggttggctcttacacccattccaaatgcagtttatttttagacccgattgcaaatagtgatgtagttttaaccagtatggattagttcagggatgaactgctccctccagccttactggctctgatccacagggttttgttttgttttgttttgttttttgtttaagtcgagatataaaaactgaacacgataacacttactcttaaatcaagcatcaacactttttccctgttagaattctttgcatttttgtgtttgtaacagaaacgccttaagacactatgtttgggaatataggaaactatgtgtgtcccaaggaaatccctgtaaatttaactcacctacaaaaggctttttccccgcctttggttgttaacggcattcctgaaagccacatgtgtttattcattgggcttgttcttatcagcaaataggttttctggttttatgactttttgtcttattttatttttcctacatttctttttttttttttttcctttagaatgccctggaaatatatttaagtggtaatgaaaaatagtaatcatagtaaaacgcaacaagaagaaaaccaacccaaaccagtgaagttttttagaacctttagaagggtggtctttattcaggttttactgtaatggtaaggattgactcaagagacagtattagtaaatttattgtgtatggatcaaaagtgaataatgtatgaatgagagctgtaagaaggatttttattttgttataatttagttaccattttcagtgttatttcaaaggttctttgaagaattttggggcagggcatcagattagagttttaaaatttgagtattttggatatcagtgttcctcatgaagatatacatggatattcaattttgatggcttccagatttgtaagattgtatgttgtatataccattctattaagaaacatgtccactgtgctttcaaacatagataaagcatgataaagattattatttaagatatacttgtatttatacctcagatattcttttgggttttgtacctcaaggcttttttcttcttattgtaaatacactttacgtgaatacagtctaagtgaagaaaataaataaaaggaagaggtttataacttgctctatatctgtacagattataatcaataagtgcactattattaaatgtttaaagtaagggaaaagtctgggctgccttccttaatattgcatctcactcccacccttaaaaccacagattgcaaagcatagcattttagcatcaactacaatcaaaagagcgatttgctgaaggaaaaatcggactgcaaatcattccaaggccaaactgcaactgagccacccactcccaaacaggaaaccctggtgaaggttcaggaagcacggagattctctccaacaaaggtccagttaggaaacgacgctgagaggatgacgacaacgtgcaacagcagaaagatgcttgcaagcagagtcagggtcaccagtgaatgccacaaaagttctctttcccactgtttaatttgacaagagaagaatttgaaggatatgaacattttcaagaactctgctgaggtcacttagagcgccatcacaacttatttgtgtgactaattgcctagattgtaagctctttgagggcagggcttgtctcttacacatctttataatcccctgcagcggctttcagtattttgtacttgtaggcacctaataaatttattatttgctatactgaa

SEQ ID NO: 295600 - DNA, 2673 bp, Homo sapiens
atagattttatgcatttgaactagcaaacagatgtttctcattttatttccatgctttctaacttaaataattcatcagcttttctttcttttctctgataggggccacatgccagaatggtacacaaaatcttttggacatttgtgtgcagctgaagttgtaaagatccgggattccttcagtaaccagaacactgaaaccaaagacaccaaatctaggtgatcactgaagcaacgcaaccgcttccaccaccatggtgtttgtttctagaacttttgccagtccttgaagaatgggttctgtgtctaatcctgaaacaaagaaaactacaagctggagtgtaggaattgactatagcaatttgatacatttttaaagctgcttcctgtttgttgagggtctgtattcatagaccttgactggaatatgtaagactgtgcaaaaaaaaaaaaaaaatttatgtgtattcttattcagattgcttctgagaagcaaaactctttaaatacattatggaagataatgaagatacttcattctcttgtgatatcagtgtatgcgtacctgtgtcgctttatttgcagtgtgttgagggactggtgtatccactggaatagttggtactcttggatgtgttttctcaccaagatgagcaaagaaaggtttgcacagaggagtgtgaatgtgtgtttgttgctggctgaatggcaatagatgtctaaggtggattcagtgtctggcacactgagacacctccaagaaggagattgatgcatcaggttcagtttaacctggaatatctgactacccctgaatccacccagaaagggggcccaacacccttgtccatttatgggtattttttttcgaagttattaagcatattccttttccacgaacctcttctgtactttgattgtaataggttggctcttacacccattccaaatgcagtttatttttagacccgattgcaaatagtgatgtagttttaaccagtatggattagttcagggatgaactgctccctccagccttactggctctgatccacagggttttgttttgttttgttttgttttttgtttaagtcgagatataaaaactgaacacgataacacttactcttaaatcaagcatcaacactttttccctgttagaattctttgcatttttgtgtttgtaacagaaacgccttaagacactatgtttgggaatataggaaactatgtgtgtcccaaggaaatccctgtaaatttaactcacctacaaaaggctttttccccgcctttggttgttaacggcattcctgaaagccacatgtgtttattcattgggcttgttcttatcagcaaataggttttctggttttatgactttttgtcttattttatttttcctacatttctttttttttttttttcctttagaatgccctggaaatatatttaagtggtaatgaaaaatagtaatcatagtaaaacgcaacaagaagaaaaccaacccaaaccagtgaagttttttagaacctttagaagggtggtctttattcaggttttactgtaatggtaaggattgactcaagagacagtattagtaaatttattgtgtatggatcaaaagtgaataatgtatgaatgagagctgtaagaaggatttttattttgttataatttagttaccattttcagtgttatttcaaaggttctttgaagaattttggggcagggcatcagattagagttttaaaatttgagtattttggatatcagtgttcctcatgaagatatacatggatattcaattttgatggcttccagatttgtaagattgtatgttgtatataccattctattaagaaacatgtccactgtgctttcaaacatagataaagcatgataaagattattatttaagatatacttgtatttatacctcagatattcttttgggttttgtacctcaaggcttttttcttcttattgtaaatacactttacgtgaatacagtctaagtgaagaaaataaataaaaggaagaggtttataacttgctctatatctgtacagattataatcaataagtgcactattattaaatgtttaaagtaagggaaaagtctgggctgccttccttaatattgcatctcactcccacccttaaaaccacagattgcaaagcatagcattttagcatcaactacaatcaaaagagcgatttgctgaaggaaaaatcggactgcaaatcattccaaggccaaactgcaactgagccacccactcccaaacaggaaaccctggtgaaggttcaggaagcacggagattctctccaacaaaggtccagttaggaaacgacgctgagaggatgacgacaacgtgcaacagcagaaagatgcttgcaagcagagtcagggtcaccagtgaatgccacaaaagttctctttcccactgtttaatttgacaagagaagaatttgaaggatatgaacattttcaagaactctgctgaggtcacttagagcgccatcacaacttatttgtgtgactaattgcctagattgtaagctctttgagggcagggcttgtctcttacacatctttataatcccctgcagcggctttcagtattttgtacttgtaggcacctaataaatttattatttgctatactgaa

SEQ ID NO: 295601 - DNA, 1733 bp, Homo sapiens
ttgtcttaatgctctcccttcccttgcccccacccgccaacaggccccagtgtgtgatgttcccctccctgtgtccatgtgttctcattgttcaactcccacttatgagtgagaatatgcagtgtttggttttgttttgttttttgtttaagtcgagatataaaaactgaacacgataacacttactcttaaatcaagcatcaacactttttccctgttagaattctttgcatttttgtgtttgtaacagaaacgccttaagacactatgtttgggaatataggaaactatgtgtgtcccaaggaaatccctgtaaatttaactcacctacaaaaggctttttccccgcctttggttgttaacggcattcctgaaagccacatgtgtttattcattgggcttgttcttatcagcaaataggttttctggttttatgactttttgtcttattttatttttcctacatttctttttttttttttttcctttagaatgccctggaaatatatttaagtggtaatgaaaaatagtaatcatagtaaaacgcaacaagaagaaaaccaacccaaaccagtgaagttttttagaacctttagaagggtggtctttattcaggttttactgtaatggtaaggattgactcaagagacagtattagtaaatttattgtgtatggatcaaaagtgaataatgtatgaatgagagctgtaagaaggatttttattttgttataatttagttaccattttcagtgttatttcaaaggttctttgaagaattttggggcagggcatcagattagagttttaaaatttgagtattttggatatcagtgttcctcatgaagatatacatggatattcaattttgatggcttccagatttgtaagattgtatgttgtatataccattctattaagaaacatgtccactgtgctttcaaacatagataaagcatgataaagattattatttaagatatacttgtatttatacctcagatattcttttgggttttgtacctcaaggcttttttcttcttattgtaaatacactttacgtgaatacagtctaagtgaagaaaataaataaaaggaagaggtttataacttgctctatatctgtacagattataatcaataagtgcactattattaaatgtttaaagtaagggaaaagtctgggctgccttccttaatattgcatctcactcccacccttaaaaccacagattgcaaagcatagcattttagcatcaactacaatcaaaagagcgatttgctgaaggaaaaatcggactgcaaatcattccaaggccaaactgcaactgagccacccactcccaaacaggaaaccctggtgaaggttcaggaagcacggagattctctccaacaaaggtccagttaggaaacgacgctgagaggatgacgacaacgtgcaacagcagaaagatgcttgcaagcagagtcagggtcaccagtgaatgccacaaaagttctctttcccactgtttaatttgacaagagaagaatttgaaggatatgaacattttcaagaactctgctgaggtcacttagagcgccatcacaacttatttgtgtgactaattgcctagattgtaagctctttgagggcagggcttgtctcttacacatctttataatcccctgcagcggctttcagtattttgtacttgtaggcacctaataaatttattatttgctatactgaa

SEQ ID NO: 295602 - DNA, 494 bp, Homo sapiens
ggcattaatccagctcccattaggccccacctcccaacactgttgtattgggcattcactttccatcacatgctttttggggaacacatgtacaccatagcaagtagtttagaggatgccatttacctaggcctgggtcacacagcatggccactgagcctgacccgtcaccacactgcaaatagtgaagagtgaagcacgattttaaacttggcttctatgaaattccatcatttctgcctctggttttgtctctacagaacctggaggactaatttacccaaaggagcctgtgcccttttactaacctctgtggatcacgatcgcgcacctgtggtgggtgtgagggttaatgtgctcttgtccaggtatttgattgaaccctgtgggccaggaaaatccaaactcacctacatgtgcagagttgacttaaggtatgttctgattctgatttttttatatggtgagggtcatgaaggaaattctgacttttt

SEQ ID NO: 295603 - DNA, 2149 bp, Homo sapiens
atataaccgcgtggcccgcgcgcgcgcttccctcccggcgcagtcaccggcgcggtctatggctgcgacttctctaatgtctgctttggctgcccggctgctgcagcccgcgcacagctgctcccttcgccttcgccctttccacctcgcggcagttcgaaatgaagctgttgtcatttctggaaggaaactggcccagcagatcaagcaggaagtgcggcaggaggtagaagagtgggtggcctcaggcaacaaacggccacacctgagtgtgatcctggttggcgagaatcctgcaagtcactcctatgtcctcaacaaaaccagggcagctgcagttgtgggaatcaacagtgagacaattatgaaaccagcttcaatttcagaggaagaattgttgaatttaatcaataaactgaataatgatgataatgtagatggcctccttgttcagttgcctcttccagagcatattgatgagagaaggatctgcaatgctgtttctccagacaaggatgttgatggctttcatgtaattaatgtaggacgaatgtgtttggatcagtattccatgttaccggctactccatggggtgtgtgggaaataatcaagcgaactggcattccaaccctagggaagaatgtggttgtggctggaaggtcaaaaaacgttggaatgcccattgcaatgttactgcacacagatggggcgcatgaacgtcccggaggtgatgccactgttacaatatctcatcgatatactcccaaagagcagttgaagaaacatacaattcttgcagatattgtaatatctgctgcaggtattccaaatctgatcacagcagatatgatcaaggaaggagcagcagtcattgatgtgggaataaatagagttcacgatcctgtaactgccaaacccaagttggttggagatgtggattttgaaggagtcagacaaaaagctgggtatatcactccagttcctggaggtgttggccccatgacagtggcaatgctaatgaagaataccattattgctgcaaaaaaggtgctgaggcttgaagagcgagaagtgctgaagtctaaagagcttggggtagccactaattaactactgtgtcttctgtgtcacaaacagcactccaggccagctcaagaagcaaagcaggccaatagaaatgcaatatttttaatttattctactgaaatggtttaaaatgatgccttgtatttattgaaagcttaaatgggtgggtgtttctgcacatacctctgcagtacctcaccagggagcattccagtatcatgcagggtcctgtgatctagccaggagcagccattaacctagtgattaatatgggagacattaccatatggaggatggatgcttcactttgtcaagcacctcagttacacattcgccttttctaggattgcatttcccaagtgctattgcaataacagttgatactcattttaggtaccaaaccttttgagttcaactgatcaaaccaaaggaaaagtgttgctagagaaaattagggaaaaggtgaaaaagaaaaaatggtagtaattgagcagaaaaaaattaatttatatatgtattgattggcaaccagatttatctaagtagaactgaattggctaggaaaaaagaaaaactgcatgttaatcattttcctaagctgtccttttgaggcttagtcagtttattgggaaaatgtttaggattattccttgctattagtactcattttatgtatgttacccttcagtaagttctccccattttagttttctaggactgaaaggattcttttctacattatacatgtgtgttgtcatatttggcttttgctatatactttaacttcattgttaaatttttgtattgtatagtttctttggtgtatcttaaaacctatttttgaaaaacaaacttggcttgataatcatttgggcagcttgggtaagtacgcaacttacttttccaccaaagaactgtcagcagctgcctgcttttctgtgatgtatgtatcctgttgacttttccagaaattttttaagagtttgagttactattgaatttaatcagactttctgattaaagggttttctttcttttttaataaaacacatctgtctggta

SEQ ID NO: 295604 - DNA, 2625 bp, Homo sapiens
atataaccgcgtggcccgcgcgcgcgcttccctcccggcgcagtcaccggcgcggtctatggctgcgacttctctaatgtctgctttggctgcccggctgctgcagcccgcgcacagctgctcccttcgccttcgccctttccacctcgcggcagttcggggaatctctccctaggtcaggttggagtgcagtgctgcaatcacggcttactgcagccttgacctcctgggctcaagtgatcctcccacctcagcttaaatgaagctgttgtcatttctggaaggaaactggcccagcagatcaagcaggaagtgcggcaggaggtagaagagtgggtggcctcaggcaacaaacggccacacctgagtgtgatcctggttggcgagaatcctgcaagtcactcctatgtcctcaacaaaaccagggcagctgcagttgtgggaatcaacagtgagacaattatgaaaccagcttcaatttcagaggaagaattgttgaatttaatcaataaactgaataatgatgataatgtagatggcctccttgttcagttgcctcttccagagcatattgatgagagaaggatctgcaatgctgtttctccagacaaggatgttgatggctttcatgtaattaatgtaggacgaatgtgtttggatcagtattccatgttaccggctactccatggggtgtgtgggaaataatcaagcgaactggcattccaaccctagggaagaatgtggttgtggctggaaggtcaaaaaacgttggaatgcccattgcaatgttactgcacacagatggggcgcatgaacgtcccggaggtgatgccactgttacaatatctcatcgatatactcccaaagagcagttgaagaaacatacaattcttgcagatattgtaatatctgctgcaggtattccaaatctgatcacagcagatatgatcaaggaaggagcagcagtcattgatgtgggaataaatagagttcacgatcctgtaactgccaaacccaagttggttggagatgtggattttgaaggagtcagacaaaaagctgggtatatcactccagttcctggaggtgttggccccatgacagtggcaatgctaatgaagaataccattattgctgcaaaaaaggtgctgaggcttgaagagcgagaagtgctgaagtctaaagagcttggggtagccactaattaactactgtgtcttctgtgtcacaaacagcactccaggccagctcaagaagcaaagcaggccaatagaaatgcaatatttttaatttattctactgaaatggtttaaaatgatgccttgtatttattgaaagcttaaatgggtgggtgtttctgcacatacctctgcagtacctcaccagggagcattccagtatcatgcagggtcctgtgatctagccaggagcagccattaacctagtgattaatatgggagacattaccatatggaggatggatgcttcactttgtcaagcacctcagttacacattcgccttttctaggattgcatttcccaagtgctattgcaataacagttgatactcattttaggtaccaaaccttttgagttcaactgatcaaaccaaaggaaaagtgttgctagagaaaattagggaaaaggtgaaaaagaaaaaatggtagtaattgagcagaaaaaaattaatttatatatgtattgattggcaaccagatttatctaagtagaactgaattggctaggaaaaaagaaaaactgcatgttaatcattttcctaagctgtccttttgaggcttagtcagtttattgggaaaatgtttaggattattccttgctattagtactcattttatgtatgttacccttcagtaagttctccccattttagttttctaggactgaaaggattcttttctacattatacatgtgtgttgtcatatttggcttttgctatatactttaacttcattgttaaatttttgtattgtatagtttctttggtgtatcttaaaacctatttttgaaaaacaaacttggcttgataatcatttgggcagcttgggtaagtacgcaacttacttttccaccaaagaactgtcagcagctgcctgcttttctgtgatgtatgtatcctgttgacttttccagaaattttttaagagtttgagttactattgaatttaatcagactttctgattaaagggttttctttcttttttaataaaacacatctgtctggtactggtgtggtatgaatttctgaaattctgtcttcctatgactcctagttgtgacctaaccagtttttttctcatttaatcaatgtagctattcctatattcagtaacacttacttctatagccttaaatagataattttttttcttctattttttttttttttttgtagagatggggtcttgctatgttgcctgggctggtattgaactccgggcctcaagcaatcaatcctcttgcctcagcttcccagagggctgggatatacaggcctgggccacccacacccaaacagaggtttaaagagctttggagaaaccagcctcgtcctccagtctcttggttgtttgttttgagactgagtcttgctctgttgcccag

SEQ ID NO: 295605 - DNA, 686 bp, Homo sapiens
atataaccgcgtggcccgcgcgcgcgcttccctcccggcgcagtcaccggcgcggtctatggctgcgacttctctaatgtctgctttggctgcccggctgctgcagcccgcgcacagctgctcccttcgccttcgccctttccacctcgcggcagttcgaaatgaagctgttgtcatttctggaaggaaactggcccagcagatcaagcaggaagtgcggcaggaggtagaagagtgggtggcctcaggcaacaaacggccacacctgagtgtgatcctggttggcgagaatcctgcaagtcactcctatgtcctcaacaaaaccagggcagctgcagttgtgggaatcaacagtgagacaattatgaaaccagcttcaatttcagaggaagaattgttgaatttaatcaataaactgaataatgatgataatgtagatggcctccttgttcagttgcctcttccagagcatattgatgagagaaggatctgcaatgctgtttctccagacaaggatgttgatggctttcatgtaattaatgtaggacgaatgtgtttggatcagtattccatgttaccggctactccatggggtgtgtgggaaataatcaagcgaactgccagccgactggctttccaacctaaggaatggggtcttggctgggtcaccgtgggatgcccatgct

SEQ ID NO: 295606 - DNA, 2127 bp, Homo sapiens
gggatggtaatcggccgagggtcaccggcgcggtctatggctgcgacttctctaatgtctgctttggctgcccggctgctgcagcccgcgcacagctgctcccttcgccttcgccctttccacctcgcggcagttcgaaatgaagctgttgtcatttctggaaggaaactggcccagcagatcaagcaggaagtgcggcaggaggtagaagagtgggtggcctcaggcaacaaacggccacacctgagtgtgatcctggttggcgagaatcctgcaagtcactcctatgtcctcaacaaaaccagggcagctgcagttgtgggaatcaacagtgagacaattatgaaaccagcttcaatttcagaggaagaattgttgaatttaatcaataaactgaataatgatgataatgtagatggcctccttgttcagttgcctcttccagagcatattgatgagagaaggatctgcaatgctgtttctccagacaaggatgttgatggctttcatgtaattaatgtaggacgaatgtgtttggatcagtattccatgttaccggctactccatggggtgtgtgggaaataatcaagcgaactggcattccaaccctagggaagaatgtggttgtggctggaaggtcaaaaaacgttggaatgcccattgcaatgttactgcacacagatggggcgcatgaacgtcccggaggtgatgccactgttacaatatctcatcgatatactcccaaagagcagttgaagaaacatacaattcttgcagatattgtaatatctgctgcaggtattccaaatctgatcacagcagatatgatcaaggaaggagcagcagtcattgatgtgggaataaatagagttcacgatcctgtaactgccaaacccaagttggttggagatgtggattttgaaggagtcagacaaaaagctgggtatatcactccagttcctggaggtgttggccccatgacagtggcaatgctaatgaagaataccattattgctgcaaaaaaggtgctgaggcttgaagagcgagaagtgctgaagtctaaagagcttggggtagccactaattaactactgtgtcttctgtgtcacaaacagcactccaggccagctcaagaagcaaagcaggccaatagaaatgcaatatttttaatttattctactgaaatggtttaaaatgatgccttgtatttattgaaagcttaaatgggtgggtgtttctgcacatacctctgcagtacctcaccagggagcattccagtatcatgcagggtcctgtgatctagccaggagcagccattaacctagtgattaatatgggagacattaccatatggaggatggatgcttcactttgtcaagcacctcagttacacattcgccttttctaggattgcatttcccaagtgctattgcaataacagttgatactcattttaggtaccaaaccttttgagttcaactgatcaaaccaaaggaaaagtgttgctagagaaaattagggaaaaggtgaaaaagaaaaaatggtagtaattgagcagaaaaaaattaatttatatatgtattgattggcaaccagatttatctaagtagaactgaattggctaggaaaaaagaaaaactgcatgttaatcattttcctaagctgtccttttgaggcttagtcagtttattgggaaaatgtttaggattattccttgctattagtactcattttatgtatgttacccttcagtaagttctccccattttagttttctaggactgaaaggattcttttctacattatacatgtgtgttgtcatatttggcttttgctatatactttaacttcattgttaaatttttgtattgtatagtttctttggtgtatcttaaaacctatttttgaaaaacaaacttggcttgataatcatttgggcagcttgggtaagtacgcaacttacttttccaccaaagaactgtcagcagctgcctgcttttctgtgatgtatgtatcctgttgacttttccagaaattttttaagagtttgagttactattgaatttaatcagactttctgattaaagggttttctttcttttttaataaaacacatctgtctggta

SEQ ID NO: 295607 - DNA, 2527 bp, Homo sapiens
atataaccgcgtggcccgcgcgcgcgcttccctcccggcgcagtcaccggcgcggtctatggctgcgacttctctaatgtctgctttggctgcccggctgctgcagcccgcgcacagctgctcccttcgccttcgccctttccacctcgcggcagttcgaaatgaagctgttgtcatttctggaaggaaactggcccagcagatcaagcaggaagtgcggcaggaggtagaagagtgggtggcctcaggcaacaaacggccacacctgagtgtgatcctggttggcgagaatcctgcaagtcactcctatgtcctcaacaaaaccagggcagctgcagttgtgggaatcaacagtgagacaattatgaaaccagcttcaatttcagaggaagaattgttgaatttaatcaataaactgaataatgatgataatgtagatggcctccttgttcagttgcctcttccagagcatattgatgagagaaggatctgcaatgctgtttctccagacaaggatgttgatggctttcatgtaattaatgtaggacgaatgtgtttggatcagtattccatgttaccggctactccatggggtgtgtgggaaataatcaagcgaactggcattccaaccctagggaagaatgtggttgtggctggaaggtcaaaaaacgttggaatgcccattgcaatgttactgcacacagatggggcgcatgaacgtcccggaggtgatgccactgttacaatatctcatcgatatactcccaaagagcagttgaagaaacatacaattcttgcagatattgtaatatctgctgcaggtattccaaatctgatcacagcagatatgatcaaggaaggagcagcagtcattgatgtgggaataaatagagttcacgatcctgtaactgccaaacccaagttggttggagatgtggattttgaaggagtcagacaaaaagctgggtatatcactccagttcctggaggtgttggccccatgacagtggcaatgctaatgaagaataccattattgctgcaaaaaaggtgctgaggcttgaagagcgagaagtgctgaagtctaaagagcttggggtagccactaattaactactgtgtcttctgtgtcacaaacagcactccaggccagctcaagaagcaaagcaggccaatagaaatgcaatatttttaatttattctactgaaatggtttaaaatgatgccttgtatttattgaaagcttaaatgggtgggtgtttctgcacatacctctgcagtacctcaccagggagcattccagtatcatgcagggtcctgtgatctagccaggagcagccattaacctagtgattaatatgggagacattaccatatggaggatggatgcttcactttgtcaagcacctcagttacacattcgccttttctaggattgcatttcccaagtgctattgcaataacagttgatactcattttaggtaccaaaccttttgagttcaactgatcaaaccaaaggaaaagtgttgctagagaaaattagggaaaaggtgaaaaagaaaaaatggtagtaattgagcagaaaaaaattaatttatatatgtattgattggcaaccagatttatctaagtagaactgaattggctaggaaaaaagaaaaactgcatgttaatcattttcctaagctgtccttttgaggcttagtcagtttattgggaaaatgtttaggattattccttgctattagtactcattttatgtatgttacccttcagtaagttctccccattttagttttctaggactgaaaggattcttttctacattatacatgtgtgttgtcatatttggcttttgctatatactttaacttcattgttaaatttttgtattgtatagtttctttggtgtatcttaaaacctatttttgaaaaacaaacttggcttgataatcatttgggcagcttgggtaagtacgcaacttacttttccaccaaagaactgtcagcagctgcctgcttttctgtgatgtatgtatcctgttgacttttccagaaattttttaagagtttgagttactattgaatttaatcagactttctgattaaagggttttctttcttttttaataaaacacatctgtctggtactggtgtggtatgaatttctgaaattctgtcttcctatgactcctagttgtgacctaaccagtttttttctcatttaatcaatgtagctattcctatattcagtaacacttacttctatagccttaaatagataattttttttcttctattttttttttttttttgtagagatggggtcttgctatgttgcctgggctggtattgaactccgggcctcaagcaatcaatcctcttgcctcagcttcccagagggctgggatatacaggcctgggccacccacacccaaacagaggtttaaagagctttggagaaaccagcctcgtcctccagtctcttggttgtttgttttgagactgagtcttgctctgttgcccag

SEQ ID NO: 295608 - DNA, 2410 bp, Homo sapiens
  misc_feature (2220)..(2220): n is a, c, g, or t
  misc_feature (2281)..(2282): n is a, c, g, or t
atataaccgcgtggcccgcgcgcgcgcttccctcccggcgcagtcaccggcgcggtctatggctgcgacttctctaatgtctgctttggctgcccggctgctgcagcccgcgcacagctgctcccttcgccttcgccctttccacctcgcggcagttcgaaatgaagctgttgtcatttctggaaggaaactggcccagcagatcaagcaggaagtgcggcaggaggtagaagagtgggtggcctcaggcaacaaacggccacacctgagtgtgatcctggttggcgagaatcctgcaagtcactcctatgtcctcaacaaaaccagggcagctgcagttgtgggaatcaacagtgagacaattatgaaaccagcttcaatttcagaggaagaattgttgaatttaatcaataaactgaataatgatgataatgtagatggcctccttgttcagttgcctcttccagagcatattgatgagagaaggatctgcaatgctgtttctccagacaaggatgttgatggctttcatgtaattaatgtaggacgaatgtgtttggatcagtattccatgttaccggctactccatggggtgtgtgggaaataatcaagcgaactggcattccaaccctagggaagaatgtggttgtggctggaaggtcaaaaaacgttggaatgcccattgcaatgttactgcacacagatggggcgcatgaacgtcccggaggtgatgccactgttacaatatctcatcgatatactcccaaagagcagttgaagaaacatacaattcttgcagatattgtaatatctgctgcaggtattccaaatctgatcacagcagatatgatcaaggaaggagcagcagtcattgatgtgggaataaatagagttcacgatcctgtaactgccaaacccaagttggttggagatgtggattttgaaggagtcagacaaaaagctgggtatatcactccagttcctggaggtgttggccccatgacagtggcaatgctaatgaagaataccattattgctgcaaaaaaggtgctgaggcttgaagagcgagaagtgctgaagtctaaagagcttggggtagccactaattaactactgtgtcttctgtgtcacaaacagcactccaggccagctcaagaagcaaagcaggccaatagaaatgcaatatttttaatttattctactgaaatggtttaaaatgatgccttgtatttattgaaagcttaaatgggtgggtgtttctgcacatacctctgcagtacctcaccagggagcattccagtatcatgcagggtcctgtgatctagccaggagcagccattaacctagtgattaatatgggagacattaccatatggaggatggatgcttcactttgtcaagcacctcagttacacattcgccttttctaggattgcatttcccaagtgctattgcaataacagttgatactcattttaggtaccaaaccttttgagttcaactgatcaaaccaaaggaaaagtgttgctagagaaaattagggaaaaggtgaaaaagaaaaaatggtagtaattgagcagaaaaaaattaatttatatatgtattgattggcaaccagatttatctaagtagaactgaattggctaggaaaaaagaaaaactgcatgttaatcattttcctaagctgtccttttgaggcttagtcagtttattgggaaaatgtttaggattattccttgctattagtactcattttatgtatgttacccttcagtaagttctccccattttagttttctaggactgaaaggattcttttctacattatacatgtgtgttgtcatatttggcttttgctatatactttaacttcattgttaaatttttgtattgtatagtttctttggtgtatcttaaaacctatttttgaaaaacaaacttggcttgataatcatttgggcagcttgggtaagtacgcaacttacttttccaccaaagaactgtcagcagctgcctgcttttctgtgatgtatgtatcctgttgacttttccagaaattttttaagagtttgagttactattgaatttaatcagactttctgattaaagggttttctttcttttttaataaaacacatctgtctggtaaaaaaaaaaaaaaaaaaaaaaaaaaaaaaaaaaaaaaaaaaaaaaaaaaaaaaaaaaaaaaaaaaaaaaanaaaaataaaaaaaaacaaaaaaaaaacaaacaaaaaaaaaaaaaaaaaaaaaaactttttnncccttttccccacattttttaaattctgcaaatttttttcgcgccccaatttgggccttttggcaaatcccctataggggggggttaattccgtggcccgtttaaccggtgggttgggcccttggttc

SEQ ID NO: 295609 - DNA, 2325 bp, Homo sapiens
  misc_feature (2196)..(2197): n is a, c, g, or t
atataaccgcgtggcccgcgcgcgcgcttccctcccggcgcagtcaccggcgcggtctatggctgcgacttctctaatgtctgctttggctgcccggctgctgcagcccgcgcacagctgctcccttcgccttcgccctttccacctcgcggcagttcgaaatgaagctgttgtcatttctggaaggaaactggcccagcagatcaagcaggaagtgcggcaggaggtagaagagtgggtggcctcaggcaacaaacggccacacctgagtgtgatcctggttggcgagaatcctgcaagtcactcctatgtcctcaacaaaaccagggcagctgcagttgtgggaatcaacagtgagacaattatgaaaccagcttcaatttcagaggaagaattgttgaatttaatcaataaactgaataatgatgataatgtagatggcctccttgttcagttgcctcttccagagcatattgatgagagaaggatctgcaatgctgtttctccagacaaggatgttgatggctttcatgtaattaatgtaggacgaatgtgtttggatcagtattccatgttaccggctactccatggggtgtgtgggaaataatcaagcgaactggcattccaaccctagggaagaatgtggttgtggctggaaggtcaaaaaacgttggaatgcccattgcaatgttactgcacacagatggggcgcatgaacgtcccggaggtgatgccactgttacaatatctcatcgatatactcccaaagagcagttgaagaaacatacaattcttgcagatattgtaatatctgctgcaggtattccaaatctgatcacagcagatatgatcaaggaaggagcagcagtcattgatgtgggaataaatagagttcacgatcctgtaactgccaaacccaagttggttggagatgtggattttgaaggagtcagacaaaaagctgggtatatcactccagttcctggaggtgttggccccatgacagtggcaatgctaatgaagaataccattattgctgcaaaaaaggtgctgaggcttgaagagcgagaagtgctgaagtctaaagagcttggggtagccactaattaactactgtgtcttctgtgtcacaaacagcactccaggccagctcaagaagcaaagcaggccaatagaaatgcaatatttttaatttattctactgaaatggtttaaaatgatgccttgtatttattgaaagcttaaatgggtgggtgtttctgcacatacctctgcagtacctcaccagggagcattccagtatcatgcagggtcctgtgatctagccaggagcagccattaacctagtgattaatatgggagacattaccatatggaggatggatgcttcactttgtcaagcacctcagttacacattcgccttttctaggattgcatttcccaagtgctattgcaataacagttgatactcattttaggtaccaaaccttttgagttcaactgatcaaaccaaaggaaaagtgttgctagagaaaattagggaaaaggtgaaaaagaaaaaatggtagtaattgagcagaaaaaaattaatttatatatgtattgattggcaaccagatttatctaagtagaactgaattggctaggaaaaaagaaaaactgcatgttaatcattttcctaagctgtccttttgaggcttagtcagtttattgggaaaatgtttaggattattccttgctattagtactcattttatgtatgttacccttcagtaagttctccccattttagttttctaggactgaaaggattcttttctacattatacatgtgtgttgtcatatttggcttttgctatatactttaacttcattgttaaatttttgtattgtatagtttctttggtgtatcttaaaacctatttttgaaaaacaaacttggcttgataatcatttgggcagcttgggtaagtacgcaacttacttttccaccaaagaactgtcagcagctgcctgcttttctgtgatgtatgtatcctgttgacttttccagaaattttttaagagtttgagttactattgaatttaatcagactttctgattaaagggttttctttcttttttaataaaacacatctgtctggtaacaaaaaaaaaacaaacaaaaaaaaaaaaaaaaaaaaaaactttttnncccttttccccacattttttaaattctgcaaatttttttcgcgccccaatttgggccttttggcaaatcccctataggggggggttaattccgtggcccgtttaaccggtgggttgggcccttggttc

SEQ ID NO: 295610 - DNA, 2247 bp, Homo sapiens
atataaccgcgtggcccgcgcgcgcgcttccctcccggcgcagtcaccggcgcggtctatggctgcgacttctctaatgtctgctttggctgcccggctgctgcagcccgcgcacagctgctcccttcgccttcgccctttccacctcgcggcagttcggggaatctctccctaggtcaggttggagtgcagtgctgcaatcacggcttactgcagccttgacctcctgggctcaagtgatcctcccacctcagcttaaatgaagctgttgtcatttctggaaggaaactggcccagcagatcaagcaggaagtgcggcaggaggtagaagagtgggtggcctcaggcaacaaacggccacacctgagtgtgatcctggttggcgagaatcctgcaagtcactcctatgtcctcaacaaaaccagggcagctgcagttgtgggaatcaacagtgagacaattatgaaaccagcttcaatttcagaggaagaattgttgaatttaatcaataaactgaataatgatgataatgtagatggcctccttgttcagttgcctcttccagagcatattgatgagagaaggatctgcaatgctgtttctccagacaaggatgttgatggctttcatgtaattaatgtaggacgaatgtgtttggatcagtattccatgttaccggctactccatggggtgtgtgggaaataatcaagcgaactggcattccaaccctagggaagaatgtggttgtggctggaaggtcaaaaaacgttggaatgcccattgcaatgttactgcacacagatggggcgcatgaacgtcccggaggtgatgccactgttacaatatctcatcgatatactcccaaagagcagttgaagaaacatacaattcttgcagatattgtaatatctgctgcaggtattccaaatctgatcacagcagatatgatcaaggaaggagcagcagtcattgatgtgggaataaatagagttcacgatcctgtaactgccaaacccaagttggttggagatgtggattttgaaggagtcagacaaaaagctgggtatatcactccagttcctggaggtgttggccccatgacagtggcaatgctaatgaagaataccattattgctgcaaaaaaggtgctgaggcttgaagagcgagaagtgctgaagtctaaagagcttggggtagccactaattaactactgtgtcttctgtgtcacaaacagcactccaggccagctcaagaagcaaagcaggccaatagaaatgcaatatttttaatttattctactgaaatggtttaaaatgatgccttgtatttattgaaagcttaaatgggtgggtgtttctgcacatacctctgcagtacctcaccagggagcattccagtatcatgcagggtcctgtgatctagccaggagcagccattaacctagtgattaatatgggagacattaccatatggaggatggatgcttcactttgtcaagcacctcagttacacattcgccttttctaggattgcatttcccaagtgctattgcaataacagttgatactcattttaggtaccaaaccttttgagttcaactgatcaaaccaaaggaaaagtgttgctagagaaaattagggaaaaggtgaaaaagaaaaaatggtagtaattgagcagaaaaaaattaatttatatatgtattgattggcaaccagatttatctaagtagaactgaattggctaggaaaaaagaaaaactgcatgttaatcattttcctaagctgtccttttgaggcttagtcagtttattgggaaaatgtttaggattattccttgctattagtactcattttatgtatgttacccttcagtaagttctccccattttagttttctaggactgaaaggattcttttctacattatacatgtgtgttgtcatatttggcttttgctatatactttaacttcattgttaaatttttgtattgtatagtttctttggtgtatcttaaaacctatttttgaaaaacaaacttggcttgataatcatttgggcagcttgggtaagtacgcaacttacttttccaccaaagaactgtcagcagctgcctgcttttctgtgatgtatgtatcctgttgacttttccagaaattttttaagagtttgagttactattgaatttaatcagactttctgattaaagggttttctttcttttttaataaaacacatctgtctggta

SEQ ID NO: 295611 - DNA, 1964 bp, Homo sapiens
atataaccgcgtggcccgcgcgcgcgcttccctcccggcgcagtcaccggcgcggtctatggctgcgacttctctaatgtctgctttggctgcccggctgctgcagcccgcgcacagctgctcccttcgccttcgccctttccacctcgcggcagttcggaatcaacagtgagacaattatgaaaccagcttcaatttcagaggaagaattgttgaatttaatcaataaactgaataatgatgataatgtagatggcctccttgttcagttgcctcttccagagcatattgatgagagaaggatctgcaatgctgtttctccagacaaggatgttgatggctttcatgtaattaatgtaggacgaatgtgtttggatcagtattccatgttaccggctactccatggggtgtgtgggaaataatcaagcgaactggcattccaaccctagggaagaatgtggttgtggctggaaggtcaaaaaacgttggaatgcccattgcaatgttactgcacacagatggggcgcatgaacgtcccggaggtgatgccactgttacaatatctcatcgatatactcccaaagagcagttgaagaaacatacaattcttgcagatattgtaatatctgctgcaggtattccaaatctgatcacagcagatatgatcaaggaaggagcagcagtcattgatgtgggaataaatagagttcacgatcctgtaactgccaaacccaagttggttggagatgtggattttgaaggagtcagacaaaaagctgggtatatcactccagttcctggaggtgttggccccatgacagtggcaatgctaatgaagaataccattattgctgcaaaaaaggtgctgaggcttgaagagcgagaagtgctgaagtctaaagagcttggggtagccactaattaactactgtgtcttctgtgtcacaaacagcactccaggccagctcaagaagcaaagcaggccaatagaaatgcaatatttttaatttattctactgaaatggtttaaaatgatgccttgtatttattgaaagcttaaatgggtgggtgtttctgcacatacctctgcagtacctcaccagggagcattccagtatcatgcagggtcctgtgatctagccaggagcagccattaacctagtgattaatatgggagacattaccatatggaggatggatgcttcactttgtcaagcacctcagttacacattcgccttttctaggattgcatttcccaagtgctattgcaataacagttgatactcattttaggtaccaaaccttttgagttcaactgatcaaaccaaaggaaaagtgttgctagagaaaattagggaaaaggtgaaaaagaaaaaatggtagtaattgagcagaaaaaaattaatttatatatgtattgattggcaaccagatttatctaagtagaactgaattggctaggaaaaaagaaaaactgcatgttaatcattttcctaagctgtccttttgaggcttagtcagtttattgggaaaatgtttaggattattccttgctattagtactcattttatgtatgttacccttcagtaagttctccccattttagttttctaggactgaaaggattcttttctacattatacatgtgtgttgtcatatttggcttttgctatatactttaacttcattgttaaatttttgtattgtatagtttctttggtgtatcttaaaacctatttttgaaaaacaaacttggcttgataatcatttgggcagcttgggtaagtacgcaacttacttttccaccaaagaactgtcagcagctgcctgcttttctgtgatgtatgtatcctgttgacttttccagaaattttttaagagtttgagttactattgaatttaatcagactttctgattaaagggttttctttcttttttaataaaacacatctgtctggta

SEQ ID NO: 295612 - DNA, 2091 bp, Homo sapiens
atataaccgcgtggcccgcgcgcgcgcttccctcccggcgcagtcaccggcgcggtctatggctgcgacttctctaatgtctgctttggctgcccggctgctgcagcccgcgcacagctgctcccttcgccttcgccctttccacctcgcggcagttcgaaatgaagctgttgtcatttctggaaggaaactggcccagcagatcaagcaggaagtgcggcaggaggtagaagagtgggtggcctcaggcaacaaacggccacacctgagtgtgatcctggttggcgagaatcctgcaagtcactcctatgtcctcaacaaaaccagggcagctgcagttgtgggaatcaacagtgagacaattatgaaaccagcttcaatttcagaggaagaattgttgaatttaatcaataaactgaataatgatgataatgtagatggcctccttgttcagttgcctcttccagagcatattgatgagagaaggatctgcaatgctgtttctccagacaaggatgttgatggctttcatgtaattaatgtaggacgaatgtgtttggatcagtattccatgttaccggctactccatggggtgtgtgggaaataatcaagcgaactggcattccaaccctagggaagaatgtggttgtggctggaaggtcaaaaaacgtgatgccactgttacaatatctcatcgatatactcccaaagagcagttgaagaaacatacaattcttgcagatattgtaatatctgctgcaggtattccaaatctgatcacagcagatatgatcaaggaaggagcagcagtcattgatgtgggaataaatagagttcacgatcctgtaactgccaaacccaagttggttggagatgtggattttgaaggagtcagacaaaaagctgggtatatcactccagttcctggaggtgttggccccatgacagtggcaatgctaatgaagaataccattattgctgcaaaaaaggtgctgaggcttgaagagcgagaagtgctgaagtctaaagagcttggggtagccactaattaactactgtgtcttctgtgtcacaaacagcactccaggccagctcaagaagcaaagcaggccaatagaaatgcaatatttttaatttattctactgaaatggtttaaaatgatgccttgtatttattgaaagcttaaatgggtgggtgtttctgcacatacctctgcagtacctcaccagggagcattccagtatcatgcagggtcctgtgatctagccaggagcagccattaacctagtgattaatatgggagacattaccatatggaggatggatgcttcactttgtcaagcacctcagttacacattcgccttttctaggattgcatttcccaagtgctattgcaataacagttgatactcattttaggtaccaaaccttttgagttcaactgatcaaaccaaaggaaaagtgttgctagagaaaattagggaaaaggtgaaaaagaaaaaatggtagtaattgagcagaaaaaaattaatttatatatgtattgattggcaaccagatttatctaagtagaactgaattggctaggaaaaaagaaaaactgcatgttaatcattttcctaagctgtccttttgaggcttagtcagtttattgggaaaatgtttaggattattccttgctattagtactcattttatgtatgttacccttcagtaagttctccccattttagttttctaggactgaaaggattcttttctacattatacatgtgtgttgtcatatttggcttttgctatatactttaacttcattgttaaatttttgtattgtatagtttctttggtgtatcttaaaacctatttttgaaaaacaaacttggcttgataatcatttgggcagcttgggtaagtacgcaacttacttttccaccaaagaactgtcagcagctgcctgcttttctgtgatgtatgtatcctgttgacttttccagaaattttttaagagtttgagttactattgaatttaatcagactttctgattaaagggttttctttcttttttaataaaacacatctgtctggta

SEQ ID NO: 295613 - DNA, 1634 bp, Homo sapiens
ggacgcgtgggtcgacccacgcgtcggtaggacgaatgtgtttggatcagtattccatgttaccggctactccatggggtgtgtgggaaataatcaagcgaactggcattccaaccctagggaagaatgtggttgtggctggaaggtcaaaaaacgttggaatgcccattgcaatgttactgcacacagatggggcgcatgaacgtcccggaggtgatgccactgttacaatatctcatcgatatactcccaaagagcagttgaagaaacatacaattcttgcagatattgtaatatctgctgcaggtattccaaatctgatcacagcagatatgatcaaggaaggagcagcagtcattgatgtgggaataaatagagttcacgatcctgtaactgccaaacccaagttggttggagatgtggattttgaaggagtcagacaaaaagctgggtatatcactccagttcctggaggtgttggccccatgacagtggcaatgctaatgaagaataccattattgctgcaaaaaaggtgctgaggcttgaagagcgagaagtgctgaagtctaaagagcttggggtagccactaattaactactgtgtcttctgtgtcacaaacagcactccaggccagctcaagaagcaaagcaggccaatagaaatgcaatatttttaatttattctactgaaatggtttaaaatgatgccttgtatttattgaaagcttaaatgggtgggtgtttctgcacatacctctgcagtacctcaccagggagcattccagtatcatgcagggtcctgtgatctagccaggagcagccattaacctagtgattaatatgggagacattaccatatggaggatggatgcttcactttgtcaagcacctcagttacacattcgccttttctaggattgcatttcccaagtgctattgcaataacagttgatactcattttaggtaccaaaccttttgagttcaactgatcaaaccaaaggaaaagtgttgctagagaaaattagggaaaaggtgaaaaagaaaaaatggtagtaattgagcagaaaaaaattaatttatatatgtattgattggcaaccagatttatctaagtagaactgaattggctaggaaaaaagaaaaactgcatgttaatcattttcctaagctgtccttttgaggcttagtcagtttattgggaaaatgtttaggattattccttgctattagtactcattttatgtatgttacccttcagtaagttctccccattttagttttctaggactgaaaggattcttttctacattatacatgtgtgttgtcatatttggcttttgctatatactttaacttcattgttaaatttttgtattgtatagtttctttggtgtatcttaaaacctatttttgaaaaacaaacttggcttgataatcatttgggcagcttgggtaagtacgcaacttacttttccaccaaagaactgtcagcagctgcctgcttttctgtgatgtatgtatcctgttgacttttccagaaattttttaagagtttgagttactattgaatttaatcagactttctgattaaagggttttctttcttttttaataaaacacatctgtctggta

SEQ ID NO: 295614 - DNA, 1556 bp, Homo sapiens
aaaaaaaaaaaaaaaaaaaaaaaaaaagcattccaaccctagggaagaatgtggttgtggctggaaggtcaaaaaacgttggaatgcccattgcaatgttactgcacacagatggggcgcatgaacgtcccggaggtgatgccactgttacaatatctcatcgatatactcccaaagagcagttgaagaaacatacaattcttgcagatattgtaatatctgctgcaggtattccaaatctgatcacagcagatatgatcaaggaaggagcagcagtcattgatgtgggaataaatagagttcacgatcctgtaactgccaaacccaagttggttggagatgtggattttgaaggagtcagacaaaaagctgggtatatcactccagttcctggaggtgttggccccatgacagtggcaatgctaatgaagaataccattattgctgcaaaaaaggtgctgaggcttgaagagcgagaagtgctgaagtctaaagagcttggggtagccactaattaactactgtgtcttctgtgtcacaaacagcactccaggccagctcaagaagcaaagcaggccaatagaaatgcaatatttttaatttattctactgaaatggtttaaaatgatgccttgtatttattgaaagcttaaatgggtgggtgtttctgcacatacctctgcagtacctcaccagggagcattccagtatcatgcagggtcctgtgatctagccaggagcagccattaacctagtgattaatatgggagacattaccatatggaggatggatgcttcactttgtcaagcacctcagttacacattcgccttttctaggattgcatttcccaagtgctattgcaataacagttgatactcattttaggtaccaaaccttttgagttcaactgatcaaaccaaaggaaaagtgttgctagagaaaattagggaaaaggtgaaaaagaaaaaatggtagtaattgagcagaaaaaaattaatttatatatgtattgattggcaaccagatttatctaagtagaactgaattggctaggaaaaaagaaaaactgcatgttaatcattttcctaagctgtccttttgaggcttagtcagtttattgggaaaatgtttaggattattccttgctattagtactcattttatgtatgttacccttcagtaagttctccccattttagttttctaggactgaaaggattcttttctacattatacatgtgtgttgtcatatttggcttttgctatatactttaacttcattgttaaatttttgtattgtatagtttctttggtgtatcttaaaacctatttttgaaaaacaaacttggcttgataatcatttgggcagcttgggtaagtacgcaacttacttttccaccaaagaactgtcagcagctgcctgcttttctgtgatgtatgtatcctgttgacttttccagaaattttttaagagtttgagttactattgaatttaatcagactttctgattaaagggttttctttcttttttaataaaacacatctgtctggta

SEQ ID NO: 295615 - DNA, 1368 bp, Homo sapiens
gaaggagcagcagtcattgatgtgggaatatctgctgcaggtattccaaatctgatcacagcagatatgatcaaggaaggagcagcagtcattgatgtgggaataaatagagttcacgatcctgtaactgccaaacccaagttggttggagatgtggattttgaaggagtcagacaaaaagctgggtatatcactccagttcctggaggtgttggccccatgacagtggcaatgctaatgaagaataccattattgctgcaaaaaaggtgctgaggcttgaagagcgagaagtgctgaagtctaaagagcttggggtagccactaattaactactgtgtcttctgtgtcacaaacagcactccaggccagctcaagaagcaaagcaggccaatagaaatgcaatatttttaatttattctactgaaatggtttaaaatgatgccttgtatttattgaaagcttaaatgggtgggtgtttctgcacatacctctgcagtacctcaccagggagcattccagtatcatgcagggtcctgtgatctagccaggagcagccattaacctagtgattaatatgggagacattaccatatggaggatggatgcttcactttgtcaagcacctcagttacacattcgccttttctaggattgcatttcccaagtgctattgcaataacagttgatactcattttaggtaccaaaccttttgagttcaactgatcaaaccaaaggaaaagtgttgctagagaaaattagggaaaaggtgaaaaagaaaaaatggtagtaattgagcagaaaaaaattaatttatatatgtattgattggcaaccagatttatctaagtagaactgaattggctaggaaaaaagaaaaactgcatgttaatcattttcctaagctgtccttttgaggcttagtcagtttattgggaaaatgtttaggattattccttgctattagtactcattttatgtatgttacccttcagtaagttctccccattttagttttctaggactgaaaggattcttttctacattatacatgtgtgttgtcatatttggcttttgctatatactttaacttcattgttaaatttttgtattgtatagtttctttggtgtatcttaaaacctatttttgaaaaacaaacttggcttgataatcatttgggcagcttgggtaagtacgcaacttacttttccaccaaagaactgtcagcagctgcctgcttttctgtgatgtatgtatcctgttgacttttccagaaattttttaagagtttgagttactattgaatttaatcagactttctgattaaagggttttctttcttttttaataaaacacatctgtctggta

SEQ ID NO: 295616 - DNA, 1224 bp, Homo sapiens
atataaccgcgtggcccgcgcgcgcgcttccctcccggcgcagtcaccggcgcggtctatggctgcgacttctctaatgtctgctttggctgcccggctgctgcagcccgcgcacagctgctcccttcgccttcgccctttccacctcgcggcagttcgaaatgaagctgttgtcatttctggaaggaaactggcccagcagatcaagcaggaagtgcggcaggaggtagaagagtgggtggcctcaggcaacaaacggccacacctgagtgtgatcctggttggcgagaatcctgcaagtcactcctatgtcctcaacaaaaccagggcagctgcagttgtgggaatcaacagtgagacaattatgaaaccagcttcaatttcagaggaagaattgttgaatttaatcaataaactgaataatgatgataatgtagatggcctccttgttcagttgcctcttccagagcatattgatgagagaaggatctgcaatgctgtttctccagacaaggatgttgatggctttcatgtaattaatgtaggacgaatgtgtttggatcagtattccatgttaccggctactccatggggtgtgtgggaaataatcaagcgaactggcattccaaccctagggaagaatgtggttgtggctggaaggtcaaaaaacgttggaatgcccattgcaatgttactgcacacagatggggcgcatgaacgtcccggaggtgatgccactgttacaatatctcatcgatatactcccaaagagcagttgaagaaacatacaattcttgcagatattgtaatatctgctgcaggtattccaaatctgatcacagcagatatgatcaaggaaggagcagcagtcattgatgtgggaataaatagagttcacgatcctgtaactgccaaacccaagttggttggagatgtggattttgaaggagtcagacaaaaagctgggtatatcactccagttcctggaggtgttggccccatgacagtggcaatgctaatgaagaataccattattgctgcagcccgcgcacagctgctcccttcgccttcgccctttccacctcgcggcagttcgaaatgaagctgttgtcatttctggaaggaaactggcccagcagatcaagcaggaagtgcggcaggaggtagaagagtgggtgcctcaggcaacaaacggccacacctgagtgtgatccagctatcttc

SEQ ID NO: 295617 - DNA, 955 bp, Homo sapiens
gctgaggtcgttccagaggataccctgttagactataaagttgaaagcttaaatgggtgggtgtttctgcacatacctctgcagtacctcaccagggagcattccagtatcatgcagggtcctgtgatctagccaggagcagccattaacctagtgattaatatgggagacattaccatatggaggatggatgcttcactttgtcaagcacctcagttacacattcgccttttctaggattgcatttcccaagtgctattgcaataacagttgatactcattttaggtaccaaaccttttgagttcaactgatcaaaccaaaggaaaagtgttgctagagaaaattagggaaaaggtgaaaaagaaaaaatggtagtaattgagcagaaaaaaattaatttatatatgtattgattggcaaccagatttatctaagtagaactgaattggctaggaaaaaagaaaaactgcatgttaatcattttcctaagctgtccttttgaggcttagtcagtttattgggaaaatgtttaggattattccttgctattagtactcattttatgtatgttacccttcagtaagttctccccattttagttttctaggactgaaaggattcttttctacattatacatgtgtgttgtcatatttggcttttgctatatactttaacttcattgttaaatttttgtattgtatagtttctttggtgtatcttaaaacctatttttgaaaaacaaacttggcttgataatcatttgggcagcttgggtaagtacgcaacttacttttccaccaaagaactgtcagcagctgcctgcttttctgtgatgtatgtatcctgttgacttttccagaaattttttaagagtttgagttactattgaatttaatcagactttctgattaaagggttttctttcttttttaataaaacacatctgtctggta

SEQ ID NO: 295618 - DNA, 1109 bp, Homo sapiens
atataaccgcgtggcccgcgcgcgcgcttccctcccggcgcagtcaccggcgcggtctatggctgcgacttctctaatgtctgctttggctgcccggctgctgcagcccgcgcacagctgctcccttcgccttcgccctttccacctcgcggcagttcgaaatgaagctgttgtcatttctggaaggaaactggcccagcagatcaagcaggaagtgcggcaggaggtagaagagtgggtggcctcaggcaacaaacggccacacctgagtgtgatcctggttggcgagaatcctgcaagtcactcctatgtcctcaacaaaaccagggcagctgcagttgtgggaatcaacagtgagacaattatgaaaccagcttcaatttcagaggaagaattgttgaatttaatcaataaactgaataatgatgataatgtagatggcctccttgttcagttgcctcttccagagcatattgatgagagaaggatctgcaatgctgtttctccagacaaggatgttgatggctttcatgtaattaatgtaggacgaatgtgtttggatcagtattccatgttaccggctactccatggggtgtgtgggaaataatcaagcgaactggcattccaaccctagggaagaatgtggttgtggctggaaggtcaaaaaacgttggaatgcccattgcaatgttactgcacacagatggggcgcatgaacgtcccggaggtgatgccactgttacaatatctcatcgatatactcccaaagagcagttgaagaaacatacaattcttgcagatattgtaatatctgctgcaggtattccaaatctgatcacagcagatatgatcaaggaaggagcagcagtcattgatgtgggaataaatagagttcacgatcctgtaactgccaaacccaagttggttggagatgtggattttgaagatgggagtctcactctgttgcccaggctggagtgcagtggcgcgatctcggctcactgcaacctctgcctcctgggttcaagctattcttctgcctcagcctcccgagtagctgggactcccaaagtgttgggattataggtgtgagccactgcgcccagtc

SEQ ID NO: 295619 - DNA, 782 bp, Homo sapiens
cctagttttagaagtttcaatagcactttgtcaagcacctcagttacacattcgccttttctaggattgcatttcccaagtgctattgcaataacagttgatactcattttaggtaccaaaccttttgagttcaactgatcaaaccaaaggaaaagtgttgctagagaaaattagggaaaaggtgaaaaagaaaaaatggtagtaattgagcagaaaaaaattaatttatatatgtattgattggcaaccagatttatctaagtagaactgaattggctaggaaaaaagaaaaactgcatgttaatcattttcctaagctgtccttttgaggcttagtcagtttattgggaaaatgtttaggattattccttgctattagtactcattttatgtatgttacccttcagtaagttctccccattttagttttctaggactgaaaggattcttttctacattatacatgtgtgttgtcatatttggcttttgctatatactttaacttcattgttaaatttttgtattgtatagtttctttggtgtatcttaaaacctatttttgaaaaacaaacttggcttgataatcatttgggcagcttgggtaagtacgcaacttacttttccaccaaagaactgtcagcagctgcctgcttttctgtgatgtatgtatcctgttgacttttccagaaattttttaagagtttgagttactattgaatttaatcagactttctgattaaagggttttctttcttttttaataaaacacatctgtctggta

SEQ ID NO: 295620 - DNA, 656 bp, Homo sapiens
atataaccgcgtggcccgcgcgcgcgcttccctcccggcgcagtcaccggcgcggtctatggctgcgacttctctaatgtctgctttggctgcccggctgctgcagcccgcgcacagctgctcccttcgccttcgccctttccacctcgcggcagttcgaaatgaagctgttgtcatttctggaaggaaactggcccagcagatcaagcaggaagtgcggcaggaggtagaagagtgggtggcctcaggcaacaaacggccacacctgagtgtgatcctggttggcgagaatcctgcaagtcactcctatgtcctcaacaaaaccagggcagctgcagttgtgggaatcaacagtgagacaattatgaaaccagcttcaatttcagaggaagaattgttgaatttaatcaataaactgaataatgatgataatgtagatggcctccttgttcagttgcctcttccagagcatattgatgagagaaggatctgcaatgctgtttctccagacaaggatgttgatggctttcatgtaattaatgtaggacgaatgtgtttggatcagtattccatgttaccggctactccatggggtgtgtgggaaataatcaagcgaactgattccaccctagggagagtcagcgttgtgtaccgcc

SEQ ID NO: 295621 - DNA, 763 bp, Homo sapiens
atataaccgcgtggcccgcgcgcgcgcttccctcccggcgcagtcaccggcgcggtctatggctgcgacttctctaatgtctgctttggctgcccggctgctgcagcccgcgcacagctgctcccttcgccttcgccctttccacctcgcggcagttcgaaatgaagctgttgtcatttctggaaggaaactggcccagcagatcaagcaggaagtgcggcaggaggtagaagagtgggtggcctcaggcaacaaacggccacacctgagtgtgatcctggttggcgagaatcctgcaagtcactcctatgtcctcaacaaaaccagggcagctgcagttgtgggaaacccaagcagaggaggctaatgtgattgaactgtatcccaaaactttgtcataggaaatcagactatatctttcggggtttatacagtaggacaggagatactggaatcaacagtgagacaattatgaaaccagcttcaatttcagaggaagaattgttgaatttaatcaataaactgaataatgatgataatgtagatggcctccttgttcagttgcctcttccagagcatattgatgagagaaggatctgcaatgctgtttctccagacaaggatgttgatggctttcatgtaattaatgtaggacgaatgtgtttggatcagtattccatgttaccggctactccatggggtgtgtgggaaataatcaagcgaactgattccaccctagggagagtcagcgttgtgtaccgcc

SEQ ID NO: 295622 - DNA, 949 bp, Homo sapiens
acaaaaggaaatactgccttctgtaaaagaacataatttctggataagtaaaactatttctttaaaaagtatgttctcaaatgagaacatcaaaatactgggaatattctgaataatacaagtactctttaagtagatttgttaatttttttttcccccaggaaaaaaatgttcattttgtgctgtgtcttacctctactaggaagaggaaagtttgagattggaagattttggactaagttttaaatagtaccaccagggaaaaattaggcagttggttcatacgagcaacaaacttcagctaaaactcatggcctctggaacatgcttcttatctaatgcttctgataatttagatctgtgataagccatttaattcatgatttctcaaaaggacattttgcaaaaacgttattctcaatgataatttcttaaaaattttcagtgatttcagaggacgagtacgttgaaccaagagtacaccagcacagtctaagttgtagagatggattgtgagcatgtgactggttttcttgttcttccaaggtcgccagagaaccttccagttaaaacctaacttccacgtaacttgcctacagagagagggacaacagacttgagtgtctgatcacttgacagttacagttttcattgtaacatagtaatttgatgttgaggtttatacagttaaattacagaaatacttaagttatatcctttcctccagtattaactaaagatacatatatgtaaacagtcatagtataggagaagataagggaaagctgacaggactcatgcagtggctcacagctgtaagcttaactactcaggaggctgagacttggaggatcgcttatatccaggagttggaggctgccgttagctatggttgcatcactggactctagcctaaactatagagtgaggctctgtttcaagaaaaaaa

SEQ ID NO: 295623 - DNA, 1949 bp, Homo sapiens
gccctcccaggagaagctgaaggactttcctgtgtgcgtgagcaccaagccggagcccgaggacgatgcagaagagggacttgggggtcttcccagcaacatcagctctgtcagctccttgctgctcttcaacaccaccgagaacctgtacaagaagtatgtcttcctggaccccctggctggtgctgtaacaaagacccatgtgatgctgggggcagagacagaggagaagctgtttgatgcccccttgtccatcagcaagagagagcagctggaacagcaggtcccagagaactacttctatgtgccagacctgggccaggtgcctgagattgatgttccatcctacctgcctgacctgcccggcattgccaacgacctcatgtacattgccgacctgggccccggcattgccccctctgcccctggcaccattccagaactgcccaccttccacactgaggtagccgagcctctcaagacctacaagatggggtactaacaccacccccaccgcccccaccaccacccccagctcctgaggtgctggccagtgcacccccactcccaccctcaaccgcggcccctgtaggccaaggcgccaggcaggacgacagcagcagcagcgcatctccttcaggtgggagcagctctttgaggccacctgatttctggcgtgctcagtgcactcgggtggattttctgtgggtttgttaagtggtcagaaattctcaattttttgaatagtttccatttcaaatatcttgttctacttggttcataaaatagtggctttcaaactgtagagctctggacttctcacttctagggcagagggagcctgaacaagtgaggctctgggttcctcattcctaattaaaccaatggaaagaaggggtctaataacaaactacagcaacacatttttcatttcagcttcactgctgtatctcccagtgtaaccctagcatccagaagtggcacaaaacccctctgctggctcatgtgtgcaactgagactgtcagagcatggctagctcaggggtccagctctgcagggtgagggctagagaggaagcagggagtatctgcacacaggatgcccgcgctcaggtggttgccgaagtcagtgcccgggccccacacagtctccaaaggtccggcctccccagcgcggggctcctcgtttgaggggaggtgacttccctcccagcaggctcttggacacagtaagcttccccagccctgcctgagcagcctttcctccttgccctgttccccacctcccggctccagtccagggagctcccagggaagtggtcgacccctccggtggctgggccactctgctagagtccatccgccaagctgggggcatcggcaaggccaagctgcgcagcatgaaggagcgaaagctggagaagcagcagcagaaggagcaggagcaagtgagagccacgagccaaggtgggcacttgatgtcggatctcttcaacaagctggtcatgaggcgcaagggcatctctgggaaaggacctggggctggtgaggggcccggaggagcctttgcccgcgtgtcagactccatccctcctctgccgccaccgcagcagccacaggcagaggaggacgaggacgactgggaatcgtagggggctccatgacaccttcccccccagacccagacttgggccattgctctgacatggacacagccaggacaagctgctcagacctgcttccctgggtgggggtgacggaaccagcactgtgcggagaccagcttcaaggagcggaaggctggcctgaggccacacagctggggcggggacttctgtctgcctgtgctccatggggggacggctccacccagcctgcgccactgtgttcttctctaaagaggcttccagagaaaatggcacaccaatcaataaagaactgagcagaaa

SEQ ID NO: 295624 - DNA, 1835 bp, Homo sapiens
cccccgcaggtatccccgaggaaacagtatgccatgattcaaaatcgagctgggtaccgtgggtgatacagatggcacaaagacccatgtgatgctgggggcagagacagaggagaagctgtttgatgcccccttgtccatcagcaagagagagcagctggaacagcaggtcccagagaactacttctatgtgccagacctgggccaggtgcctgagattgatgttccatcctacctgcctgacctgcccggcattgccaacgacctcatgtacattgccgacctgggccccggcattgccccctctgcccctggcaccattccagaactgcccaccttccacactgaggtagccgagcctctcaagacctacaagatggggtactaacaccacccccaccgcccccaccaccacccccagctcctgaggtgctggccagtgcacccccactcccaccctcaaccgcggcccctgtaggccaaggcgccaggcaggacgacagcagcagcagcgcatctccttcaggtgggagcagctctttgaggccacctgatttctggcgtgctcagtgcactcgggtggattttctgtgggtttgttaagtggtcagaaattctcaattttttgaatagtttccatttcaaatatcttgttctacttggttcataaaatagtggctttcaaactgtagagctctggacttctcacttctagggcagagggagcctgaacaagtgaggctctgggttcctcattcctaattaaaccaatggaaagaaggggtctaataacaaactacagcaacacatttttcatttcagcttcactgctgtatctcccagtgtaaccctagcatccagaagtggcacaaaacccctctgctggctcatgtgtgcaactgagactgtcagagcatggctagctcaggggtccagctctgcagggtgagggctagagaggaagcagggagtatctgcacacaggatgcccgcgctcaggtggttgccgaagtcagtgcccgggccccacacagtctccaaaggtccggcctccccagcgcggggctcctcgtttgaggggaggtgacttccctcccagcaggctcttggacacagtaagcttccccagccctgcctgagcagcctttcctccttgccctgttccccacctcccggctccagtccagggagctcccagggaagtggtcgacccctccggtggctgggccactctgctagagtccatccgccaagctgggggcatcggcaaggccaagctgcgcagcatgaaggagcgaaagctggagaagcagcagcagaaggagcaggagcaagtgagagccacgagccaaggtgggcacttgatgtcggatctcttcaacaagctggtcatgaggcgcaagggcatctctgggaaaggacctggggctggtgaggggcccggaggagcctttgcccgcgtgtcagactccatccctcctctgccgccaccgcagcagccacaggcagaggaggacgaggacgactgggaatcgtagggggctccatgacaccttcccccccagacccagacttgggccattgctctgacatggacacagccaggacaagctgctcagacctgcttccctgggtgggggtgacggaaccagcactgtgcggagaccagcttcaaggagcggaaggctggcctgaggccacacagctggggcggggacttctgtctgcctgtgctccatggggggacggctccacccagcctgcgccactgtgttcttctctaaagaggcttccagagaaaatggcacaccaatcaataaagaactgagcagaaa

SEQ ID NO: 295625 - DNA, 1293 bp, Homo sapiens
gccctcccaggagaagctgaaggactttcctgtgtgcgtgagcaccaagccggagcccgaggacgatgcagaagagggacttgggggtcttcccagcaacatcagctctgtcagctccttgctgctcttcaacaccaccgagaacctgtacaagaagtatgtcttcctggaccccctggctggtgctgtaacaaagacccatgtgatgctgggggcagagacagaggagaagctgtttgatgcccccttgtccatcagcaagagagagcagctggaacagcaggtcccagagaactacttctatgtgccagacctgggccaggtgcctgagattgatgttccatcctacctgcctgacctgcccggcattgccaacgacctcatgtacattgccgacctgggccccggcattgccccctctgcccctggcaccattccagaactgcccaccttccacactgaggtagccgagcctctcaagacctacaagatggggtactaacaccacccccaccgcccccaccaccacccccagctcctgaggtgctggccagtgcacccccactcccaccctcaaccgcggcccctgtaggccaaggcgccaggcaggacgacagcagcagcagcgcatctccttcagtccagggagctcccagggaagtggtcgacccctccggtggctgggccactctgctagagtccatccgccaagctgggggcatcggcaaggccaagctgcgcagcatgaaggagcgaaagctggagaagcagcagcagaaggagcaggagcaagtgagagccacgagccaaggtgggcacttgatgtcggatctcttcaacaagctggtcatgaggcgcaagggcatctctgggaaaggacctggggctggtgaggggcccggaggagcctttgcccgcgtgtcagactccatccctcctctgccgccaccgcagcagccacaggcagaggaggacgaggacgactgggaatcgtagggggctccatgacaccttcccccccagacccagacttgggccattgctctgacatggacacagccaggacaagctgctcagacctgcttccctgggtgggggtgacggaaccagcactgtgcggagaccagcttcaaggagcggaaggctggcctgaggccacacagctggggcggggacttctgtctgcctgtgctccatggggggacggctccacccagcctgcgccactgtgttcttctctaaagaggcttccagagaaaatggcacaccaatcaataaagaactgagcagaaa

SEQ ID NO: 295626 - DNA, 1972 bp, Homo sapiens
gccctcccaggagaagctgaaggactttcctgtgtgcgtgagcaccaagccggagcccgaggacgatgcagaagagggacttgggggtcttcccagcaacatcagctctgtcagctccttgctgctcttcaacaccaccgagaacctgtacaagaagtatgtcttcctggaccccctggctggtgctgtaacaaagacccatgtgatgctgggggcagagacagaggagaagctgtttgatgcccccttgtccatcagcaagagagagcagctggaacagcaggtcccagagaactacttctatgtgccagacctgggccaggtgcctgagattgatgttccatcctacctgcctgacctgcccggcattgccaacgacctcatgtacattgccgacctgggccccggcattgccccctctgcccctggcaccattccagaactgcccaccttccacactgaggtagccgagcctctcaagacaccccacactttgtgtttcagacctacaagatggggtactaacaccacccccaccgcccccaccaccacccccagctcctgaggtgctggccagtgcacccccactcccaccctcaaccgcggcccctgtaggccaaggcgccaggcaggacgacagcagcagcagcgcatctccttcaggtgggagcagctctttgaggccacctgatttctggcgtgctcagtgcactcgggtggattttctgtgggtttgttaagtggtcagaaattctcaattttttgaatagtttccatttcaaatatcttgttctacttggttcataaaatagtggctttcaaactgtagagctctggacttctcacttctagggcagagggagcctgaacaagtgaggctctgggttcctcattcctaattaaaccaatggaaagaaggggtctaataacaaactacagcaacacatttttcatttcagcttcactgctgtatctcccagtgtaaccctagcatccagaagtggcacaaaacccctctgctggctcatgtgtgcaactgagactgtcagagcatggctagctcaggggtccagctctgcagggtgagggctagagaggaagcagggagtatctgcacacaggatgcccgcgctcaggtggttgccgaagtcagtgcccgggccccacacagtctccaaaggtccggcctccccagcgcggggctcctcgtttgaggggaggtgacttccctcccagcaggctcttggacacagtaagcttccccagccctgcctgagcagcctttcctccttgccctgttccccacctcccggctccagtccagggagctcccagggaagtggtcgacccctccggtggctgggccactctgctagagtccatccgccaagctgggggcatcggcaaggccaagctgcgcagcatgaaggagcgaaagctggagaagcagcagcagaaggagcaggagcaagtgagagccacgagccaaggtgggcacttgatgtcggatctcttcaacaagctggtcatgaggcgcaagggcatctctgggaaaggacctggggctggtgaggggcccggaggagcctttgcccgcgtgtcagactccatccctcctctgccgccaccgcagcagccacaggcagaggaggacgaggacgactgggaatcgtagggggctccatgacaccttcccccccagacccagacttgggccattgctctgacatggacacagccaggacaagctgctcagacctgcttccctgggtgggggtgacggaaccagcactgtgcggagaccagcttcaaggagcggaaggctggcctgaggccacacagctggggcggggacttctgtctgcctgtgctccatggggggacggctccacccagcctgcgccactgtgttcttctctaaagaggcttccagagaaaatggcacaccaatcaataaagaactgagcagaaa

SEQ ID NO: 295627 - DNA, 1813 bp, Homo sapiens
gccctcccaggagaagctgaaggactttcctgtgtgcgtgagcaccaagccggagcccgaggacgatgcagaagagggacttgggggtcttcccagcaacatcagctctgtcagctccttgctgctcttcaacaccaccgagaacctgtcccagagaactacttctatgtgccagacctgggccaggtgcctgagattgatgttccatcctacctgcctgacctgcccggcattgccaacgacctcatgtacattgccgacctgggccccggcattgccccctctgcccctggcaccattccagaactgcccaccttccacactgaggtagccgagcctctcaagacctacaagatggggtactaacaccacccccaccgcccccaccaccacccccagctcctgaggtgctggccagtgcacccccactcccaccctcaaccgcggcccctgtaggccaaggcgccaggcaggacgacagcagcagcagcgcatctccttcaggtgggagcagctctttgaggccacctgatttctggcgtgctcagtgcactcgggtggattttctgtgggtttgttaagtggtcagaaattctcaattttttgaatagtttccatttcaaatatcttgttctacttggttcataaaatagtggctttcaaactgtagagctctggacttctcacttctagggcagagggagcctgaacaagtgaggctctgggttcctcattcctaattaaaccaatggaaagaaggggtctaataacaaactacagcaacacatttttcatttcagcttcactgctgtatctcccagtgtaaccctagcatccagaagtggcacaaaacccctctgctggctcatgtgtgcaactgagactgtcagagcatggctagctcaggggtccagctctgcagggtgagggctagagaggaagcagggagtatctgcacacaggatgcccgcgctcaggtggttgccgaagtcagtgcccgggccccacacagtctccaaaggtccggcctccccagcgcggggctcctcgtttgaggggaggtgacttccctcccagcaggctcttggacacagtaagcttccccagccctgcctgagcagcctttcctccttgccctgttccccacctcccggctccagtccagggagctcccagggaagtggtcgacccctccggtggctgggccactctgctagagtccatccgccaagctgggggcatcggcaaggccaagctgcgcagcatgaaggagcgaaagctggagaagcagcagcagaaggagcaggagcaagtgagagccacgagccaaggtgggcacttgatgtcggatctcttcaacaagctggtcatgaggcgcaagggcatctctgggaaaggacctggggctggtgaggggcccggaggagcctttgcccgcgtgtcagactccatccctcctctgccgccaccgcagcagccacaggcagaggaggacgaggacgactgggaatcgtagggggctccatgacaccttcccccccagacccagacttgggccattgctctgacatggacacagccaggacaagctgctcagacctgcttccctgggtgggggtgacggaaccagcactgtgcggagaccagcttcaaggagcggaaggctggcctgaggccacacagctggggcggggacttctgtctgcctgtgctccatggggggacggctccacccagcctgcgccactgtgttcttctctaaagaggcttccagagaaaatggcacaccaatcaataaagaactgagcagaaa

SEQ ID NO: 295628 - DNA, 1892 bp, Homo sapiens
ctaagttgtggctgcgccataggtgtttccttacctacgttgtttgctttaagtgcaggttttcattctttagggccctctattttcctttctctacttttttcccttctccatgtcatcgtcttttctgtgctgttattccacccatgggaggtgcacacaaggtcttgttggctgcccctgcaggtccctgtcacctctcacatgtccctgcctaatcttgcaggtcccagagaactacttctatgtgccagacctgggccaggtgcctgagattgatgttccatcctacctgcctgacctgcccggcattgccaacgacctcatgtacattgccgacctgggccccggcattgccccctctgcccctggcaccattccagaactgcccaccttccacactgaggtagccgagcctctcaagacctacaagatggggtactaacaccacccccaccgcccccaccaccacccccagctcctgaggtgctggccagtgcacccccactcccaccctcaaccgcggcccctgtaggccaaggcgccaggcaggacgacagcagcagcagcgcatctccttcaggtgggagcagctctttgaggccacctgatttctggcgtgctcagtgcactcgggtggattttctgtgggtttgttaagtggtcagaaattctcaattttttgaatagtttccatttcaaatatcttgttctacttggttcataaaatagtggctttcaaactgtagagctctggacttctcacttctagggcagagggagcctgaacaagtgaggctctgggttcctcattcctaattaaaccaatggaaagaaggggtctaataacaaactacagcaacacatttttcatttcagcttcactgctgtatctcccagtgtaaccctagcatccagaagtggcacaaaacccctctgctggctcatgtgtgcaactgagactgtcagagcatggctagctcaggggtccagctctgcagggtgagggctagagaggaagcagggagtatctgcacacaggatgcccgcgctcaggtggttgccgaagtcagtgcccgggccccacacagtctccaaaggtccggcctccccagcgcggggctcctcgtttgaggggaggtgacttccctcccagcaggctcttggacacagtaagcttccccagccctgcctgagcagcctttcctccttgccctgttccccacctcccggctccagtccagggagctcccagggaagtggtcgacccctccggtggctgggccactctgctagagtccatccgccaagctgggggcatcggcaaggccaagctgcgcagcatgaaggagcgaaagctggagaagcagcagcagaaggagcaggagcaagtgagagccacgagccaaggtgggcacttgatgtcggatctcttcaacaagctggtcatgaggcgcaagggcatctctgggaaaggacctggggctggtgaggggcccggaggagcctttgcccgcgtgtcagactccatccctcctctgccgccaccgcagcagccacaggcagaggaggacgaggacgactgggaatcgtagggggctccatgacaccttcccccccagacccagacttgggccattgctctgacatggacacagccaggacaagctgctcagacctgcttccctgggtgggggtgacggaaccagcactgtgcggagaccagcttcaaggagcggaaggctggcctgaggccacacagctggggcggggacttctgtctgcctgtgctccatggggggacggctccacccagcctgcgccactgtgttcttctctaaagaggcttccagagaaaatggcacaccaatcaataaagaactgagcagaaa

SEQ ID NO: 295629 - DNA, 1989 bp, Homo sapiens
gccctcccaggagaagctgaaggactttcctgtgtgcgtgagcaccaagccggagcccgaggacgatgcagaagagggacttgggggtcttcccagcaacatcagctctgtcagctccttgctgctcttcaacaccaccgagaacctgtacaagaagtatgtcttcctggaccccctggctggtgctgtaacaaagacccatgtgatgctgggggcagagacagaggagaagctgtttgatgcccccttgtccatcagcaagagagagcagctggaacagcaggtcccagagaactacttctatgtgccagacctgggccaggtgcctgagattgatgttccatcctacctgcctgacctgcccggcattgccaacgacctcatgtacattgccgacctgggccccggcattgccccctctgcccctggcaccattccagaactgcccaccttccacactgaggtagccgagcctctcaagacctacaagatggggtactaacaccacccccaccgcccccaccaccacccccagctcctgaggtgctggccagtgcacccccactcccaccctcaaccgcggcccctgtaggccaaggcgccaggcaggacgacagcagcagcagcgcatctccttcaggtgggagcagctctttgaggccacctgatttctggcgtgctcagtgcactcgggtggattttctgtgggtttgttaagtggtcagaaattctcaattttttgaatagtttccatttcaaatatcttgttctacttggttcataaaatagtggctttcaaactgtagagctctggacttctcacttctagggcagagggagcctgaacaagtgaggctctgggttcctcattcctaattaaaccaatggaaagaaggggtctaataacaaactacagcaacacatttttcatttcagcttcactgctgtatctcccagtgtaaccctagcatccagaagtggcacaaaacccctctgctggctcatgtgtgcaactgagactgtcagagcatggctagctcaggggtccagctctgcagggtgagggctagagaggaagcagggagtatctgcacacaggatgcccgcgctcaggtggttgccgaagtcagtgcccgggccccacacagtctccaaaggtccggcctccccagcgcggggctcctcgtttgaggggaggtgacttccctcccagcaggctcttggacacagtaagcttccccagccctgcctgagcagcctttcctccttgccctgttccccacctcccggctccagtccagggagctcccagggaagtggtcgacccctccggtggctgggccactctgctagagtccatccgccaagctgggggcatcggcaaggccaagctgcgcagcatgaaggagcgaaagctggagaagcagcagcagaaggagcaggagcaagtgagagccacgagccaaggtgggcacttgatgtcggatctcttcaacaagctggtcatgaggcgcaagggtaggaggcagggccgctgcccaccctgggccggcacattgcatctctgggaaaggacctggggctggtgaggggcccggaggagcctttgcccgcgtgtcagactccatccctcctctgccgccaccgcagcagccacaggcagaggaggacgaggacgactgggaatcgtagggggctccatgacaccttcccccccagacccagacttgggccattgctctgacatggacacagccaggacaagctgctcagacctgcttccctgggtgggggtgacggaaccagcactgtgcggagaccagcttcaaggagcggaaggctggcctgaggccacacagctggggcggggacttctgtctgcctgtgctccatggggggacggctccacccagcctgcgccactgtgttcttctctaaagaggcttccagagaaaatggcacaccaatcaataaagaactgagcagaaa

SEQ ID NO: 295630 - DNA, 2089 bp, Homo sapiens
gccctcccaggagaagctgaaggactttcctgtgtgcgtgagcaccaagccggagcccgaggacgatgcagaagagggacttgggggtcttcccagcaacatcagctctgtcagctccttgctgctcttcaacaccaccgagaacctgtacaagaagtatgtcttcctggaccccctggctggtgctgtaacaaagacccatgtgatgctgggggcagagacagaggagaagctgtttgatgcccccttgtccatcagcaagagagagcagctggaacagcaggtcccagagaactacttctatgtgccagacctgggccaggtgcctgagattgatgttccatcctacctgcctgacctgcccggcattgccaacgacctcatgtacattgccgacctgggccccggcattgccccctctgcccctggcaccattccagaactgcccaccttccacactgaggtagccgagcctctcaagacctacaagatggggtactaacaccacccccaccgcccccaccaccacccccagctcctgaggtgctggccagtgcacccccactcccaccctcaaccgcggcccctgtaggccaaggcgccaggcaggacgacagcagcagcagcgcatctccttcaggtgggagcagctctttgaggccacctgatttctggcgtgctcagtgcactcgggtggattttctgtgggtttgttaagtggtcagaaattctcaattttttgaatagtttccatttcaaatatcttgttctacttggttcataaaatagtggctttcaaactgtagagctctggacttctcacttctagggcagagggagcctgaacaagtgaggctctgggttcctcattcctaattaaaccaatggaaagaaggggtctaataacaaactacagcaacacatttttcatttcagcttcactgctgtatctcccagtgtaaccctagcatccagaagtggcacaaaacccctctgctggctcatgtgtgcaactgagactgtcagagcatggctagctcaggggtccagctctgcagggtgagggctagagaggaagcagggagtatctgcacacaggatgcccgcgctcaggtggttgccgaagtcagtgcccgggccccacacagtctccaaaggtccggcctccccagcgcggggctcctcgtttgaggggaggtgacttccctcccagcaggctcttggacacagtaagcttccccagccctgcctgagcagcctttcctccttgccctgttccccacctcccggctccagtccagggagctcccagggaagtggtcgacccctccggtggctgggccactctgctagagtccatccgccaagctgggggcatcggcaaggccaagctgcgcagcatgaaggagcgaaagctggagaagcagcagcagaaggagcaggagcaagtgagagccacgagccaaggtgggcacttgatgtcggatctcttcaacaagctggtcatgaggcgcaagggtaggaggcagggccgctgcccaccctgggccggcacattgtaattctgtcctgcctttttcttcctgtatttaagtctccgggggctgggggaaccagggtttcccaccaaccaccctcactcagccttttccctccaggcatctctgggaaaggacctggggctggtgaggggcccggaggagcctttgcccgcgtgtcagactccatccctcctctgccgccaccgcagcagccacaggcagaggaggacgaggacgactgggaatcgtagggggctccatgacaccttcccccccagacccagacttgggccattgctctgacatggacacagccaggacaagctgctcagacctgcttccctgggtgggggtgacggaaccagcactgtgcggagaccagcttcaaggagcggaaggctggcctgaggccacacagctggggcggggacttctgtctgcctgtgctccatggggggacggctccacccagcctgcgccactgtgttcttctctaaagaggcttccagagaaaatggcacaccaatcaataaagaactgagcagaaa

SEQ ID NO: 295631 - DNA, 814 bp, Homo sapiens
gcttgtacccagcgctgcttttgccttgctctgtgaccccaggcaagctgcctcacctctctgggccagtttccccatcgtacagtggtgctgcacaccctggccctgtccccgaggtggctgggaggtggctcctcaaacagccgctttctcatcagtgcccggtgctgggtcaggcatcgactgaggctctgagctaactaggaaacacagtggccttggagggctggggagtgtcatgggggtggggacagggagccaccggtcgcatgtgactgaactcttcaccccagtctgtggctttcccgttgcagtgagagccacgagccaaggtgggcacttgatgtcggatctcttcaacaagctggtcatgaggcgcaagggcatctctgggaaaggacctggggctggtgaggggcccggaggagcctttgcccgcgtgtcagactccatccctcctctgccgccaccgcagcagccacaggcagaggaggacgaggacgactgggaatcgtagggggctccatgacaccttcccccccagacccagacttgggccattgctctgacatggacacagccaggacaagctgctcagacctgcttccctgggtgggggtgacggaaccagcactgtgcggagaccagcttcaaggagcggaaggctggcctgaggccacacagctggggcggggacttctgtctgcctgtgctccatggggggacggctccacccagcctgcgccactgtgttcttctctaaagaggcttccagagaaaatggcacaccaatcaataaagaactgagcagaaa

SEQ ID NO: 295632 - DNA, 954 bp, Homo sapiens
gcttgtacccagcgctgcttttgccttgctctgtgaccccaggcaagctgcctcacctctctgggccagtttccccatcgtacagtggtgctgcacaccctggccctgtccccgaggtggctgggaggtggctcctcaaacagccgctttctcatcagtgcccggtgctgggtcaggcatcgactgaggctctgagctaactaggaaacacagtggccttggagggctggggagtgtcatgggggtggggacagggagccaccggtcgcatgtgactgaactcttcaccccagtctgtggctttcccgttgcagtgagagccacgagccaaggtgggcacttgatgtcggatctcttcaacaagctggtcatgaggcgcaagggtaggaggcagggccgctgcccaccctgggccggcacattgtaattctgtcctgcctttttcttcctgtatttaagtctccgggggctgggggaaccagggtttcccaccaaccaccctcactcagccttttccctccaggcatctctgggaaaggacctggggctggtgaggggcccggaggagcctttgcccgcgtgtcagactccatccctcctctgccgccaccgcagcagccacaggcagaggaggacgaggacgactgggaatcgtagggggctccatgacaccttcccccccagacccagacttgggccattgctctgacatggacacagccaggacaagctgctcagacctgcttccctgggtgggggtgacggaaccagcactgtgcggagaccagcttcaaggagcggaaggctggcctgaggccacacagctggggcggggacttctgtctgcctgtgctccatggggggacggctccacccagcctgcgccactgtgttcttctctaaagaggcttccagagaaaatggcacaccaatcaataaagaactgagcagaaa

SEQ ID NO: 295633 - DNA, 2315 bp, Homo sapiens
gccctcccaggagaagctgaaggactttcctgtgtgcgtgagcaccaagccggagcccgaggacgatgcagaagagggacttgggggtcttcccagcaacatcagctctgtcagctccttgctgctcttcaacaccaccgagaacctgtacaagaagtatgtcttcctggaccccctggctggtgctgtaacaaagacccatgtgatgctgggggcagagacagaggagaagctgtttgatgcccccttgtccatcagcaagagagagcagctggaacagcaggtcccagagaactacttctatgtgccagacctgggccaggtgcctgagattgatgttccatcctacctgcctgacctgcccggcattgccaacgacctcatgtacattgccgacctgggccccggcattgccccctctgcccctggcaccattccagaactgcccaccttccacactgaggtagccgagcctctcaagacctacaagatggggtactaacaccacccccaccgcccccaccaccacccccagctcctgaggtgctggccagtgcacccccactcccaccctcaaccgcggcccctgtaggccaaggcgccaggcaggacgacagcagcagcagcgcatctccttcaggtgggagcagctctttgaggccacctgatttctggcgtgctcagtgcactcgggtggattttctgtgggtttgttaagtggtcagaaattctcaattttttgaatagtttccatttcaaatatcttgttctacttggttcataaaatagtggctttcaaactgtagagctctggacttctcacttctagggcagagggagcctgaacaagtgaggctctgggttcctcattcctaattaaaccaatggaaagaaggggtctaataacaaactacagcaacacatttttcatttcagcttcactgctgtatctcccagtgtaaccctagcatccagaagtggcacaaaacccctctgctggctcatgtgtgcaactgagactgtcagagcatggctagctcaggggtccagctctgcagggtgagggctagagaggaagcagggagtatctgcacacaggatgcccgcgctcaggtggttgccgaagtcagtgcccgggccccacacagtctccaaaggtccggcctccccagcgcggggctcctcgtttgaggggaggtgacttccctcccagcaggctcttggacacagtaagcttccccagccctgcctgagcagcctttcctccttgccctgttccccacctcccggctccagtccagggagctcccagggaagtggtcgacccctccggtggctgggccactctgctagagtccatccgccaagctgggggcatcggcaaggccaagctgcgcagcatgaaggagcgaaagctggagaagcagcagcagaaggagcaggagcaagtgagagccacgagccaaggtgggcacttgatgtcggatctcttcaacaagctggtcatgaggcgcaagggcatctctgggaaaggacctggggctggtgaggggcccggaggagcctttgcccgcgtgtcagactccatccctcctctgccgccaccgcagcagccacaggcagaggaggacgaggacgactgggaatcgtagggggctccatgacaccttcccccccagacccagacttgggccattgctctgacatggacacagccaggacaagctgctcagacctgcttccctgggtgggggtgacggaaccagcactgtgcggagaccagcttcaaggagcggaaggctggcctgaggccacacagctggggcggggacttctgtctgcctgtgctccatggggggacggctccacccagcctgcgccactgtgttcttctctaaagaggcttccagagaaaatggcacaccaatcaataaagaactgagcagaaaaacaacaaaacaacaacaaacaaagatagaaacgaaaaacacgaaaggggtggagcgaacaaacagatcacgcgcagggcaccacgacagaagtacacgggaacaaagaaaaaggggcctaacaacgcggccatatcagcacacgacaacgcgcgaaaaatacaacacggaccacggaacacgcgaaaaaggaacactgcgacgaccacaccaccgggcgagcaaccaaaggacgaaccaccgaaccgaacacaacgctaagagcaaacagcacctgacacgaggaaacggaacacacagccccaacgcacccggccacaagacagcccaacacgcaccccggacccttcacggaaggtacgaaca

SEQ ID NO: 295634 - DNA, 2167 bp, Homo sapiens
gccctcccaggagaagctgaaggactttcctgtgtgcgtgagcaccaagccggagcccgaggacgatgcagaagagggacttgggggtcttcccagcaacatcagctctgtcagctccttgctgctcttcaacaccaccgagaacctgtacaagaagtatgtcttcctggaccccctggctggtgctgtaacaaagacccatgtgatgctgggggcagagacagaggagaagctgtttgatgcccccttgtccatcagcaagagagagcagctggaacagcaggtcccagagaactacttctatgtgccagacctgggccaggtgcctgagattgatgttccatcctacctgcctgacctgcccggcattgccaacgacctcatgtacattgccgacctgggccccggcattgccccctctgcccctggcaccattccagaactgcccaccttccacactgaggtagccgagcctctcaagacctacaagatggggtactaacaccacccccaccgcccccaccaccacccccagctcctgaggtgctggccagtgcacccccactcccaccctcaaccgcggcccctgtaggccaaggcgccaggcaggacgacagcagcagcagcgcatctccttcaggtgggagcagctctttgaggccacctgatttctggcgtgctcagtgcactcgggtggattttctgtgggtttgttaagtggtcagaaattctcaattttttgaatagtttccatttcaaatatcttgttctacttggttcataaaatagtggctttcaaactgtagagctctggacttctcacttctagggcagagggagcctgaacaagtgaggctctgggttcctcattcctaattaaaccaatggaaagaaggggtctaataacaaactacagcaacacatttttcatttcagcttcactgctgtatctcccagtgtaaccctagcatccagaagtggcacaaaacccctctgctggctcatgtgtgcaactgagactgtcagagcatggctagctcaggggtccagctctgcagggtgagggctagagaggaagcagggagtatctgcacacaggatgcccgcgctcaggtggttgccgaagtcagtgcccgggccccacacagtctccaaaggtccggcctccccagcgcggggctcctcgtttgaggggaggtgacttccctcccagcaggctcttggacacagtaagcttccccagccctgcctgagcagcctttcctccttgccctgttccccacctcccggctccagtccagggagctcccagggaagtggtcgacccctccggtggctgggccactctgctagagtccatccgccaagctgggggcatcggcaaggccaagctgcgcagcatgaaggagcgaaagctggagaagcagcagcagaaggagcaggagcaagtgagagccacgagccaaggtgggcacttgatgtcggatctcttcaacaagctggtcatgaggcgcaagggcatctctgggaaaggacctggggctggtgaggggcccggaggagcctttgcccgcgtgtcagactccatccctcctctgccgccaccgcagcagccacaggcagaggaggacgaggacgactgggaatcgtagggggctccatgacaccttcccccccagacccagacttgggccattgctctgacatggacacagccaggacaagctgctcagacctgcttccctgggtgggggtgacggaaccagcactgtgcggagaccagcttcaaggagcggaaggctggcctgaggccacacagctggggcggggacttctgtctgcctgtgctccatggggggacggctccacccagcctgcgccactgtgttcttctctaaagaggcttccagagaaaatggcacaccaatcaataaagaactgagcagaaaaaaaatagataaaaaaaacaaaaaaaaaccttgtgttgggccgccccgccccctggaagaaggttcctataaacccaaatccgtgtgtgggcccccgcggccccccatgactagagctcgtcggacagtgtgccgccaataacgcgggtcccccaagggaacaactcctgggcacaagaacacaagggccgcgggaaacccccccccaatagaaaaaa

SEQ ID NO: 295635 - DNA, 2289 bp, Homo sapiens
gccctcccaggagaagctgaaggactttcctgtgtgcgtgagcaccaagccggagcccgaggacgatgcagaagagggacttgggggtcttcccagcaacatcagctctgtcagctccttgctgctcttcaacaccaccgagaacctgtacaagaagtatgtcttcctggaccccctggctggtgctgtaacaaagacccatgtgatgctgggggcagagacagaggagaagctgtttgatgcccccttgtccatcagcaagagagagcagctggaacagcaggtcccagagaactacttctatgtgccagacctgggccaggtgcctgagattgatgttccatcctacctgcctgacctgcccggcattgccaacgacctcatgtacattgccgacctgggccccggcattgccccctctgcccctggcaccattccagaactgcccaccttccacactgaggtagccgagcctctcaagacctacaagatggggtactaacaccacccccaccgcccccaccaccacccccagctcctgaggtgctggccagtgcacccccactcccaccctcaaccgcggcccctgtaggccaaggcgccaggcaggacgacagcagcagcagcgcatctccttcaggtgggagcagctctttgaggccacctgatttctggcgtgctcagtgcactcgggtggattttctgtgggtttgttaagtggtcagaaattctcaattttttgaatagtttccatttcaaatatcttgttctacttggttcataaaatagtggctttcaaactgtagagctctggacttctcacttctagggcagagggagcctgaacaagtgaggctctgggttcctcattcctaattaaaccaatggaaagaaggggtctaataacaaactacagcaacacatttttcatttcagcttcactgctgtatctcccagtgtaaccctagcatccagaagtggcacaaaacccctctgctggctcatgtgtgcaactgagactgtcagagcatggctagctcaggggtccagctctgcagggtgagggctagagaggaagcagggagtatctgcacacaggatgcccgcgctcaggtggttgccgaagtcagtgcccgggccccacacagtctccaaaggtccggcctccccagcgcggggctcctcgtttgaggggaggtgacttccctcccagcaggctcttggacacagtaagcttccccagccctgcctgagcagcctttcctccttgccctgttccccacctcccggctccagtccagggagctcccagggaagtggtcgacccctccggtggctgggccactctgctagagtccatccgccaagctgggggcatcggcaaggccaagctgcgcagcatgaaggagcgaaagctggagaagcagcagcagaaggagcaggagcaagtgagagccacgagccaaggtgggcacttgatgtcggatctcttcaacaagctggtcatgaggcgcaagggtaggaggcagggccgctgcccaccctgggccggcacattgtaattctgtcctgcctttttcttcctgtatttaagtctccgggggctgggggaaccagggtttcccaccaaccaccctcactcagccttttccctccaggcatctctgggaaaggacctggggctggtgaggggcccggaggagcctttgcccgcgtgtcagactccatccctcctctgccgccaccgcagcagccacaggcagaggaggacgaggacgactgggaatcgtagggggctccatgacaccttcccccccagacccagacttgggccattgctctgacatggacacagccaggacaagctgctcagacctgcttccctgggtgggggtgacggaaccagcactgtgcggagaccagcttcaaggagcggaaggctggcctgaggccacacagctggggcggggacttctgtctgcctgtgctccatggggggacggctccacccagcctgcgccactgtgttcttctctaaagaggcttccagagaaaatggcacaccaatcaataaagaactgagcagaaaaaaaaaaacaaaaacaaaaaataaaaaacaaacacacaaaaaaaaaaaaaacccgcgggagcaccattagtagcggggggggcaaagacaagagacagacacgaggggcgaaggtgtcactcaaggctgacgcgacacacggatttgttggaccacgggggaaaacgggggagcccccagagggcgcgcataaagaaaag

SEQ ID NO: 295636 - DNA, 1830 bp, Homo sapiens
gccctcccaggagaagctgaaggactttcctgtgtgcgtgagcaccaagccggagcccgaggacgatgcagaagagggacttgggggtcttcccagcaacatcagctctgtcagctccttgctgctcttcaacaccaccgagaacctgtacaagaagtatgtcttcctggaccccctggctggtgctgtaacaaagacccatgtgatgctgggggcagagacagaggagaagctgtttgatgcccccttgtccatcagcaagagagagcagctggaacagcaggtcccagagaactacttctatgtgccagacctgggccaggtgcctgagattgatgttccatcctacctgcctgacctgcccggcattgccaacgacctcatgtacattgccgacctgggccccggcattgccccctctgcccctggcaccattccagaactgcccaccttccacactgaggtagccgagcctctcaagacctacaagatggggtactaacaccacccccaccgcccccaccaccacccccagctcctgaggtgctggccagtgcacccccactcccaccctcaaccgcggcccctgtaggccaaggcgccaggcaggacgacagcagcagcagcgcatctccttcaggtgggagcagctctttgaggccacctgatttctggcgtgctcagtgcactcgggtggattttctgtgggtttgttaagtggtcagaaattctcaattttttgaatagtttccatttcaaatatcttgttctacttggttcataaaatagtggctttcaaactgtagagctctggacttctcacttctagggcagagggagcctgaacaagtgaggctctgggttcctcattcctaattaaaccaatggaaagaaggggtctaataacaaactacagcaacacatttttcatttcagcttcactgctgtatctcccagtgtaaccctagcatccagaagtggcacaaaacccctctgctggctcatgtgtgcaactgagactgtcagagcatggctagctcaggggtccagctctgcagggtgagggctagagaggaagcagggagtatctgcacacaggatgcccgcgctcaggtggttgccgaagtcagtgcccgggccccacacagtctccaaaggtccggcctccccagcgcggggctcctcgtttgaggggaggtgacttccctcccagcaggctcttggacacagtaagcttccccagccctgcctgagcagcctttcctccttgccctgttccccacctcccggctccagtccagggagctcccagggaagtggtcgacccctccggtggctgggccactctgctagagtccatccgccaagctgggggcatcggcaaggccaagctgcgcagcatgaaggagcgaaagctggagaagcagcagcagaaggagcaggagcaaggagcgggccctggagcctgcggtcggagggcctttgggcaagatcgcctcctcccctccagccctgagtccaccgggtgctttctgcccaccccctgctcctgccagctggcccctgcttcccctagggcacatgctggaagccctgggccgccaccagaggtcctcagccctcctgcctgggctatggctccttcctggtttgggagccatagtggagctttcctctctaagctcacccagctcaaactgtgacaggagaatcttcttcgactgccaagagcggtccaaggcaatggtcagccactgcagcctcctgagatatttttagagactggacctgaggcctctggaggctactgatgatgcctgctgtgaacgc

SEQ ID NO: 295637 - DNA, 964 bp, Homo sapiens
gccctcccaggagaagctgaaggactttcctgtgtgcgtgagcaccaagccggagcccgaggacgatgcagaagagggacttgggggtcttcccagcaacatcagctctgtcagctccttgctgctcttcaacaccaccgagaacctgtacaagaagtatgtcttcctggaccccctggctggtgctgtaacaaagacccatgtgatgctgggggcagagacagaggagaagctgtttgatgcccccttgtccatcagcaagagagagcagctggaacagcaggtcccagagaactacttctatgtgccagacctgggccaggtgcctgagattgatgttccatcctacctgcctgacctgcccggcattgccaacgacctcatgtacattgccgacctgggccccggcattgccccctctgcccctggcaccattccagaactgcccaccttccacactgaggtagccgagcctctcaagacctacaagatggggtactaacaccacccccaccgcccccaccaccacccccagctcctgaggtgctggccagtgcacccccactcccaccctcaaccgcggcccctgtaggccaaggcgccaggcaggacgacagcagcagcagcgcatctccttcagtccagggagctcccagggaagtggtcgacccctccggtggctgggccactctgctagagtccatccgccaagctgggggcatcggcaaggccaagctgcgcagcatgaaggagcgaaagctggagaagcagcagcagaaggagcaggagcaagaccagcttcaaggagcggaaggctggcctgaggccacacagctggggcggggacttctgtctgcctgtgctccatggggggacggctccacccagcctgcgccactgtgttcttctctaaagaggcttccagagaaaatggcacaccaatcaataaagaactgagcagaaa

SEQ ID NO: 295638 - DNA, 566 bp, Homo sapiens
gccctcccaggagaagctgaaggactttcctgtgtgcgtgagcaccaagccggagcccgaggacgatgcagaagagggacttgggggtcttcccagcaacatcagctctgtcagctccttgctgctcttcaacaccaccgagaacctgtacaagaagtatgtcttcctggaccccctggctggtgctgtaacaaagacccatgtgatgctgggggcagagacagaggagaagctgtttgatgcccccttgtccatcagcaagagagagcagctggaacagcaggtcccagagaactacttctatgtgccagacctgggccaggtgcctgagattgatgttccatcctacctgcctgacctgcccggcattgccaacgacctcatgtacattgccgacctgggccccggcattgccccctctgcccctggcaccattccagaactgcccaccttccacactgaggtagccgagcctctcaagacctgagcaagccaggcctggcttgctcaggtcttatttcttgtattctgtcgcgatgggcctggcttgctcaggtctaggggcc

SEQ ID NO: 295639 - DNA, 219 bp, Homo sapiens
cttgctcagttctttattgagttggtgtgccgttttctctggaagcctcttaagaacacagtggcgcaggctggcctgaggccacacagctggggcggggacttctgtctgcctgtgctccatggggggacggctccacccagcctgcgccactgtgttcttctctaaagaggcttccagagaaaatggcacaccaatcaataaagaactgagcagaaa

SEQ ID NO: 295640 - DNA, 383 bp, Homo sapiens
agcagccacaggcagaggaggacgaggacgactgggaatcgtagggggctccatgacaccttcccccccagacccagacttgggccattgctctgacatggacacagccaggacaagctgctcagacctgcttccctgggtgggggtgacggaaccagcactgtgcggagaccagcttcaaggagcggaaggctggcctgaggccacacagctggggcggggacttctgtctgcctgtgctccatggggggacggctccacccagcctgcgccactgtgttcttctctaaagaggcttccagagaaaatggcacaccaatcaataaagaactgagcagaaaccaacagtgtgcttttaataaaggacctctagctgtgcagga

SEQ ID NO: 295641 - DNA, 313 bp, Homo sapiens
tgcctcagcctccccagtagctaggattacaggcatgcaccaccaatcctggctaatttttgtattgtttgtagagacagagtttcaccatgttgcccaggctggtcttgaactcctggactcaaatgatccacctaccttggcctcacaaagtgctgggattacaggcatgagctactatacctggcccaatttcagtttttaactcaacaaagttttaaatcttacttcagttcaatgtattcttacattaaaatattgatttaaaaatatgtgaacttccaatttcagctttgacctgcaaagagcttgg

SEQ ID NO: 295642 - DNA, 2427 bp, Homo sapiens
gcagtccgactcatcccggccccgggatggcgtccccacgggaattgacacagaaccccctgaagaagatctggatgccatacagcaatgggcggcccgctctgcacgcttgccagcgcggtgtgtgcatgaccaactgcccaactctcattgtcatggtgggcctgcccgccaggggcaagacctacatctccaagaagctgactcgatacctgaactggattggtgtgcccactcgggagttcaatgttggccagtatcgccgggacgtggtcaagacctacaaatcttttgaattttttctccccgacaatgaagagggcctgaaaatcaggaagcagtgtgccctggcagccctccgtgacgtccggcggttccttagtgaggaggggggacatgtggcggtttttgatgccacaaacaccacccgagaacggagagcgaccatctttaattttggagaacagaatggctacaagaccttttttgtcgagtccatctgtgtggatcctgaggtcatagctgccaacatcgtgcaagtgaaactgggcagccctgactatgtcaaccgcgacagtgatgaggctacggaggacttcatgaggcgcattgagtgctatgagaactcctacgagtcgctagatgaggacctggatagggacctgtcctatatcaagatcatggatgtgggccagagctacgtggtgaaccgtgtggctgaccacatccagagccgcatcgtatattacctcatgaacatccacgtgaccccccgctccatctacctctgccggcacggggagagcgagctcaacctcaagggccggattggcggggacccaggactgtcccctcggggcagggagtttgccaagagtctagcccagttcatcagtgaccaaaatatcaaggatctgaaggtctggacaagccagatgaagaggacaatccagacggctgaggcactgggtgtgccctatgaacagtggaaggtcctcaacgagatcgatgcgggcgtctgtgaggaaatgacctacgaggaaattcaggataattatccactggagttcgccctgcgggaccaggacaagtaccggtaccggtaccctaaaggggagtcctacgaggacctggtccagagactggagcctgtcatcatggagctggagaggcaagagaatgtgctggtcatctgccaccaggctgtgatgcgctgcctgctggcctacttcctcgacaaggcagcagaacagctgccctacctcaagtgtccgctgcacacagtcctgaagctgactcctgtggcatatggttgtaaagtggagtccatattcctgaacgtggctgctgtgaacacgcaccgggacaggcctcagaacgtggacatctcaagacctccagaggaagcccttgtcacggtgcctgctcaccagtgaccatgttcatccactgtgaccactaggcaggcactgctctctgcagagggggtcattccaggccctccagtgtgtgtgatagtcaccatgccatgcagggatattcttgaagccacacatggctggcggaacccagagcccccaccccagcccacctggctctttgttgacagtcggcgacaaggttgtgcgtggctcctgacctgctgctaagagtcacttgaccagactgcatctgcatgggctgcgcggaggttgcccagccccagtttcttccggcgcagctcttaggtgttcactctcgccagctcagttggctttgtgaagtgtgaaaccctacaatgtgaaaggaaagtgcttgctgtgatgttcctactgtggcccagctgcccagcatggacctggtgactctccacagggcctctaccatcctctctgtggccacttcctgagccagaggccaggtcttcatggggccctgagcttctgctgcctctggtgagagggagagcccttcccatccttacccaccaggaactagagccccaaccacagcagatgcttcctgggcagccactggccaggccgttgtatccatgtcacccttagttgtgggcattcatgaaagcaatgcgcttgcttcagcacattgggatgcacagaaacgtgagggcaggggggcagttgtggtcgcccctccccagttgtgcatgtacccggctacttaggtatgcttaggggagctggtggccaggggtgccccttcaggcctgctctcacagtgaaaccacttcaagacagggcaggaagttaccttcctggtgcacacaccgaagtgctcgagggagaggctgccgccccctctccccttccctggctgtggacactggcagccaatggggaggcggcctctcccctgttgctgcccgtgtccacacaggaatgtacactggtggcagaaacatgcatttgccataaataattcagaaac

SEQ ID NO: 295643 - DNA, 470 bp, Homo sapiens
ctcctcctcctgggttcacgccactctcctgcctcagcgtcctgagtagctgggactacaagcccccgccactgtgcccggctaattttttgtatttttagtagagatggggtttcaccatggtctcgatctcctgacctcgtgatccgcctgcctctgccaccccggcgcttctggtcctgccgcagaccttttttgtcgagtccatctgtgtggatcctgaggtcatagctgccaacatcgtggtgagtagtgcatctgaccttgtcagaaggtcgtgtgtgacagggacatcccttttcaggttttggctaaccttaatttgatcttgaaccttgtgggggtagggaggaagtgtaacttcaaatgctgggtcaggtatgcctcgccctctgtggatcactgtggaaggctgggtggctggtggacattcactcaccccacctccccctcgtaaccacctggacact

SEQ ID NO: 295644 - DNA, 379 bp, Homo sapiens
gcctggtctcagaggcctgccagcctgggtgtgtggttcatctccaccccttcccagctatgcagcccaggccttagtcccttcctcaggtgtggagtgggcagtgccatgtagggcaggccttcaacctggagacctttggctccctgctctccattcttgtctttccccttcccaggggtggagaattcggaagggcagggcctgaggtgggggatctgcggagttaggctttcctgggacccctgtagacagtgtgcggtcccctggcattcccaggccagctcctttcccagcgagttgtcagccctttccggggcgctcaaatggctggggagttggggagaccatggcaggcctgggactcgggtctcagctc

SEQ ID NO: 295645 - DNA, 3501 bp, Homo sapiens
  misc_feature (3411)..(3411): n is a, c, g, or t
  misc_feature (3440)..(3441): n is a, c, g, or t
gcagtccgactcatcccggccccgggatggcgtccccacgggaattgacacagaaccccctgaagaagatctggatgccatacagcaatgggcggcccgctctgcacgcttgccagcgcggtgtgtgcatgaccaactgcccaactctcattgtcatggtgggcctgcccgccaggggcaagacctacatctccaagaagctgactcgatacctgaactggattggtgtgcccactcgggagttcaatgttggccagtatcgccgggacgtggtcaagacctacaaatcttttgaattttttctccccgacaatgaagagggcctgaaaatcaggaagcagtgtgccctggcagccctccgtgacgtccggcggttccttagtgaggaggggggacatgtggcggtttttgatgccacaaacaccacccgagaacggagagcgaccatctttaattttggagaacagaatggctacaagaccttttttgtcgagtccatctgtgtggatcctgaggtcatagctgccaacatcgtgcaagtgaaactgggcagccctgactatgtcaaccgcgacagtgatgaggctacggaggacttcatgaggcgcattgagtgctatgagaactcctacgagtcgctagatgaggacctggatagggacctgtcctatatcaagatcatggatgtgggccagagctacgtggtgaaccgtgtggctgaccacatccagagccgcatcgtatattacctcatgaacatccacgtgaccccccgctccatctacctctgccggcacggggagagcgagctcaacctcaagggccggattggcggggacccaggactgtcccctcggggcagggagtttgccaagagtctagcccagttcatcagtgaccaaaatatcaaggatctgaaggtctggacaagccagatgaagaggacaatccagacggctgaggcactgggtgtgccctatgaacagtggaaggtcctcaacgagatcgatgcgggcgtctgtgaggaaatgacctacgaggaaattcaggataattatccactggagttcgccctgcgggaccaggacaagtaccggtaccggtaccctaaaggggagtcctacgaggacctggtccagagactggagcctgtcatcatggagctggagaggcaagagaatgtgctggtcatctgccaccaggctgtgatgcgctgcctgctggcctacttcctcgacaaggcagcagaacagctgccctacctcaagtgtccgctgcacacagtcctgaagctgactcctgtggcatatggttgtaaagtggagtccatattcctgaacgtggctgctgtgaacacgcaccgggacaggcctcagaacgtggacatctcaagacctccagaggaagcccttgtcacggtgcctgctcaccagtgaccatgttcatccactgtgaccactaggcaggcactgctctctgcagagggggtcattccaggccctccagtgtgtgtgatagtcaccatgccatgcagggatattcttgaagccacacatggctggcggaacccagagcccccaccccagcccacctggctctttgttgacagtcggcgacaaggttgtgcgtggctcctgacctgctgctaagagtcacttgaccagactgcatctgcatgggctgcgcggaggttgcccagccccagtttcttccggcgcagctcttaggtgttcactctcgccagctcagttggctttgtgaagtgtgaaaccctacaatgtgaaaggaaagtgcttgctgtgatgttcctactgtggcccagctgcccagcatggacctggtgactctccacagggcctctaccatcctctctgtggccacttcctgagccagaggccaggtcttcatggggccctgagcttctgctgcctctggtgagagggagagcccttcccatccttacccaccaggaactagagccccaaccacagcagatgcttcctgggcagccactggccaggccgttgtatccatgtcacccttagttgtgggcattcatgaaagcaatgcgcttgcttcagcacattgggatgcacagaaacgtgagggcaggggggcagttgtggtcgcccctccccagttgtgcatgtacccggctacttaggtatgcttaggggagctggtggccaggggtgccccttcaggcctgctctcacagtgaaaccacttcaagacagggcaggaagttaccttcctggtgcacacaccgaagtgctcgagggagaggctgccgccccctctccccttccctggctgtggacactggcagccaatggggaggcggcctctcccctgttgctgcccgtgtccacacaggaatgtacactggtggcagaaacatgcatttgccataaataattcagaaacacttgtatggtcctgtaaaacttctctggtgtttgttgacttctgcctgtgggtctgaggaagggagaaggcagaacccataggcagtccctgggcaagggaggattttcccggccgcagcacagccttccattcatgtgcacgtgagtctggtgaaaatggccttgtgaagtccagtgtctgtcatgcccctgagttcttttggtcccagagaggcagcctgggcagtctgtttacagctggcaaacagactggctggcaagttgtggggctgggtcagaaagtgtctggacttgtaatcgggtgccctgctgtccacaggtggactctggggaagccaggcccctggatcccaagtcctttgtgtccggagcctttcctggcctgtgcctggagggtagcacatctttccagcctcccagggctttgcagcctgcagatgccacctgtccctgagagaagttagcgtccctggccctggccggtggtctctcatccttgtgtgctgctctgctaagagatgtccaaggcggagccggggcaagatccttccagactcatctgtcagagccccaagccctttagacccagagcccaaggaccatgcctttgggacattaggactgcagcctttgcttctgtgtattttggagttttggtgacttttgtcacctggacacactcatttgttagccatagtgggttcccttggtcagcaacagtgcatgtacctctggatgtcatctgaggtgagaccaccgaggccttttctctctgtgtacagaggggagttaggagttgctggactggatgcattacgaggactggggacagggtagagggacatccagggatcagggcatgagtgggggcaacccccggctctgccctggcatggtctccgcatgggctgaggtgtagctgattggtgccacatttcggccatgctggctggcgtgcccatgttgcagatatttcccgagntccccagaatggatggtattgaatctcanncacatgcaacactgtgtccagcattctttgcaataaatactcttaaaaaacaaaaaacaa

SEQ ID NO: 295646 - DNA, 3443 bp, Homo sapiens
  misc_feature (3353)..(3353): n is a, c, g, or t
  misc_feature (3382)..(3383): n is a, c, g, or t
gatggacagaggctcgttaggaggcagctccctgaccgacctggggccggggagcagcaggcgggtgtgcatgaccaactgcccaactctcattgtcatggtgggcctgcccgccaggggcaagacctacatctccaagaagctgactcgatacctgaactggattggtgtgcccactcgggagttcaatgttggccagtatcgccgggacgtggtcaagacctacaaatcttttgaattttttctccccgacaatgaagagggcctgaaaatcaggaagcagtgtgccctggcagccctccgtgacgtccggcggttccttagtgaggaggggggacatgtggcggtttttgatgccacaaacaccacccgagaacggagagcgaccatctttaattttggagaacagaatggctacaagaccttttttgtcgagtccatctgtgtggatcctgaggtcatagctgccaacatcgtgcaagtgaaactgggcagccctgactatgtcaaccgcgacagtgatgaggctacggaggacttcatgaggcgcattgagtgctatgagaactcctacgagtcgctagatgaggacctggatagggacctgtcctatatcaagatcatggatgtgggccagagctacgtggtgaaccgtgtggctgaccacatccagagccgcatcgtatattacctcatgaacatccacgtgaccccccgctccatctacctctgccggcacggggagagcgagctcaacctcaagggccggattggcggggacccaggactgtcccctcggggcagggagtttgccaagagtctagcccagttcatcagtgaccaaaatatcaaggatctgaaggtctggacaagccagatgaagaggacaatccagacggctgaggcactgggtgtgccctatgaacagtggaaggtcctcaacgagatcgatgcgggcgtctgtgaggaaatgacctacgaggaaattcaggataattatccactggagttcgccctgcgggaccaggacaagtaccggtaccggtaccctaaaggggagtcctacgaggacctggtccagagactggagcctgtcatcatggagctggagaggcaagagaatgtgctggtcatctgccaccaggctgtgatgcgctgcctgctggcctacttcctcgacaaggcagcagaacagctgccctacctcaagtgtccgctgcacacagtcctgaagctgactcctgtggcatatggttgtaaagtggagtccatattcctgaacgtggctgctgtgaacacgcaccgggacaggcctcagaacgtggacatctcaagacctccagaggaagcccttgtcacggtgcctgctcaccagtgaccatgttcatccactgtgaccactaggcaggcactgctctctgcagagggggtcattccaggccctccagtgtgtgtgatagtcaccatgccatgcagggatattcttgaagccacacatggctggcggaacccagagcccccaccccagcccacctggctctttgttgacagtcggcgacaaggttgtgcgtggctcctgacctgctgctaagagtcacttgaccagactgcatctgcatgggctgcgcggaggttgcccagccccagtttcttccggcgcagctcttaggtgttcactctcgccagctcagttggctttgtgaagtgtgaaaccctacaatgtgaaaggaaagtgcttgctgtgatgttcctactgtggcccagctgcccagcatggacctggtgactctccacagggcctctaccatcctctctgtggccacttcctgagccagaggccaggtcttcatggggccctgagcttctgctgcctctggtgagagggagagcccttcccatccttacccaccaggaactagagccccaaccacagcagatgcttcctgggcagccactggccaggccgttgtatccatgtcacccttagttgtgggcattcatgaaagcaatgcgcttgcttcagcacattgggatgcacagaaacgtgagggcaggggggcagttgtggtcgcccctccccagttgtgcatgtacccggctacttaggtatgcttaggggagctggtggccaggggtgccccttcaggcctgctctcacagtgaaaccacttcaagacagggcaggaagttaccttcctggtgcacacaccgaagtgctcgagggagaggctgccgccccctctccccttccctggctgtggacactggcagccaatggggaggcggcctctcccctgttgctgcccgtgtccacacaggaatgtacactggtggcagaaacatgcatttgccataaataattcagaaacacttgtatggtcctgtaaaacttctctggtgtttgttgacttctgcctgtgggtctgaggaagggagaaggcagaacccataggcagtccctgggcaagggaggattttcccggccgcagcacagccttccattcatgtgcacgtgagtctggtgaaaatggccttgtgaagtccagtgtctgtcatgcccctgagttcttttggtcccagagaggcagcctgggcagtctgtttacagctggcaaacagactggctggcaagttgtggggctgggtcagaaagtgtctggacttgtaatcgggtgccctgctgtccacaggtggactctggggaagccaggcccctggatcccaagtcctttgtgtccggagcctttcctggcctgtgcctggagggtagcacatctttccagcctcccagggctttgcagcctgcagatgccacctgtccctgagagaagttagcgtccctggccctggccggtggtctctcatccttgtgtgctgctctgctaagagatgtccaaggcggagccggggcaagatccttccagactcatctgtcagagccccaagccctttagacccagagcccaaggaccatgcctttgggacattaggactgcagcctttgcttctgtgtattttggagttttggtgacttttgtcacctggacacactcatttgttagccatagtgggttcccttggtcagcaacagtgcatgtacctctggatgtcatctgaggtgagaccaccgaggccttttctctctgtgtacagaggggagttaggagttgctggactggatgcattacgaggactggggacagggtagagggacatccagggatcagggcatgagtgggggcaacccccggctctgccctggcatggtctccgcatgggctgaggtgtagctgattggtgccacatttcggccatgctggctggcgtgcccatgttgcagatatttcccgagntccccagaatggatggtattgaatctcanncacatgcaacactgtgtccagcattctttgcaataaatactcttaaaaaacaaaaaacaa

SEQ ID NO: 295647 - DNA, 3733 bp, Homo sapiens
  misc_feature (3643)..(3643): n is a, c, g, or t
  misc_feature (3672)..(3673): n is a, c, g, or t
gggactgggaagagtttgagctttgagaactggccaccacatggcttctaggctgggacactgggaggaagtccagtggtcagtgcagagggcaccctgggagccaaccagggtcaggccagccaggttcatggtgggcagaggctgagcagaacatgttcacacgtgtgtacagacatcccagcatacttcccacgcctgggacagaacagctggctcactttcggatatactgaggaggaaaaagccatgagggccagagattctaccgggcatccgctgatgctgagagagcagacgctgggacagcatctccatggagaggacacaggggagtgggagcacacatgtgaagtgtgcatgaccaactgcccaactctcattgtcatggtgggcctgcccgccaggggcaagacctacatctccaagaagctgactcgatacctgaactggattggtgtgcccactcgggagttcaatgttggccagtatcgccgggacgtggtcaagacctacaaatcttttgaattttttctccccgacaatgaagagggcctgaaaatcaggaagcagtgtgccctggcagccctccgtgacgtccggcggttccttagtgaggaggggggacatgtggcggtttttgatgccacaaacaccacccgagaacggagagcgaccatctttaattttggagaacagaatggctacaagaccttttttgtcgagtccatctgtgtggatcctgaggtcatagctgccaacatcgtgcaagtgaaactgggcagccctgactatgtcaaccgcgacagtgatgaggctacggaggacttcatgaggcgcattgagtgctatgagaactcctacgagtcgctagatgaggacctggatagggacctgtcctatatcaagatcatggatgtgggccagagctacgtggtgaaccgtgtggctgaccacatccagagccgcatcgtatattacctcatgaacatccacgtgaccccccgctccatctacctctgccggcacggggagagcgagctcaacctcaagggccggattggcggggacccaggactgtcccctcggggcagggagtttgccaagagtctagcccagttcatcagtgaccaaaatatcaaggatctgaaggtctggacaagccagatgaagaggacaatccagacggctgaggcactgggtgtgccctatgaacagtggaaggtcctcaacgagatcgatgcgggcgtctgtgaggaaatgacctacgaggaaattcaggataattatccactggagttcgccctgcgggaccaggacaagtaccggtaccggtaccctaaaggggagtcctacgaggacctggtccagagactggagcctgtcatcatggagctggagaggcaagagaatgtgctggtcatctgccaccaggctgtgatgcgctgcctgctggcctacttcctcgacaaggcagcagaacagctgccctacctcaagtgtccgctgcacacagtcctgaagctgactcctgtggcatatggttgtaaagtggagtccatattcctgaacgtggctgctgtgaacacgcaccgggacaggcctcagaacgtggacatctcaagacctccagaggaagcccttgtcacggtgcctgctcaccagtgaccatgttcatccactgtgaccactaggcaggcactgctctctgcagagggggtcattccaggccctccagtgtgtgtgatagtcaccatgccatgcagggatattcttgaagccacacatggctggcggaacccagagcccccaccccagcccacctggctctttgttgacagtcggcgacaaggttgtgcgtggctcctgacctgctgctaagagtcacttgaccagactgcatctgcatgggctgcgcggaggttgcccagccccagtttcttccggcgcagctcttaggtgttcactctcgccagctcagttggctttgtgaagtgtgaaaccctacaatgtgaaaggaaagtgcttgctgtgatgttcctactgtggcccagctgcccagcatggacctggtgactctccacagggcctctaccatcctctctgtggccacttcctgagccagaggccaggtcttcatggggccctgagcttctgctgcctctggtgagagggagagcccttcccatccttacccaccaggaactagagccccaaccacagcagatgcttcctgggcagccactggccaggccgttgtatccatgtcacccttagttgtgggcattcatgaaagcaatgcgcttgcttcagcacattgggatgcacagaaacgtgagggcaggggggcagttgtggtcgcccctccccagttgtgcatgtacccggctacttaggtatgcttaggggagctggtggccaggggtgccccttcaggcctgctctcacagtgaaaccacttcaagacagggcaggaagttaccttcctggtgcacacaccgaagtgctcgagggagaggctgccgccccctctccccttccctggctgtggacactggcagccaatggggaggcggcctctcccctgttgctgcccgtgtccacacaggaatgtacactggtggcagaaacatgcatttgccataaataattcagaaacacttgtatggtcctgtaaaacttctctggtgtttgttgacttctgcctgtgggtctgaggaagggagaaggcagaacccataggcagtccctgggcaagggaggattttcccggccgcagcacagccttccattcatgtgcacgtgagtctggtgaaaatggccttgtgaagtccagtgtctgtcatgcccctgagttcttttggtcccagagaggcagcctgggcagtctgtttacagctggcaaacagactggctggcaagttgtggggctgggtcagaaagtgtctggacttgtaatcgggtgccctgctgtccacaggtggactctggggaagccaggcccctggatcccaagtcctttgtgtccggagcctttcctggcctgtgcctggagggtagcacatctttccagcctcccagggctttgcagcctgcagatgccacctgtccctgagagaagttagcgtccctggccctggccggtggtctctcatccttgtgtgctgctctgctaagagatgtccaaggcggagccggggcaagatccttccagactcatctgtcagagccccaagccctttagacccagagcccaaggaccatgcctttgggacattaggactgcagcctttgcttctgtgtattttggagttttggtgacttttgtcacctggacacactcatttgttagccatagtgggttcccttggtcagcaacagtgcatgtacctctggatgtcatctgaggtgagaccaccgaggccttttctctctgtgtacagaggggagttaggagttgctggactggatgcattacgaggactggggacagggtagagggacatccagggatcagggcatgagtgggggcaacccccggctctgccctggcatggtctccgcatgggctgaggtgtagctgattggtgccacatttcggccatgctggctggcgtgcccatgttgcagatatttcccgagntccccagaatggatggtattgaatctcanncacatgcaacactgtgtccagcattctttgcaataaatactcttaaaaaacaaaaaacaa

SEQ ID NO: 295648 - DNA, 2435 bp, Homo sapiens
  misc_feature (2345)..(2345): n is a, c, g, or t
  misc_feature (2374)..(2375): n is a, c, g, or t
cgctagtacgagccggttgaatcggacgaggcggtacggtacctaaagggagtcctacgaggacctggtccagagactggagcctgtcatcatggagctggagaggcaagagaatgtgctggtcatctgccaccaggctgtgatgcgctgcctgctggcctacttcctcgacaaggcagcagaacagctgccctacctcaagtgtccgctgcacacagtcctgaagctgactcctgtggcatatggttgtaaagtggagtccatattcctgaacgtggctgctgtgaacacgcaccgggacaggcctcagaacgtggacatctcaagacctccagaggaagcccttgtcacggtgcctgctcaccagtgaccatgttcatccactgtgaccactaggcaggcactgctctctgcagagggggtcattccaggccctccagtgtgtgtgatagtcaccatgccatgcagggatattcttgaagccacacatggctggcggaacccagagcccccaccccagcccacctggctctttgttgacagtcggcgacaaggttgtgcgtggctcctgacctgctgctaagagtcacttgaccagactgcatctgcatgggctgcgcggaggttgcccagccccagtttcttccggcgcagctcttaggtgttcactctcgccagctcagttggctttgtgaagtgtgaaaccctacaatgtgaaaggaaagtgcttgctgtgatgttcctactgtggcccagctgcccagcatggacctggtgactctccacagggcctctaccatcctctctgtggccacttcctgagccagaggccaggtcttcatggggccctgagcttctgctgcctctggtgagagggagagcccttcccatccttacccaccaggaactagagccccaaccacagcagatgcttcctgggcagccactggccaggccgttgtatccatgtcacccttagttgtgggcattcatgaaagcaatgcgcttgcttcagcacattgggatgcacagaaacgtgagggcaggggggcagttgtggtcgcccctccccagttgtgcatgtacccggctacttaggtatgcttaggggagctggtggccaggggtgccccttcaggcctgctctcacagtgaaaccacttcaagacagggcaggaagttaccttcctggtgcacacaccgaagtgctcgagggagaggctgccgccccctctccccttccctggctgtggacactggcagccaatggggaggcggcctctcccctgttgctgcccgtgtccacacaggaatgtacactggtggcagaaacatgcatttgccataaataattcagaaacacttgtatggtcctgtaaaacttctctggtgtttgttgacttctgcctgtgggtctgaggaagggagaaggcagaacccataggcagtccctgggcaagggaggattttcccggccgcagcacagccttccattcatgtgcacgtgagtctggtgaaaatggccttgtgaagtccagtgtctgtcatgcccctgagttcttttggtcccagagaggcagcctgggcagtctgtttacagctggcaaacagactggctggcaagttgtggggctgggtcagaaagtgtctggacttgtaatcgggtgccctgctgtccacaggtggactctggggaagccaggcccctggatcccaagtcctttgtgtccggagcctttcctggcctgtgcctggagggtagcacatctttccagcctcccagggctttgcagcctgcagatgccacctgtccctgagagaagttagcgtccctggccctggccggtggtctctcatccttgtgtgctgctctgctaagagatgtccaaggcggagccggggcaagatccttccagactcatctgtcagagccccaagccctttagacccagagcccaaggaccatgcctttgggacattaggactgcagcctttgcttctgtgtattttggagttttggtgacttttgtcacctggacacactcatttgttagccatagtgggttcccttggtcagcaacagtgcatgtacctctggatgtcatctgaggtgagaccaccgaggccttttctctctgtgtacagaggggagttaggagttgctggactggatgcattacgaggactggggacagggtagagggacatccagggatcagggcatgagtgggggcaacccccggctctgccctggcatggtctccgcatgggctgaggtgtagctgattggtgccacatttcggccatgctggctggcgtgcccatgttgcagatatttcccgagntccccagaatggatggtattgaatctcanncacatgcaacactgtgtccagcattctttgcaataaatactcttaaaaaacaaaaaacaa

SEQ ID NO: 295649 - DNA, 881 bp, Homo sapiens
gatggacagaggctcgttaggaggcagctccctgaccgacctggggccggggagcagcaggcgggtgtgcatgaccaactgcccaactctcattgtcatggtgggcctgcccgccaggggcaagacctacatctccaagaagctgactcgatacctgaactggattggtgtgcccactcgggagttcaatgttggccagtatcgccgggacgtggtcaagacctacaaatcttttgaattttttctccccgacaatgaagagggcctgaaaatcaggaaatgaggaaactgaggctcagacaggccaggagtctcgcacaaaatagcaagtttacatcagcgcccagacttgaatctaagcccatccaccgctaaaaagtgtccatcattccaatattcctcaataggttcaagcaattcttctgcctcagccaacaaccccaagctgtggacgctgatagcctactgtctgatcttcccagcagcttctgtggtgggcggtgcctcacttttccagatgctgggaccaaggccagaaagtgatgggggtgccttgggtcactcagggtttgaatttgaagtccgtcctgcctgaatccatagtgtttgtggggagagtctgccagctgttccactctggctgtccccctaaggtagggatatttgggattaattcaaatgaagagacctagactcagagaggttgggaagctagtccaaggtcaccctgcaacagaagctggggacaggctcattgctgcctttctgcaggcataccctctggctgccctagaaaccctctctgctgtatccgaatcctggctctggctgggccacagggccatctcctattaatcagcccaaaatttcccaattagcaa

SEQ ID NO: 295650 - DNA, 447 bp, Homo sapiens
caaggaaccaccaatgatcagtgttcctagaggtcctcccctccttagacaggtttctgttcccttcacccaggaaatgcccgtgaacttggtctcttctgcttgatgctgcctcaccccacatgtccccaaggctcatcttctgggcctgtaggaggtgtgatgactgtggtatctccctagggcgtctgtgaggaaatgacctacgaggaaattcaggataattatccactggagttcgccctgcgggaccaggacaagtaccggtaccggtaccctaaaggggaggtaggtgggatttggggcttagtcccagccacctactgcccgcctgggagtaccacctgtggctgagggcctgtggggctctgcaggggctgcgtgggtagcagaaggggcctggtctcagaggcctgccagcctgggtgtgtggttcatctccacccc

SEQ ID NO: 295651 - DNA, 856 bp, Homo sapiens
gaaaatcttgggccacacactgtggcttacacctgtaatcttagcactttgggaagctgagacgggaggatcacttgaggttgggagtttgagcccagactggccaaatggtgaaaccctatctctactaaaaatataaatattagccttgtgtgggggcgcacacgtgtagtctcagccactagggaggctgaggcaggagaatcacttgaacccaggaggcggaggttgcagcgagccaagatcgtgccattgcacttcagcttgggtgacagagcaagactctgtctcaaaaaaaacaaagtcttatgacctctttggcatgtactttagagaggaaatcttacccaagccagaaagtctcagtctaggcattttttttattgtgcaagcatataaaattctagtaattctggggctaatcctgtgatagggagaattcaaggaaaggtggtggtgacccagtgctgccgttttctccttaggtgacgcatccaaagaagacattgacactgctatgaaattaggagccggttaccccatgggcccatttgagcttctagattatgtcggactggatactacgaagttcatcgtggatgggtggcatgaaatggatgcagagaacccattacatcagcccagcccatccttaaataagctggtagcagagaacaagttcggcaagaagactggagaaggattttacaaatacaagtgatgtgcagcttctccggctctgagaagaacacctgagagcgctttccagccagtgccccgagtgcctgtgggaatgctctttggtcagacattccctcacacagtacagtttaataaatgtgcattttgattgtaa

SEQ ID NO: 295652 - DNA, 740 bp, Homo sapiens
gaaaatcttgggccacacactgtggcttacacctgtaatcttagcactttgggaagctgagacgggaggatcacttgaggttgggagtttgagcccagactggccaaatggtgaaaccctatctctactaaaaatataaatattagccttgtgtgggggcgcacacgtgtagtctcagccactagggaggctgaggcaggagaatcacttgaacccaggaggcggaggttgcagcgagccaagatcgtgccattgcacttcagcttgggtgacagagcaagactctgtctcaaaaaaaacaaagtcttatgacctctttggcatgtactttagagaggaaatcttacccaagccagaaagtctcagtctaggcattttttttattgtgcaagcatataaaattctagtaattctggggctaatcctgtgatagggagaattcaaggaaaggtggtggtgacccagtgctgccgttttctccttaggtgacgcatccaaagaagacattgacactgctatgaaattaggagccggttaccccatgggcccatttgagcttctagattatgtcggactggatactacgaagttcatcgtggatgggtggcatgaaatggatgcagagaacccattacatcagcccagcccatccttaaataagctggtagcagagaacaaaaaacgcccacagggctgtaccacacggaccacaccaaaaacagttttctcctgaaaaacgt

SEQ ID NO: 295653 - DNA, 408 bp, Homo sapiens
aaaaatatatcttctttatcgatgtttaagtagtttctctctgagtgtcttaacatttttccctctttagctttgatctgattgacttcttaatgctttggaacaaaattctagatagccacctgttgcagactattctacttttctgatttcaaagaaagggaacagattgttctccataaaggcctcttggggccaaaggacatagtaaatttccaagggaaaagcacattgatccttgtcgtagtctactcaacagacttccaaacgtgtggtgattctaactcgggtttgggcttttctttaaaaggtatcttgactaaaaggtttgtgtgaaatgtgatgccaggggaatactccttacttgtaaaacccaaaaaactgggggaaagaatacatacaataact

SEQ ID NO: 295654 - DNA, 1978 bp, Homo sapiens
cgtgtatacccgctcaacgctgggacgttacagccagggccaatgggcagagcgggactcgaggccccgcccccgccttgtggcgtcacggggacgccgggggcgcgcgggctgcagggccgcgtaggtccccgcccccagagtctggctttccgcggctgcccgcctcgcgcgtcttccctgcccgggtctcctcgctgtcgccgccgctgccacaccatggccttcgtcaccaggcagttcatgcgttccgtgtcctcctcgtccaccgcctcggcctcggccaagaagataatcgtcaagcacgtgacggtcatcggcggcgggctgatgggcgccggcattgcccaggttgctgcagcaactggtcacacagtagtgttggtagaccagacagaggacatcctggcaaaatccaaaaagggaattgaggaaagccttaggaaagtggcaaagaagaagtttgcagaaaaccctaaggccggcgatgaatttgtggagaagaccctgagcaccatagcgaccagcacggatgcagcctccgttgtccacagcacagacttggtggtggaagccatcgtggagaatctgaaggtgaaaaacgagctcttcaaaaggctggacaagtttgctgctgaacatacaatctttgccagcaacacttcctccttgcagattacaagcatagctaatgccaccaccagacaagaccgattcgctggcctccatttcttcaacccagtgcctgtcatgaaacttgtggaggtcattaaaacaccaatgaccagccagaagacatttgaatctttggtagactttagcaaagccctaggaaagcatcctgtttcttgcaaggacactcctgggtttattgtgaaccgcctcctggttccatacctcatggaagcaatcaggctgtatgaacgaggtgacgcatccaaagaagacattgacactgctatgaaattaggagccggttaccccatgggcccatttgagcttctagattatgtcggactggatactacgaagttcatcgtggatgggtggcatgaaatggatgcagagaacccattacatcagcccagcccatccttaaataagctggtagcagagaacaagttcggcaagaagactggagaaggattttacaaatacaagtgatgtgcagcttctccggctctgagaagaacacctgagagcgctttccagccagtgccccgagtgcctgtgggaatgctctttggtcagacattccctcacacagtacagtttaataaatgtgcattttgattgtaatctatcgaagtgattattacaccagttacagcagtaatagattctccattaagaaataattcccttttttagtctgttcatttctgtgtattttctaaacagctttacacccttggtgccttggagcaaacatgttttttgaaccttgtcatttttgtgaagaattgcctagattccttctctcatcaacgggaaagtacttcctctgagagtgcgagtgcaccatgctcactgttgctgcgtgggagagtcacaagccactggcaagcaagtggtatagtctgtgaagcactgcagcgagcagcacctggatcttgcctttataagaacattttactacctgcagctttgagtcttgccctacattttgggcatgacataagatgtgtctttattcagctcgtcgtgaagatgctgctgctgaatgggtcagcatatctctgtttgcatggtttgcaggaggtcggttttcatggtcattcagttccacagatctgaatgattactgtctgtctgtgtcttttttccatgagaaatcactgttgcaaattgcctataaattgactctactaaaataacaatgtttcagtctgaaaatttgaattgaaaaaaatgtataatataaaattgtaatacactcaaatgattataaaagtaaaagttggtaatttaggcagaa

SEQ ID NO: 295655 - DNA, 2123 bp, Homo sapiens
cgtgtatacccgctcaacgctgggacgttacagccagggccaatgggcagagcgggactcgaggccccgcccccgccttgtggcgtcacggggacgccgggggcgcgcgggctgcagggccgcgtaggtccccgcccccagagtctggctttccgcggctgcccgcctcgcgcgtcttccctgcccgggtctcctcgctgtcgccgccgctgccacaccatggccttcgtcaccaggcagttcatgcgttccgtgtcctcctcgtccaccgcctcggcctcggccaagaagataatcgtcaagcacgtgacggtcatcggcggcgggctgatgggcgccggcattgcccaggttgctgcagcaactggtcacacagtagtgttggtagaccagacagaggacatcctggcaaaatccaaaaagggaattgaggaaagccttaggaaagtggcaaagaagaagtttgcagaaaaccctaaggccggcgatgaatttgtggagaagaccctgagcaccatagcgaccagcacggatgcagcctccgttgtccacagcacagacttggtggtggaagccatcgtggagaatctgaaggtgaaaaacgagctcttcaaaaggctggacaagtttgctgctgaacatacaatctttgccagcaacacttcctccttgcagattacaagcatagctaatgccaccaccagacaagaccgattcgctggcctccatttcttcaacccagtgcctgtcatgaaacttgtggaggtcattaaaacaccaatgaccagccagaagacatttgaatctttggtagactttagcaaagccctaggaaagcatcctgtttcttgcaaggacactcctgggtttattgtgaaccgcctcctggttccatacctcatggaagcaatcaggctgtatgaacgaggtgacgcatccaaagaagacattgacactgctatgaaattaggagccggttaccccatgggcccatttgagcttctagattatgtcggactggatactacgaagttcatcgtggatgggtggcatgaaatggatgcagagaacccattacatcagcccagcccatccttaaataagctggtagcagagaacaagttcggcaagaagactggagaaggattttacaaatacaagtgatgtgcagcttctccggctctgagaagaacacctgagagcgctttccagccagtgccccgagtgcctgtgggaatgctctttggtcagacattccctcacacagtacagtttaataaatgtgcattttgattgtaatctatcgaagtgattattacaccagttacagcagtaatagattctccattaagaaataattcccttttttagtctgttcatttctgtgtattttctaaacagctttacacccttggtgccttggagcaaacatgttttttgaaccttgtcatttttgtgaagaattgcctagattccttctctcatcaacgggaaagtacttcctctgagagtgcgagtgcaccatgctcactgttgctgcgtgggagagtcacaagccactggcaagcaagtggtatagtctgtgaagcactgcagcgagcagcacctggatcttgcctttataagaacattttactacctgcagctttgagtcttgccctacattttgggcatgacataagatgtgtctttattcagctcgtcgtgaagatgctgctgctgaatgggtcagcatatctctgtttgcatggtttgcaggaggtcggttttcatggtcattcagttccacagatctgaatgattactgtctgtctgtgtcttttttccatgagaaatcactgttgcaaattgcctataaattgactctactaaaataacaatgtttcagtctgaaaatttgaattgaaaaaaatgtataatataaaattgtaatacactcaaatgattataaaagtaaaagttggtaatttaggcagaaaaaaaaaagcggacgcgtgggtttgaatcttaaactgtatttttctcttagtattgctaatgagtaaagaaaagtctcataaggtagccaaatgaaaaagaatgaaagggaaagtgaaaaattaaggggacaaaagatgggatgt

SEQ ID NO: 295656 - DNA, 2318 bp, Homo sapiens
cgtgtatacccgctcaacgctgggacgttacagccagggccaatgggcagagcgggactcgaggccccgcccccgccttgtggcgtcacggggacgccgggggcgcgcgggctgcagggccgcgtaggtccccgcccccagagtctggctttccgcggctgcccgcctcgcgcgtcttccctgcccgggtctcctcgctgtcgccgccgctgccacaccatggccttcgtcaccaggcagttcatgcgttccgtgtcctcctcgtccaccgcctcggcctcggccaagaagataatcgtcaagcacgtgacggtcatcggcggcgggctgatgggcgccggcattgcccaggttgctgcagcaactggtcacacagtagtgttggtagaccagacagaggacatcctggcaaaatccaaaaagggaattgaggaaagccttaggaaagtggcaaagaagaagtttgcagaaaaccctaaggccggcgatgaatttgtggagaagaccctgagcaccatagcgaccagcacggatgcagcctccgttgtccacagcacagacttggtggtggaagccatcgtggagaatctgaaggtgaaaaacgagctcttcaaaaggctggacaagtttgctgctgaacatacaatctttgccagcaacacttcctccttgcagattacaagcatagctaatgccaccaccagacaagaccgattcgctggcctccatttcttcaacccagtgcctgtcatgaaacttgtggaggtcattaaaacaccaatgaccagccagaagacatttgaatctttggtagactttagcaaagccctaggaaagcatcctgtttcttgcaaggacactcctgggtttattgtgaaccgcctcctggttccatacctcatggaagcaatcaggctgtatgaacgaggtgacgcatccaaagaagacattgacactgctatgaaattaggagccggttaccccatgggcccatttgagcttctagattatgtcggactggatactacgaagttcatcgtggatgggtggcatgaaatggatgcagagaacccattacatcagcccagcccatccttaaataagctggtagcagagaacaagttcggcaagaagactggagaaggattttacaaatacaagtgatgtgcagcttctccggctctgagaagaacacctgagagcgctttccagccagtgccccgagtgcctgtgggaatgctctttggtcagacattccctcacacagtacagtttaataaatgtgcattttgattgtaatctatcgaagtgattattacaccagttacagcagtaatagattctccattaagaaataattcccttttttagtctgttcatttctgtgtattttctaaacagctttacacccttggtgccttggagcaaacatgttttttgaaccttgtcatttttgtgaagaattgcctagattccttctctcatcaacgggaaagtacttcctctgagagtgcgagtgcaccatgctcactgttgctgcgtgggagagtcacaagccactggcaagcaagtggtatagtctgtgaagcactgcagcgagcagcacctggatcttgcctttataagaacattttactacctgcagctttgagtcttgccctacattttgggcatgacataagatgtgtctttattcagctcgtcgtgaagatgctgctgctgaatgggtcagcatatctctgtttgcatggtttgcaggaggtcggttttcatggtcattcagttccacagatctgaatgattactgtctgtctgtgtcttttttccatgagaaatcactgttgcaaattgcctataaattgactctactaaaataacaatgtttcagtctgaaaatttgaattgaaaaaaatgtataatataaaattgtaatacactcaaatgattataaaagtaaaagttggtaatttaggcagaaaaaaaaaaaaaaaaaaaaaaaaaaaaaaaaaaaaaaaaaaaaaaaaaaaccatgcagaccgcttggacccaaccaattttaaactcgaccaggttaatgcttgcggccgaatttcaagctaattgggccaattggccttatagggagccggtttacaattaattggccgccgtttaacaacgtcgggactggaaaacccttgcggttccccaattaaatggctttgaagaacatcccctttttgcagttgcggaataaccaaaaagccccgaccgaatggcctttccaacaattggccaacctgaatgccaattgaaaaatgtaggcgtaataatttgga

SEQ ID NO: 295657 - DNA, 1299 bp, Homo sapiens
cgtgtatacccgctcaacgctgggacgttacagccagggccaatgggcagagcgggactcgaggccccgcccccgccttgtggcgtcacggggacgccgggggcgcgcgggctgcagggccgcgtaggtccccgcccccagagtctggctttccgcggctgcccgcctcgcgcgtcttccctgcccgggtctcctcgctgtcgccgccgctgccacaccatggccttcgtcaccaggcagttcatgcgttccgtgtcctcctcgtccaccgcctcggcctcggccaagaagataatcgtcaagcacgtgacggtcatcggcggcgggctgatgggcgccggcattgcccaggttgctgcagcaactggtcacacagtagtgttggtagaccagacagaggacatcctggcaaaatccaaaaagggaattgaggaaagccttaggaaagtggcaaagaagaagtttgcagaaaaccctaaggccggcgatgaatttgtggagaagaccctgagcaccatagcgaccagcacggatgcagcctccgttgtccacagcacagacttggtggtggaagccatcgtggagaatctgaaggtgaaaaacgagctcttcaaaaggctggacaagtttgctgctgaacatacaatctttgccagcaacacttcctccttgcagattacaagcatagctaatgccaccaccagacaagaccgattcgctggcctccatttcttcaacccagtgcctgtcatgaaacttgtggaggtcattaaaacaccaatgaccagccagaagacatttgaatctttggtagactttagcaaagccctaggaaagcatcctgtttcttgcaaggacactcctgggtttattgtgaaccgcctcctggttccatacctcatggaagcaatcaggctgtatgaacgaggtgacgcatccaaagaagacattgacactgctatgaaattaggagccggttaccccatgggcccatttgagcttctagattatgtcggactggatactacgaagttcatcgtggatgggtggcatgaaatggatgcagagaacccattacatcagcccagcccatccttaaataagctggtagcagagaacaagttcggcaagaagactggagaaggattttacaaatacaagtgatgtgcagcttctccggctctgagaagaacacctgagagcgctttccagccagtgccccgagtgcctgtgggaatgctctttggtcagacattccctcacacagtacagtttaataaatgtgcattttgattgtaa

SEQ ID NO: 295658 - DNA, 2029 bp, Homo sapiens
cgtgtatacccgctcaacgctgggacgttacagccagggccaatgggcagagcgggactcgaggccccgcccccgccttgtggcgtcacggggacgccgggggcgcgcgggctgcagggccgcgtaggtccccgcccccagagtctggctttccgcggctgcccgcctcgcgcgtcttccctgcccgggtctcctcgctgtcgccgccgctgccacaccatggccttcgtcaccaggcagttcatgcgttccgtgtcctcctcgtccaccgcctcggcctcggccaagaagataatcgtcaagcacgtgacggtcatcggcggcgggctgatgggcgccggcattgcccaggttgctgcagcaactggtcacacagtagtgttggtagaccagacagaggacatcctggcaaaatccaaaaagggaattgaggaaagccttaggaaagtggcaaagaagaagtttgcagaaaaccctaaggccggcgatgaatttgtggagaagaccctgagcaccatagcgaccagcacggatgcagcctccgttgtccacagcacagacttggtggtggaagccatcgtggagaatctgaaggtgaaaaacgagctcttcaaaaggctggacaagtttgctgctgaacatacaatctttgccagcaacacttcctccttgcagattacaagcatagctaatgccaccaccagacaagaccgattcgctggcctccatttcttcaacccagtgcctgtcatgaaacttgtggaggtcattaaaacaccaatgaccagccagaagacatttgaatctttggtagactttagcaaagccctaggaaagcatcctgtttcttgcaaggacactcctgggtttattgtgaaccgcctcctggttccatacctcatggaagcaatcaggctgtatgaacgagacttccaaacgtgtggtgattctaactcgggtttgggcttttctttaaaaggtgacgcatccaaagaagacattgacactgctatgaaattaggagccggttaccccatgggcccatttgagcttctagattatgtcggactggatactacgaagttcatcgtggatgggtggcatgaaatggatgcagagaacccattacatcagcccagcccatccttaaataagctggtagcagagaacaagttcggcaagaagactggagaaggattttacaaatacaagtgatgtgcagcttctccggctctgagaagaacacctgagagcgctttccagccagtgccccgagtgcctgtgggaatgctctttggtcagacattccctcacacagtacagtttaataaatgtgcattttgattgtaatctatcgaagtgattattacaccagttacagcagtaatagattctccattaagaaataattcccttttttagtctgttcatttctgtgtattttctaaacagctttacacccttggtgccttggagcaaacatgttttttgaaccttgtcatttttgtgaagaattgcctagattccttctctcatcaacgggaaagtacttcctctgagagtgcgagtgcaccatgctcactgttgctgcgtgggagagtcacaagccactggcaagcaagtggtatagtctgtgaagcactgcagcgagcagcacctggatcttgcctttataagaacattttactacctgcagctttgagtcttgccctacattttgggcatgacataagatgtgtctttattcagctcgtcgtgaagatgctgctgctgaatgggtcagcatatctctgtttgcatggtttgcaggaggtcggttttcatggtcattcagttccacagatctgaatgattactgtctgtctgtgtcttttttccatgagaaatcactgttgcaaattgcctataaattgactctactaaaataacaatgtttcagtctgaaaatttgaattgaaaaaaatgtataatataaaattgtaatacactcaaatgattataaaagtaaaagttggtaatttaggcagaa

SEQ ID NO: 295659 - DNA, 2231 bp, Homo sapiens
cgtgtatacccgctcaacgctgggacgttacagccagggccaatgggcagagcgggactcgaggccccgcccccgccttgtggcgtcacggggacgccgggggcgcgcgggctgcagggccgcgtaggtccccgcccccagagtctggctttccgcggctgcccgcctcgcgcgtcttccctgcccgggtctcctcgctgtcgccgccgctgccacaccatggccttcgtcaccaggcagttcatgcgttccgtgtcctcctcgtccaccgcctcggcctcggccaagaagataatcgtcaagcacgtgacggtcatcggcggcgggctgatgggcgccggcattgcccaggaaagaggttggcctcagcagcaatgagggataattctttcaagaaaggaatgaagagagaagttagatggaaaagagatttttaaggtcaaaagaagcagctgaagaacatgtgtaggacagccttaggagttactacacttcaagacctgggtgtctgctggaggaaggaacatgaccctgcggagatgttaagggttgggagagctgagcttggaggctggaagcccagctgggaggctatgttaaagaggttgctgcagcaactggtcacacagtagtgttggtagaccagacagaggacatcctggcaaaatccaaaaagggaattgaggaaagccttaggaaagtggcaaagaagaagtttgcagaaaaccctaaggccggcgatgaatttgtggagaagaccctgagcaccatagcgaccagcacggatgcagcctccgttgtccacagcacagacttggtggtggaagccatcgtggagaatctgaaggtgaaaaacgagctcttcaaaaggctggacaagtttgctgctgaacatacaatctttgccagcaacacttcctccttgcagattacaagcatagctaatgccaccaccagacaagaccgattcgctggcctccatttcttcaacccagtgcctgtcatgaaacttgtggaggtcattaaaacaccaatgaccagccagaagacatttgaatctttggtagactttagcaaagccctaggaaagcatcctgtttcttgcaaggacactcctgggtttattgtgaaccgcctcctggttccatacctcatggaagcaatcaggctgtatgaacgaggtgacgcatccaaagaagacattgacactgctatgaaattaggagccggttaccccatgggcccatttgagcttctagattatgtcggactggatactacgaagttcatcgtggatgggtggcatgaaatggatgcagagaacccattacatcagcccagcccatccttaaataagctggtagcagagaacaagttcggcaagaagactggagaaggattttacaaatacaagtgatgtgcagcttctccggctctgagaagaacacctgagagcgctttccagccagtgccccgagtgcctgtgggaatgctctttggtcagacattccctcacacagtacagtttaataaatgtgcattttgattgtaatctatcgaagtgattattacaccagttacagcagtaatagattctccattaagaaataattcccttttttagtctgttcatttctgtgtattttctaaacagctttacacccttggtgccttggagcaaacatgttttttgaaccttgtcatttttgtgaagaattgcctagattccttctctcatcaacgggaaagtacttcctctgagagtgcgagtgcaccatgctcactgttgctgcgtgggagagtcacaagccactggcaagcaagtggtatagtctgtgaagcactgcagcgagcagcacctggatcttgcctttataagaacattttactacctgcagctttgagtcttgccctacattttgggcatgacataagatgtgtctttattcagctcgtcgtgaagatgctgctgctgaatgggtcagcatatctctgtttgcatggtttgcaggaggtcggttttcatggtcattcagttccacagatctgaatgattactgtctgtctgtgtcttttttccatgagaaatcactgttgcaaattgcctataaattgactctactaaaataacaatgtttcagtctgaaaatttgaattgaaaaaaatgtataatataaaattgtaatacactcaaatgattataaaagtaaaagttggtaatttaggcagaa

SEQ ID NO: 295660 - DNA, 2441 bp, Homo sapiens
cgtgtatacccgctcaacgctgggacgttacagccagggccaatgggcagagcgggactcgaggccccgcccccgccttgtggcgtcacggggacgccgggggcgcgcgggctgcagggccgcgtaggtccccgcccccagagtctggctttccgcggctgcccgcctcgcgcgtcttccctgcccgggtctcctcgctgtcgccgccgctgccacaccatggccttcgtcaccaggcagttcatgcgttccgtgtcctcctcgtccaccgcctcggcctcggccaagaagataatcgtcaagcacgtgacggtcatcggcggcgggctgatgggcgccggcattgcccaggttgctgcagcaactggtcacacagtagtgttggtagaccagacagaggacatcctggcaaaatccaaaaagggaattgaggaaagccttaggaaagtggcaaagaagaagtttgcagaaaaccctaaggccggcgatgaatttgtggagaagaccctgagcaccatagcgaccagcacggatgcagcctccgttgtccacagcacagacttggtggtggaagccatcgtggagaatctgaaggtgaaaaacgagctcttcaaaaggctggacaagtttgctgctgaacatacaatctttgccagcaacacttcctccttgcagattacaagcatagctaatgccaccaccagacaagaccgattcgctggcctccatttcttcaacccagtgcctgtcatgaaacttgtggaggtcattaaaacaccaatgaccagccagaagacatttgaatctttggtagactttagcaaagccctaggaaagcatcctgtttcttgcaaggacactcctgggtttattgtgaaccgcctcctggttccatacctcatggaagcaatcaggctgtatgaacgaggtgacgcatccaaagaagacattgacactgctatgaaattaggagccggttaccccatgggcccatttgagcttctagattatgtcggactggatactacgaagttcatcgtggatgggtggcatgaaatggatgcagagaacccattacatcagcccagcccatccttaaataagctggtagcagagaacaagttcggcaagaagactggagaaggattttacaaatacaagtgatgtgcagcttctccggctctgagaagaacacctgagagcgctttccagccagtgccccgagtgcctgtgggaatgctctttggtcagacattccctcacacagtacagtttaataaatgtgcattttgattgtaaaaaaaaaaaaaaaaaaaaaaaaaaaaaaaaaaaagggggggccccccaaaatatttcccccggggggccccaatttcgccgtatccccaagtttttgtggttccaaagggtgccccatttaagagggagcgcatatatataaacgcatagggcactgggcccgccggtttaacaaacgcgctgcacacggggaacaacctgggataccctgggacacccttgggagaagggacccattatatcccgggggggggacacaatatatttggcggaacaaactctcccatcacaagaagatttaaaagaggcctcaagggggcaacattaatcaaccaattttcaacagggggttatcacacagggcggtgtaaacccacaccggtggccaatagtgacgcgacgggcctgagaacaagtttggcgacacaacaggagactattgcattgttgtgagaccaatcttttttaatcccgcgagggaccctggtgttcaacaaaaacacagatacggagacagagagaagacgatggatgacgacgagaggaaagacagcagagaagaacataccaacggacagagcagaagaagaagacaaaaggtaaaagaaatacaagagaaagacgtcagacaggggagatagcatacagagaagaagtgagcagaacgaaagagacacagcgaagagcacaacacaagagaagaatcgagcaagtaaccaggaggagatgagagagcaaaggaagagggagcccaacgcagcagaaaagaacgacacgaagagcagacagtgaaggaagagacagagagagagggaaagacaagagaaggaggcagaggagcggcgagagagaacaagaatgacgaaagaatggacggaaaaatcgtaagcggaactagaagggaagaaaagagagtaagagaaagagagaagtacgaggatagagagagcgaggcgagcgaggagaatgagaagagtacaacgaagaaataaaacaaggaggagtagaagaagaacgaccagcagctgtaagggaaggaaagacaggaagaaagaccgaacaaagcaagagcaagcggaggggtagcaagacgcaacgaaaggaacagggactgacagacgagacaagagctagggaagaag

SEQ ID NO: 295661 - DNA, 1917 bp, Homo sapiens
cgtgtatacccgctcaacgctgggacgttacagccagggccaatgggcagagcgggactcgaggccccgcccccgccttgtggcgtcacggggacgccgggggcgcgcgggctgcagggccgcgtaggtccccgcccccagagtctggctttccgcggctgcccgcctcgcgcgtcttccctgcccgggtctcctcgctgtcgccgccgctgccacaccatggccttcgtcaccaggcagttcatgcgttccgtgtcctcctcgtccaccgcctcggcctcggccaagaagataatcgtcaagcacgtgacggtcatcggcggcgggctgatgggcgccggcattgcccaggttgctgcagcaactggtcacacagtagtgttggtagaccagacagaggacatcctggcaaaatccaaaaagggaattgaggaaagccttaggaaagtggcaaagaagaagtttgcagaaaaccctaaggccggcgatgaatttgtggagaagaccctgagcaccatagcgaccagcacggatgcagcctccgttgtccacagcacagacttggtggtggaagccatcgtggagaatctgaaggtgaaaaacgagctcttcaaaaggctggacaagtttgctgctgaacatacaatctttgccagcaacacttcctccttgcagattacaagcatagctaatgccaccaccagacaagaccgattcgctggcctccatttcttcaacccagtgcctgtcatgaaacttgtggagccctaggaaagcatcctgtttcttgcaaggacactcctgggtttattgtgaaccgcctcctggttccatacctcatggaagcaatcaggctgtatgaacgaggtgacgcatccaaagaagacattgacactgctatgaaattaggagccggttaccccatgggcccatttgagcttctagattatgtcggactggatactacgaagttcatcgtggatgggtggcatgaaatggatgcagagaacccattacatcagcccagcccatccttaaataagctggtagcagagaacaagttcggcaagaagactggagaaggattttacaaatacaagtgatgtgcagcttctccggctctgagaagaacacctgagagcgctttccagccagtgccccgagtgcctgtgggaatgctctttggtcagacattccctcacacagtacagtttaataaatgtgcattttgattgtaatctatcgaagtgattattacaccagttacagcagtaatagattctccattaagaaataattcccttttttagtctgttcatttctgtgtattttctaaacagctttacacccttggtgccttggagcaaacatgttttttgaaccttgtcatttttgtgaagaattgcctagattccttctctcatcaacgggaaagtacttcctctgagagtgcgagtgcaccatgctcactgttgctgcgtgggagagtcacaagccactggcaagcaagtggtatagtctgtgaagcactgcagcgagcagcacctggatcttgcctttataagaacattttactacctgcagctttgagtcttgccctacattttgggcatgacataagatgtgtctttattcagctcgtcgtgaagatgctgctgctgaatgggtcagcatatctctgtttgcatggtttgcaggaggtcggttttcatggtcattcagttccacagatctgaatgattactgtctgtctgtgtcttttttccatgagaaatcactgttgcaaattgcctataaattgactctactaaaataacaatgtttcagtctgaaaatttgaattgaaaaaaatgtataatataaaattgtaatacactcaaatgattataaaagtaaaagttggtaatttaggcagaa

SEQ ID NO: 295662 - DNA, 1535 bp, Homo sapiens
gaaaatcttgggccacacactgtggcttacacctgtaatcttagcactttgggaagctgagacgggaggatcacttgaggttgggagtttgagcccagactggccaaatggtgaaaccctatctctactaaaaatataaatattagccttgtgtgggggcgcacacgtgtagtctcagccactagggaggctgaggcaggagaatcacttgaacccaggaggcggaggttgcagcgagccaagatcgtgccattgcacttcagcttgggtgacagagcaagactctgtctcaaaaaaaacaaagtcttatgacctctttggcatgtactttagagaggaaatcttacccaagccagaaagtctcagtctaggcattttttttattgtgcaagcatataaaattctagtaattctggggctaatcctgtgatagggagaattcaaggaaaggtggtggtgacccagtgctgccgttttctccttaggtgacgcatccaaagaagacattgacactgctatgaaattaggagccggttaccccatgggcccatttgagcttctagattatgtcggactggatactacgaagttcatcgtggatgggtggcatgaaatggatgcagagaacccattacatcagcccagcccatccttaaataagctggtagcagagaacaagttcggcaagaagactggagaaggattttacaaatacaagtgatgtgcagcttctccggctctgagaagaacacctgagagcgctttccagccagtgccccgagtgcctgtgggaatgctctttggtcagacattccctcacacagtacagtttaataaatgtgcattttgattgtaatctatcgaagtgattattacaccagttacagcagtaatagattctccattaagaaataattcccttttttagtctgttcatttctgtgtattttctaaacagctttacacccttggtgccttggagcaaacatgttttttgaaccttgtcatttttgtgaagaattgcctagattccttctctcatcaacgggaaagtacttcctctgagagtgcgagtgcaccatgctcactgttgctgcgtgggagagtcacaagccactggcaagcaagtggtatagtctgtgaagcactgcagcgagcagcacctggatcttgcctttataagaacattttactacctgcagctttgagtcttgccctacattttgggcatgacataagatgtgtctttattcagctcgtcgtgaagatgctgctgctgaatgggtcagcatatctctgtttgcatggtttgcaggaggtcggttttcatggtcattcagttccacagatctgaatgattactgtctgtctgtgtcttttttccatgagaaatcactgttgcaaattgcctataaattgactctactaaaataacaatgtttcagtctgaaaatttgaattgaaaaaaatgtataatataaaattgtaatacactcaaatgattataaaagtaaaagttggtaatttaggcagaa

SEQ ID NO: 295663 - DNA, 1142 bp, Homo sapiens
gctgcaggaattggcacgaggtctcagtctaggcattttttttattgtgcaagcatagtggtggtgacccagtgctgccgttttctccttaggtgacgcatccaaagaagacattgacactgctatgaaattaggagccggttaccccatgggcccatttgagcttctagattatgtcggactggatactacgaagttcatcgtggatgggtggcatgaaatggatgcagagaacccattacatcagcccagcccatccttaaataagctggtagcagagaacaagttcggcaagaagactggagaaggattttacaaatacaagtgatgtgcagcttctccggctctgagaagaacacctgagagcgctttccagccagtgccccgagtgcctgtgggaatgctctttggtcagacattccctcacacagtacagtttaataaatgtgcattttgattgtaatctatcgaagtgattattacaccagttacagcagtaatagattctccattaagaaataattcccttttttagtctgttcatttctgtgtattttctaaacagctttacacccttggtgccttggagcaaacatgttttttgaaccttgtcatttttgtgaagaattgcctagattccttctctcatcaacgggaaagtacttcctctgagagtgcgagtgcaccatgctcactgttgctgcgtgggagagtcacaagccactggcaagcaagtggtatagtctgtgaagcactgcagcgagcagcacctggatcttgcctttataagaacattttactacctgcagctttgagtcttgccctacattttgggcatgacataagatgtgtctttattcagctcgtcgtgaagatgctgctgctgaatgggtcagcatatctctgtttgcatggtttgcaggaggtcggttttcatggtcattcagttccacagatctgaatgattactgtctgtctgtgtcttttttccatgagaaatcactgttgcaaattgcctataaattgactctactaaaataacaatgtttcagtctgaaaatttgaattgaaaaaaatgtataatataaaattgtaatacactcaaatgattataaaagtaaaagttggtaatttaggcagaa

SEQ ID NO: 295664 - DNA, 1360 bp, Homo sapiens
aaaaatatatcttctttatcgatgtttaagtagtttctctctgagtgtcttaacatttttccctctttagctttgatctgattgacttcttaatgctttggaacaaaattctagatagccacctgttgcagactattctacttttctgatttcaaagaaagggaacagattgttctccataaaggcctcttggggccaaaggacatagtaaatttccaagggaaaagcacattgatccttgtcgtagtctactcaacagacttccaaacgtgtggtgattctaactcgggtttgggcttttctttaaaaggtgacgcatccaaagaagacattgacactgctatgaaattaggagccggttaccccatgggcccatttgagcttctagattatgtcggactggatactacgaagttcatcgtggatgggtggcatgaaatggatgcagagaacccattacatcagcccagcccatccttaaataagctggtagcagagaacaagttcggcaagaagactggagaaggattttacaaatacaagtgatgtgcagcttctccggctctgagaagaacacctgagagcgctttccagccagtgccccgagtgcctgtgggaatgctctttggtcagacattccctcacacagtacagtttaataaatgtgcattttgattgtaatctatcgaagtgattattacaccagttacagcagtaatagattctccattaagaaataattcccttttttagtctgttcatttctgtgtattttctaaacagctttacacccttggtgccttggagcaaacatgttttttgaaccttgtcatttttgtgaagaattgcctagattccttctctcatcaacgggaaagtacttcctctgagagtgcgagtgcaccatgctcactgttgctgcgtgggagagtcacaagccactggcaagcaagtggtatagtctgtgaagcactgcagcgagcagcacctggatcttgcctttataagaacattttactacctgcagctttgagtcttgccctacattttgggcatgacataagatgtgtctttattcagctcgtcgtgaagatgctgctgctgaatgggtcagcatatctctgtttgcatggtttgcaggaggtcggttttcatggtcattcagttccacagatctgaatgattactgtctgtctgtgtcttttttccatgagaaatcactgttgcaaattgcctataaattgactctactaaaataacaatgtttcagtctgaaaatttgaattgaaaaaaatgtataatataaaattgtaatacactcaaatgattataaaagtaaaagttggtaatttaggcagaa

SEQ ID NO: 295665 - DNA, 1608 bp, Homo sapiens
cgtgtatacccgctcaacgctgggacgttacagccagggccaatgggcagagcgggactcgaggccccgcccccgccttgtggcgtcacggggacgccgggggcgcgcgggctgcagggccgcgtaggtccccgcccccagagtctggctttccgcggctgcccgcctcgcgcgtcttccctgcccgggtctcctcgctgtcgccgccgctgccacaccatggccttcgtcaccaggcagttcatgcgttccgtgtcctcctcgtccaccgcctcggcctcggccaagaagataatcgtcaagcacgtgacggtcatcggcggcgggctgatgggcgccggcattgcccaggttgctgcagcaactggtcacacagtagtgttggtagaccagacagaggacatcctggcaaaatccaaaaagggaattgaggaaagccttaggaaagtggcaaagaagaagtttgcagaaaaccctaaggccggcgatgaatttgtggagaagaccctgagcaccatagcgaccagcacggatgcagcctccgttgtccacagcacagacttggtggtggaagccatcgtggagaatctgaaggtgaaaaacgagctcttcaaaaggctggacaagtttgctgctgaacatacaatctttgccagcaacacttcctccttgcagattacaagcatagctaatgccaccaccagacaagaccgattcgctggcctccatttcttcaacccagtgcctgtcatgaaacttgtggaggtcattaaaacaccaatgaccagccagaagacatttgaatctttggtagactttagcaaagccctaggaaagcatcctgtttcttgcaaggacactcctgggtttattgtgaaccgcctcctggttccatacctcatggaagcaatcaggctgtatgaacgaggtatccttctgacccaggccaggagcagcagacctcagctcctggcgccactgtctggaattctcagtgtctctaggaggggtcgggccgtgcacaatggaggaagcagtgtctgttttctagctttgtgagctcagctgcaccctgagccctggtacctttttcactgttttcccagggcctcctggcttccctgtgggcctctgagaaaggtttctggaactcccaccacccccactacagtcccagccagagcaattgcatggccggcccagattgatatcctggatctctgcttttgattaaaaggtgacgcatccaaagaagacattgacactgctatgaaattaggagccggttaccccatgggcccatttgagcttctagattatgtcggactggatactacgaagttcatcgtggatgggtggcatgaaatggatgcagagaacccattacatcagcccagcccatccttaaataagctggtagcagagaacaagttcggcaagaagactggagaaggattttacaaatacaagtgatgtgcagcttctccggctctgagaagaacacctgagagcgctttccagccagtgccccgagtgcctgtgggaatgctctttggtcagacattccctcacacagtacagtttaataaatgtgcattttgattgtaa

SEQ ID NO: 295666 - DNA, 1144 bp, Homo sapiens
  misc_feature (931)..(931): n is a, c, g, or t
  misc_feature (973)..(973): n is a, c, g, or t
  misc_feature (983)..(983): n is a, c, g, or t
  misc_feature (986)..(986): n is a, c, g, or t
  misc_feature (990)..(990): n is a, c, g, or t
cgtgtatacccgctcaacgctgggacgttacagccagggccaatgggcagagcgggactcgaggccccgcccccgccttgtggcgtcacggggacgccgggggcgcgcgggctgcagggccgcgtaggtccccgcccccagagtctggctttccgcggctgcccgcctcgcgcgtcttccctgcccgggtctcctcgctgtcgccgccgctgccacaccatggccttcgtcaccaggcagttcatgcgttccgtgtcctcctcgtccaccgcctcggcctcggccaagaagataatcgtcaagcacgtgacggtcatcggcggcgggctgatgggcgccggcattgcccaggttgctgcagcaactggtcacacagtagtgttggtagaccagacagaggacatcctggcaaaatccaaaaagggaattgaggaaagccttaggaaagtggcaaagaagaagtttgcagaaaaccctaaggccggcgatgaatttgtggagaagaccctgagcaccatagcgaccagcacggatgcagcctccgttgtccacagcacagacttggtggtggaagccatcgtggagaatctgaaggtgaaaaacgagctcttcaaaaggctggacaagtttgctgctgaacatacaatctttgccagcaacacttcctccttgcagattacaagcatagctaatgccaccaccagacaagaccgattcgctggcctccatttcttcaacccagtgcctgtcatgaaacttgtggaggtcattaaaacaccaatgaccagccagaagacatttgaatctttggtagactttagcaaagccctaggaaagcatcctgtttcttgcaaggacactcctgggtttattgtgaaccgcctcctggttccatacctcatggaagcaatcaggctgtatgaacgaggcntccaagaagaaattgcctgtttgaatagagccggtaccccangggcccttgnggntttnaatattttggcgggaaaccacacacactcggggggggagaaggagtggaaccatatatgccgcccttataatgtggggaagtgggacaggagggtaaacaatgggttcggggaaaaaggacaacacgcgggtgcctcccccattgaaaaggacc

SEQ ID NO: 295667 - DNA, 1350 bp, Homo sapiens
cgtgtatacccgctcaacgctgggacgttacagccagggccaatgggcagagcgggactcgaggccccgcccccgccttgtggcgtcacggggacgccgggggcgcgcgggctgcagggccgcgtaggtccccgcccccagagtctggctttccgcggctgcccgcctcgcgcgtcttccctgcccgggtctcctcgctgtcgccgccgctgccacaccatggccttcgtcaccaggcagttcatgcgttccgtgtcctcctcgtccaccgcctcggcctcggccaagaagataatcgtcaagcacgtgacggtcatcggcggcgggctgatgggcgccggcattgcccaggttgctgcagcaactggtcacacagtagtgttggtagaccagacagaggacatcctggcaaaatccaaaaagggaattgaggaaagccttaggaaagtggcaaagaagaagtttgcagaaaaccctaaggccggcgatgaatttgtggagaagaccctgagcaccatagcgaccagcacggatgcagcctccgttgtccacagcacagacttggtggtggaagccatcgtggagaatctgaaggtgaaaaacgagctcttcaaaaggctggacaagtttgctgctgaacatacaatctttgccagcaacacttcctccttgcagattacaagcatagctaatgccaccaccagacaagaccgattcgctggcctccatttcttcaacccagtgcctgtcatgaaacttgtggaggtcattaaaacaccaatgaccagccagaagacatttgaatctttggtagactttagcaaagccctaggaaagcatcctgtttcttgcaaggacactcctgggtttattgtgaaccgcctcctggttccatacctcatggaagcaatcaggctgtatgaacgagacttccaaacgtgtggtgattctaactcgggtttgggcttttctttaaaaggtgacgcatccaaagaagacattgacactgctatgaaattaggagccggttaccccatgggcccatttgagcttctagattatgtcggactggatactacgaagttcatcgtggatgggtggcatgaaatggatgcagagaacccattacatcagcccagcccatccttaaataagctggtagcagagaacaagttcggcaagaagactggagaaggattttacaaatacaagtgatgtgcagcttctccggctctgagaagaacacctgagagcgctttccagccagtgccccgagtgcctgtgggaatgctctttggtcagacattccctcacacagtacagtttaataaatgtgcattttgattgtaa

SEQ ID NO: 295668 - DNA, 801 bp, Homo sapiens
ggccgggggcgaaggcgagggtcgggcggcggccaggggcagacactggccattctggctgcctcacagctatcctgccttaattcatatttgattgcctggacagaaccacctagaatgtccagacgactgccacccctcagccatgggcctgagatcctgccctgacccctttcttcagaccccaggaggacccacaatctccctgatccccaccttccccaaagtagtctctaggaaaaaagcagagctggctaaggcctgagacagagccatttcttccccttgggcaaacgaggtagaccctcccagagaccaatgccggagaggcccggatccgagctccctttatatggcctcccccatcacggatcccgtgggaaaacctgacacacaatggcgcggctgctccgggcaccctcaacccagcgccctgcggcaaggcctggagcagcctggtggtcttggtgcgctccctttgccctccccgcaaccctctgcgagcactcgtcccaggagagagaccctggctagggtggaggttgcctcccgcaaagggcgctgttgctggggcctcccctcccccattctcttgtttttctgcttctgagactcgggagggaggcggcaggcgcctccgcagccgatagagcagctattgtgaccttcccttgcagagcgggaacccagccgagtgtgtaccgccggcggtggcgggggaggaggcgactgtgtgtgcaaacctcagtcggagagggggtggcgctgggaaataaaggtttgcaacctcaaacagttggg

SEQ ID NO: 295669 - DNA, 2240 bp, Homo sapiens
acgtttgtgccgcgcgcccgccagaccgcccaggaggcggcggctattgttccccgcaggggcccggggcgccctgaaacagggtccacgtcagcccgctcccgagcgtgtcctcaggtctaaggacgggtggggcttcctttgtgtgttctctggaaggggctgggatggcgtcgttgctgccccaaggggtaaccgagggggattgagggaagatggtaccagcgccctagagctcagctcaccagacctactcttccgctcgacccttgcagaggaggtggggacggatatggtatttgtagggcagcgctgtgaacaatggagccatcaaaaaggccttctcccagcctcctcaccaaccacggacattcctggcccaacaagacctcctggccaggttttgagccctgcttcccagatctggggacccttcacctgcctctactactgcaaatgattggatattcgtctgacttggctcttccctaatgtgtggaactaattttgttcactctgtttcatgctggacctggcctgaaaatgggcccttatattgtctttgcactttccaacttgccaagtttctgaaagaaggaccaaagtaatgccaagaactcccagatgaagaggaccttccttagacctataacagattcactacttgacttcagagggaagtttcagctaattctcaggaaaaggtcaaaacaggcctgtgactgtcccttgaatactgaaggtataaacaagcttctggctcctccaggtcaagcagaggaacacttttattagaatgaagggttacttctttgttattcaaacacacacccacacacatcctctgtagtctccctaatgaaaaacctcaacagatggagagcctgagctcccaagtccgcaggctgagaagatgcacttcactcaagggccagtgggctggtacagactagggaagagaaaagggacaaaggctgctagtataggtaatcactatcttttaatactcctaacacatagaaattcgaaaaatcttgttcagcaatgttagcagcctgtgagcctcggaaactaatttggctgatgtgtctctgatagggagcttggggctgcaccaaggggaaacattctcctcctgtattctctcctctctctcgtttgaaagcctgtacaaagaaatggtacaaatggatggttaacttaatgattccatcagaggcagatttttctctgtcaggtccctggataaggtggaggtctgaaagccaggagacagaatatgtacttaatcgccctttctgacctgcttaccagtgaccaggactactctccaggcctttcttctgccacttccccattcttcctggctagttcagttgggtctcagcacttcaactcctggctggatcctgagtttttcttggttgcagggaaagctctcactgtctgcatctccttccccacccccacctcccgttttgcagctggccattctggctgcctcacagctatcctgccttaattcatatttgattgcctggacagaaccacctagaatgtccagacgactgccacccctcagccatgggcctgagatcctgccctgacccctttcttcagaccccaggaggacccacaatctccctgatccccaccttccccaaagtagtctctaggaaaaaagcagagctggctaaggcctgagacagagccatttcttccccttgggcaaacgaggtagaccctcccagagaccaatgccggagaggcccggatccgagctccctttatatggcctcccccatcacggatcccgtgggaaaacctgacacacaatggcgcggctgctccgggcaccctcaacccagcgccctgcggcaaggcctggagcagcctggtggtcttggtgcgctccctttgccctccccgcaaccctctgcgagcactcgtcccaggagagagaccctggctagggtggaggttgcctcccgcaaagggcgctgttgctggggcctcccctcccccattctcttgtttttctgcttctgagactcgggagggaggcggcaggcgcctccgcagccgatagagcagctattgtgaccttcccttgcagagcgggaacccagccgagtgtgtaccgccggcggtggcgggggaggaggcgactgtgtgtgcaaacctcagtcggagagggggtggcgctgggaaataaaggtttgcaacctcaaacagttggg

SEQ ID NO: 295670 - DNA, 1924 bp, Homo sapiens
gcagggccgccgcccagcgcccccgagccccgaggagagccgtcgcgaccgggggctgcctgggcaagggcggggcgagagggcagaacgcctgctctcggacagatctggggacccttcacctgcctctactactgcaaatgattggatattcgtctgacttggctcttccctaatgtgtggaactaattttgttcactctgtttcatgctggacctggcctgaaaatgggcccttatattgtctttgcactttccaacttgccaagtttctgaaagaaggaccaaagtaatgccaagaactcccagatgaagaggaccttccttagacctataacagattcactacttgacttcagagggaagtttcagctaattctcaggaaaaggtcaaaacaggcctgtgactgtcccttgaatactgaaggtataaacaagcttctggctcctccaggtcaagcagaggaacacttttattagaatgaagggttacttctttgttattcaaacacacacccacacacatcctctgtagtctccctaatgaaaaacctcaacagatggagagcctgagctcccaagtccgcaggctgagaagatgcacttcactcaagggccagtgggctggtacagactagggaagagaaaagggacaaaggctgctagtataggtaatcactatcttttaatactcctaacacatagaaattcgaaaaatcttgttcagcaatgttagcagcctgtgagcctcggaaactaatttggctgatgtgtctctgatagggagcttggggctgcaccaaggggaaacattctcctcctgtattctctcctctctctcgtttgaaagcctgtacaaagaaatggtacaaatggatggttaacttaatgattccatcagaggcagatttttctctgtcaggtccctggataaggtggaggtctgaaagccaggagacagaatatgtacttaatcgccctttctgacctgcttaccagtgaccaggactactctccaggcctttcttctgccacttccccattcttcctggctagttcagttgggtctcagcacttcaactcctggctggatcctgagtttttcttggttgcagggaaagctctcactgtctgcatctccttccccacccccacctcccgttttgcagctggccattctggctgcctcacagctatcctgccttaattcatatttgattgcctggacagaaccacctagaatgtccagacgactgccacccctcagccatgggcctgagatcctgccctgacccctttcttcagaccccaggaggacccacaatctccctgatccccaccttccccaaagtagtctctaggaaaaaagcagagctggctaaggcctgagacagagccatttcttccccttgggcaaacgaggtagaccctcccagagaccaatgccggagaggcccggatccgagctccctttatatggcctcccccatcacggatcccgtgggaaaacctgacacacaatggcgcggctgctccgggcaccctcaacccagcgccctgcggcaaggcctggagcagcctggtggtcttggtgcgctccctttgccctccccgcaaccctctgcgagcactcgtcccaggagagagaccctggctagggtggaggttgcctcccgcaaagggcgctgttgctggggcctcccctcccccattctcttgtttttctgcttctgagactcgggagggaggcggcaggcgcctccgcagccgatagagcagctattgtgaccttcccttgcagagcgggaacccagccgagtgtgtaccgccggcggtggcgggggaggaggcgactgtgtgtgcaaacctcagtcggagagggggtggcgctgggaaataaaggtttgcaacctcaaacagttggg

SEQ ID NO: 295671 - DNA, 1802 bp, Homo sapiens
acgtttgtgccgcgcgcccgccagaccgcccaggaggcggcggctattgttccccgcaggggcccggggcgccctgaaacagggtccacgtcagcccgctcccgagcgtgtcctcaggtctaaggacgggtggggcttcctttgtgtgttctctggaaggggctgggatggcgtcgttgctgccccaaggggtaaccgagggggattgagggaagatggtaccagcgccctagagctcagctcaccagacctactcttccgctcgacccttgcagaggaggtggggacggatatggtatttgtagggcagcgctgtgaacaatggagccatcaaaaaggccttctcccagcctcctcaccaaccacggacattcctggcccaacaagacctcctggccaggttttgagccctgcttcccagatctggggacccttcacctgcctctactactgcaaatgattggatattcgtctgacttggctcttccctaatgtgtggaactaattttgttcactctgtttcatgctggacctggcctgaaaatgggcccttatattgtctttgcactttccaacttgccaagtttctgaaagaaggaccaaagtaatgccaagaactcccagatgaagaggaccttccttagacctataacagattcactacttgacttcagagggaagtttcagctaattctcaggaaaaggtcaaaacaggcctgtgactgtcccttgaatactgaaggtataaacaagcttctggctcctccaggtcaagcagaggaacacttttattagaatgaagggttacttctttgttattcaaacacacacccacacacatcctctgtagtctccctaatgaaaaacctcaacagatggagagcctgagctcccaagtccgcaggctgagaagatgcacttcactcaagggccagtgggctggtacagactagggaagagaaaagggacaaaggctgctagtataggtaatcactatcttttaatactcctaacacatagaaattcgaaaaatcttgttcagcaatgttagcagcctgtgagcctcggaaactaatttggctgatgtgtctctgatagggagcttggggctgcaccaaggggaaacattctcctcctgtattctctcctctctctcgtttgaaagcctgtacaaagaaatggtacaaatggatggttaacttaatgattccatcagaggcagatttttctctgtcaggtccctggataaggtggaggtctgaaagccaggagacagaatatgtacttaatcgccctttctgacctgcttaccaagaccaatgccggagaggcccggatccgagctccctttatatggcctcccccatcacggatcccgtgggaaaacctgacacacaatggcgcggctgctccgggcaccctcaacccagcgccctgcggcaaggcctggagcagcctggtggtcttggtgcgctccctttgccctccccgcaaccctctgcgagcactcgtcccaggagagagaccctggctagggtggaggttgcctcccgcaaagggcgctgttgctggggcctcccctcccccattctcttgtttttctgcttctgagactcgggagggaggcggcaggcgcctccgcagccgatagagcagctattgtgaccttcccttgcagagcgggaacccagccgagtgtgtaccgccggcggtggcgggggaggaggcgactgtgtgtgcaaacctcagtcggagagggggtggcgctgggaaataaaggtttgcaacctcaaacagttggg

SEQ ID NO: 295672 - DNA, 2156 bp, Homo sapiens
acgtttgtgccgcgcgcccgccagaccgcccaggaggcggcggctattgttccccgcaggggcccggggcgccctgaaacagggtccacgtcagcccgctcccgagcgtgtcctcaggtctaaggacgggtggggcttcctttgtgtgttctctggaaggggctgggatggcgtcgttgctgccccaagggaggaggtggggacggatatggtatttgtagggcagcgctgtgaacaatggagccatcaaaaaggccttctcccagcctcctcaccaaccacggacattcctggcccaacaagacctcctggccaggttttgagccctgcttcccagatctggggacccttcacctgcctctactactgcaaatgattggatattcgtctgacttggctcttccctaatgtgtggaactaattttgttcactctgtttcatgctggacctggcctgaaaatgggcccttatattgtctttgcactttccaacttgccaagtttctgaaagaaggaccaaagtaatgccaagaactcccagatgaagaggaccttccttagacctataacagattcactacttgacttcagagggaagtttcagctaattctcaggaaaaggtcaaaacaggcctgtgactgtcccttgaatactgaaggtataaacaagcttctggctcctccaggtcaagcagaggaacacttttattagaatgaagggttacttctttgttattcaaacacacacccacacacatcctctgtagtctccctaatgaaaaacctcaacagatggagagcctgagctcccaagtccgcaggctgagaagatgcacttcactcaagggccagtgggctggtacagactagggaagagaaaagggacaaaggctgctagtataggtaatcactatcttttaatactcctaacacatagaaattcgaaaaatcttgttcagcaatgttagcagcctgtgagcctcggaaactaatttggctgatgtgtctctgatagggagcttggggctgcaccaaggggaaacattctcctcctgtattctctcctctctctcgtttgaaagcctgtacaaagaaatggtacaaatggatggttaacttaatgattccatcagaggcagatttttctctgtcaggtccctggataaggtggaggtctgaaagccaggagacagaatatgtacttaatcgccctttctgacctgcttaccagtgaccaggactactctccaggcctttcttctgccacttccccattcttcctggctagttcagttgggtctcagcacttcaactcctggctggatcctgagtttttcttggttgcagggaaagctctcactgtctgcatctccttccccacccccacctcccgttttgcagctggccattctggctgcctcacagctatcctgccttaattcatatttgattgcctggacagaaccacctagaatgtccagacgactgccacccctcagccatgggcctgagatcctgccctgacccctttcttcagaccccaggaggacccacaatctccctgatccccaccttccccaaagtagtctctaggaaaaaagcagagctggctaaggcctgagacagagccatttcttccccttgggcaaacgaggtagaccctcccagagaccaatgccggagaggcccggatccgagctccctttatatggcctcccccatcacggatcccgtgggaaaacctgacacacaatggcgcggctgctccgggcaccctcaacccagcgccctgcggcaaggcctggagcagcctggtggtcttggtgcgctccctttgccctccccgcaaccctctgcgagcactcgtcccaggagagagaccctggctagggtggaggttgcctcccgcaaagggcgctgttgctggggcctcccctcccccattctcttgtttttctgcttctgagactcgggagggaggcggcaggcgcctccgcagccgatagagcagctattgtgaccttcccttgcagagcgggaacccagccgagtgtgtaccgccggcggtggcgggggaggaggcgactgtgtgtgcaaacctcagtcggagagggggtggcgctgggaaataaaggtttgcaacctcaaacagttggg

SEQ ID NO: 295673 - DNA, 1967 bp, Homo sapiens
atactggagtgtttcctccacactggaaagagggcagcgctgtgaacaatggagccatcaaaaaggccttctcccagcctcctcaccaaccacggacattcctggcccaacaagacctcctggccaggttttgagccctgcttcccagatctggggacccttcacctgcctctactactgcaaatgattggatattcgtctgacttggctcttccctaatgtgtggaactaattttgttcactctgtttcatgctggacctggcctgaaaatgggcccttatattgtctttgcactttccaacttgccaagtttctgaaagaaggaccaaagtaatgccaagaactcccagatgaagaggaccttccttagacctataacagattcactacttgacttcagagggaagtttcagctaattctcaggaaaaggtcaaaacaggcctgtgactgtcccttgaatactgaaggtataaacaagcttctggctcctccaggtcaagcagaggaacacttttattagaatgaagggttacttctttgttattcaaacacacacccacacacatcctctgtagtctccctaatgaaaaacctcaacagatggagagcctgagctcccaagtccgcaggctgagaagatgcacttcactcaagggccagtgggctggtacagactagggaagagaaaagggacaaaggctgctagtataggtaatcactatcttttaatactcctaacacatagaaattcgaaaaatcttgttcagcaatgttagcagcctgtgagcctcggaaactaatttggctgatgtgtctctgatagggagcttggggctgcaccaaggggaaacattctcctcctgtattctctcctctctctcgtttgaaagcctgtacaaagaaatggtacaaatggatggttaacttaatgattccatcagaggcagatttttctctgtcaggtccctggataaggtggaggtctgaaagccaggagacagaatatgtacttaatcgccctttctgacctgcttaccagtgaccaggactactctccaggcctttcttctgccacttccccattcttcctggctagttcagttgggtctcagcacttcaactcctggctggatcctgagtttttcttggttgcagggaaagctctcactgtctgcatctccttccccacccccacctcccgttttgcagctggccattctggctgcctcacagctatcctgccttaattcatatttgattgcctggacagaaccacctagaatgtccagacgactgccacccctcagccatgggcctgagatcctgccctgacccctttcttcagaccccaggaggacccacaatctccctgatccccaccttccccaaagtagtctctaggaaaaaagcagagctggctaaggcctgagacagagccatttcttccccttgggcaaacgaggtagaccctcccagagaccaatgccggagaggcccggatccgagctccctttatatggcctcccccatcacggatcccgtgggaaaacctgacacacaatggcgcggctgctccgggcaccctcaacccagcgccctgcggcaaggcctggagcagcctggtggtcttggtgcgctccctttgccctccccgcaaccctctgcgagcactcgtcccaggagagagaccctggctagggtggaggttgcctcccgcaaagggcgctgttgctggggcctcccctcccccattctcttgtttttctgcttctgagactcgggagggaggcggcaggcgcctccgcagccgatagagcagctattgtgaccttcccttgcagagcgggaacccagccgagtgtgtaccgccggcggtggcgggggaggaggcgactgtgtgtgcaaacctcagtcggagagggggtggcgctgggaaataaaggtttgcaacctcaaacagttggg

SEQ ID NO: 295674 - DNA, 2077 bp, Homo sapiens
acgtttgtgccgcgcgcccgccagaccgcccaggaggcggcggctattgttccccgcaggggcccggggcgccctgaaacagggtccacgtcagcccgctcccgagcgtgtcctcaggtctaaggacgggtggggcttcctttgtgtgttctctggaaggggctgggatggcgtcgttgctgccccaaggggtaaccgagggggattgagggaagatggtaccagcgccctagagctcagctcaccagacctactcttccgctcgacccttgcagaggaggtggggacggatatggtatttgtagggcagcgctgtgaacaatggagccatcaaaaaggccttctcccagcctcctcaccaaccacggacattcctggcccaacaagacctcctggccaggttttgagccctgcttcccagtttctgaaagaaggaccaaagtaatgccaagaactcccagatgaagaggaccttccttagacctataacagattcactacttgacttcagagggaagtttcagctaattctcaggaaaaggtcaaaacaggcctgtgactgtcccttgaatactgaaggtataaacaagcttctggctcctccaggtcaagcagaggaacacttttattagaatgaagggttacttctttgttattcaaacacacacccacacacatcctctgtagtctccctaatgaaaaacctcaacagatggagagcctgagctcccaagtccgcaggctgagaagatgcacttcactcaagggccagtgggctggtacagactagggaagagaaaagggacaaaggctgctagtataggtaatcactatcttttaatactcctaacacatagaaattcgaaaaatcttgttcagcaatgttagcagcctgtgagcctcggaaactaatttggctgatgtgtctctgatagggagcttggggctgcaccaaggggaaacattctcctcctgtattctctcctctctctcgtttgaaagcctgtacaaagaaatggtacaaatggatggttaacttaatgattccatcagaggcagatttttctctgtcaggtccctggataaggtggaggtctgaaagccaggagacagaatatgtacttaatcgccctttctgacctgcttaccagtgaccaggactactctccaggcctttcttctgccacttccccattcttcctggctagttcagttgggtctcagcacttcaactcctggctggatcctgagtttttcttggttgcagggaaagctctcactgtctgcatctccttccccacccccacctcccgttttgcagctggccattctggctgcctcacagctatcctgccttaattcatatttgattgcctggacagaaccacctagaatgtccagacgactgccacccctcagccatgggcctgagatcctgccctgacccctttcttcagaccccaggaggacccacaatctccctgatccccaccttccccaaagtagtctctaggaaaaaagcagagctggctaaggcctgagacagagccatttcttccccttgggcaaacgaggtagaccctcccagagaccaatgccggagaggcccggatccgagctccctttatatggcctcccccatcacggatcccgtgggaaaacctgacacacaatggcgcggctgctccgggcaccctcaacccagcgccctgcggcaaggcctggagcagcctggtggtcttggtgcgctccctttgccctccccgcaaccctctgcgagcactcgtcccaggagagagaccctggctagggtggaggttgcctcccgcaaagggcgctgttgctggggcctcccctcccccattctcttgtttttctgcttctgagactcgggagggaggcggcaggcgcctccgcagccgatagagcagctattgtgaccttcccttgcagagcgggaacccagccgagtgtgtaccgccggcggtggcgggggaggaggcgactgtgtgtgcaaacctcagtcggagagggggtggcgctgggaaataaaggtttgcaacctcaaacagttggg

SEQ ID NO: 295675 - DNA, 1147 bp, Homo sapiens
cgtgtaaaactggtgtggtatttaatacatggcgtgagtgcccaagtatatggggggagtacccgcagaccttttgggtgaaagcccgaatctccccaaggtggaaaatttttgccccgcccaagaggtgttttgaaaggggcctgttctttcgggggctttgggaattgtgccgtgttgttgaggttgattgatttgtgggcccgttggggcccgatcccgcccgttgtgggaccgttaggcccccgttgccgcctttgggtgaggtttaacccaggagtagttttggcggaaattgttcttcttatgctttgaccccaatccttgggccaaagggagtaataacttacgatcaaaaattttggcggttcgcgaactagcctatggcttacgtgagtgcggtaagaagtttaatggatagatagttaattatttctgtactacctagaagtgtgtactcaggcgcctactgaagaagttgttgccagagacatattttatttgtattgttgaggcataaaatgctaatttgtcatttattttggtctgtttctgaattataaatagtaatagttcattctgtttacctttcagatcgtttgaaaaatgaaaaagaaccaatggtgttgaaacttaaggactggccaccaggagaagattttagagatatgatgccttccaggtatgattatgaaggtggggagagatgattctgtccttcacttggtaggataaattcttttttgaggtagtgagaaaacagttttcaagaaaataacaaaagttctgtaattatactgccactgatttttcatttctagtctgtagtcattggaggcatgtttatttttagatgagatgaagaagtgattggcttttaggcctggctgactaatggaacaccacagattttccatggtaggccctgctagagaagaggctcactttttcttacaaggctgatttggaggcagttgtggaatctgacctgtcagggtcaggacaatgtagtcacagcactgagttagacaagaagacatctactgggtagatctattttcctgactgagcttgaaactttgaaaagggtgtcacaactaatcaatgatatatctctaagaataactttttgtctagaatttattgc

SEQ ID NO: 295676 - DNA, 519 bp, Homo sapiens
ggctgatctagaggaccccaagcagttatacatactcagctttcatttttacatatttcctttcgttcccgtggccacatagtttgtgtgtttcattttcatagttgcagttgtagggcatatgcaattttgtagtttttccctttactgtacctaattttacattgtaaaatctttacatgttacttaatagtctttagatgacttttaatggtgtgtgatacatcattgagagaatgtacttttattagtgatttcagtgtccggacatttaggtcaatctgctggcattctagctgtcttaacatctgctacaattaaatgcagtgtcctgtgttgttgagtagaagttagttacttaggattcaaagtaccctttgagttggacttttattcttttgacatgactcaatactcactgtctaacaaggaggatgcctgggataaagattggtttctccatttaccagagctttctttcatcatcattataactgagatcttcgtcagttttacaca

SEQ ID NO: 295677 - DNA, 364 bp, Homo sapiens
gaacaagtgcggccagtgatttttttttaaatcattatgacactcagaacctttttctgttagatcttttcaaagacagatgaattctgattgtgctccctaatagaagtattgatgtgaaaggattgtctgggaacaagcagtgaggaagccattgtaccaacaaagactcctttgtgcgaaaataactgaaaaaaggttcctaacaaagactccaaagtggtgataacttgaaggaagcttgtcagaacagaagatatttccaccctgcctagtagatgtgtttcagaatcttcacttggccatcatctttgctttttcttaaactatgttcaaataaaggcagcaagttttagcattggca

SEQ ID NO: 295678 - DNA, 346 bp, Homo sapiens
caaataacccaaggatttctatcagtgcatttgaaaggaacctggggatagctatcaagtggaaagagagagagaaagaattcatacagttcatgtgacagttcagagacccgttctgacttttcacattactttcgtagactctactgtggcctcttgtagtaggttttacatttttgtttcttgaagaagcacaaagttctaaagtagtctacctaataagtagctgtcgaatttgtaaagggtttaaaaaaattttttgtgtattttgcagaattaaaattattaagataagctttaacatttttaaaattactaaatatattttgcctgtgtttatgcagag

SEQ ID NO: 295679 - DNA, 4727 bp, Homo sapiens
  misc_feature (1082)..(1082): n is a, c, g, or t
agcggctccgaggggggcgggtccgggaggctgtgcgtgtcttgtgagagctcttgaaccaagtcagcgctggagtcggctaggcggctggaaacggcggctgccgccggtgactcagggaggcgggaggcgggggaggagctcttcctgcaggcgtggaaaccatggtgctcacgctcggagaaagttggccggtattggtggggaggaggtttctcagtctgtccgcagccgacggcagcgatggcagccacgacagctgggacgtggagcgcgtcgccgagtggccctggctctccgggaccattcgagctgtttcccacaccgacgttaccaagaaggatctgaaggtgtgtgtggaatttgatggggaatcttggaggaaaagaagatggatagaagtctacagccttctaaggagagcatttttagtagaacataatttggttttagctgaacgaaagtcacctgaaatttctgaacgaattgtacagtggcctgcaataacgtacaaacctctgttggacaaagctggtttgggatccataacttctgttcgctttctgggagatcaacaaagagtatttctttctaaagaccttttgaagcctatacaggatgtaaacagtcttcgactttctcttacggataatcagattgtcagtaaagaatttcaagctttgattgtgaagcatttagatgaaagccatcttttaaaaggtgacaaaaacttagttggttcagaagtaaaaatttatagcttggacccatctactcagtggttttcagcaaccgttgtaaatggaaacccagcatcaaaaactcttcaagtcaactgtgaggagattccagcactgaaaattgttgatccgtcactgattcatgttgaagttgtacacgataaccttgtgacatgtggtaattctgcaagaattggagctgtaaaacgcaagtcttctgagaataatggaaccctggtttccaaacaagcaaaatcttgctctgaggcctctcccagtatgtgtcctgtgcagtctgtacctacaacagtttttaaggagatactgcttggctgtactgcngcaactccacctagtaaggacccaagacagcaaagtactccccaggctgccaactctccacctaaccttggagcaaaaattcctcaaggatgtcataaacaaagtttaccagaggaaatttcttcctgtctaaatacaaagtctgaagctctgagaacaaaaccagatgtctgcaaagcagggttgctctcaaagtcctctcagattggaactggagacttgaaaattctgactgagccaaaaggcagctgtactcagcctaagacaaacactgatcaggaaaacagattggagtctgttccacaagcattgactggccttcctaaggagtgcttacctacaaaggcttcttctaaggcagaattggaaattgccaatcctcctgaactgcagaagcacctagaacatgcaccttccccatcggatgtttcaaatgcaccagaagtgaaagcaggtgtcaatagtgatagccctaataactgttcaggaaaaaaggtagaaccttcagctttagcttgccgatcacagaatttaaaggaatcttcagtaaaagtagataatgaaagctgttgttcaagaagcaacaataaaatccagaatgccccatccaggaagtcggttttgacagacccagctaaactcaaaaagctgcaacagagtggcgaggccttcgtacaggatgattcttgtgtgaacatcgtggcacagttgcctaaatgccgagagtgtcgcttggacagtctccgcaaggataaggagcaacagaaggactcacctgtgttttgccgcttctttcacttcaggaggttacaattcaacaaacatggtgtgttgcgggtagaaggcttcttaacaccaaacaagtatgacaatgaagcaattggcttgtggttacctttaaccaaaaacgttgtggggattgatttggacacagcaaagtacatcttggccaacattggagaccacttctgtcaaatggtgatttctgaaaaggaagctatgtcaactattgagccacacagacaggttgcttggaagcgagctgtcaaaggtgttcgagaaatgtgtgatgtgtgcgacaccaccatcttcaacctgcactgggtgtgtcctcggtgtgggtttggagtatgtgtggactgctaccggatgaagagaaagaattgccaacagggtgctgcttacaagactttctcttggctaaaatgtgtgaagagtcagatacatgaaccagagaacttaatgcccacacagatcattcctggaaaagcactctatgatgttggagacattgttcattctgtaagagcgaaatggggaataaaggcaaactgcccttgttcaaacaggcaattcaaactcttttcaaagccagcctcaaaggaagacctaaaacagacttctttagctggagaaaaaccgactcttggtgcagtgctccagcagaatccctcagtgttggagccagcagctgtgggtggggaagcagcctccaagccagccggcagcatgaagcctgcctgtccagccagcacatctcctctaaactggctggccgacctaaccagcgggaatgtcaacaaggaaaacaaggaaaaacaaccaacaatgccaattttaaagaatgaaatcaaatgccttccacccctcccacctttaagcaaatccagcacagtcctccatacgtttaacagcacaattttgacacccgtaagcaacaacaattctggtttcctccggaatctcttgaattcttctacaggaaagacagaaaatggactcaagaatacaccaaaaatccttgatgacatctttgcctctttggtgcaaaataagacgacttctgatttatctaagaggcctcaaggactaaccatcaagcccagcattctgggctttgacactcctcactattggctttgtgataatcgcttgctgtgcttgcaagaccccaacaataagagcaactggaatgtgtttagggagtgctggaaacaagggcagccagtgatggtgtctggagtgcatcataaattgaactctgaactttggaaacctgaatccttcaggaaagagtttggtgagcaggaagtagacctagttaattgtaggaccaatgaaatcatcacaggagccacagtaggagacttctgggatggatttgaagatgttccaaatcgtttgaaaaatgaaaaagaaccaatggtgttgaaacttaaggactggccaccaggagaagattttagagatatgatgccttccaggtttgatgatctgatggccaacattccactgcccgagtacacaaggcgagatggcaaactgaatttggcctctaggctgccaaactactttgttcggccagatctgggccccaagatgtataatgcttatggattaatcactcctgaagatcggaaatatggaacaacaaatcttcacttagatgtatctgatgcagctaatgtcatggtctatgtgggaattcccaaaggacagtgtgagcaagaagaagaagtccttaagaccatccaagatggagattctgacgaactcacaataaagcgatttattgaaggaaaagagaagccaggagcactgtggcacatatatgctgcaaaggacacggagaagataagggaatttcttaaaaaggtatcagaagagcaaggtcaagaaaacccagcagaccacgatcctattcatgatcaaagctggtatttagaccgatcattaagaaaacgtcttcatcaagagtatggagttcaaggctgggctattgtacagtttcttggggatgtggtgtttatcccggcaggagctccacatcaggttcataacttatatagctgcatcaaagtggctgaagattttgtttctccagagcatgttaaacactgcttctggcttactcaggaattccgatatctgtcacagactcataccaatcacgaagataaattacaggtgaagaatgttatctaccatgcagtgaaagatgcagttgctatgctgaaagccagtgaatccagttttggcaaaccttaatctccctgcacattggaaatgaattacaggcagctgttcaaactcttcaggcaggattcctgtggactttgagattcatgttacctcatcttcttttttaaactgtacccaacttgtgagggtactctgtctaatgtatatttctagtgtttacagacagtaaatgtgtatatgtagtaactatttacagaacatgcatccttaaactgtgacttctcacctagtgcagaacttttaccaggctgtaaaagcaaaacctcgtatcagctctggaacaatacctgcagttattcttcagctgtttggacaacttagattgggtttataactattaggaatcactgcacagtttatttgggttgtgttttgtgtctgagtcccctccctcatcccttagggtccagaagagcaatggaggaagtgacagctaatgttgcagttcttattgtatggcataggactggcattatatagcagaaatcaactactgtacaatttcttggggttaaccatctttagttaaatggaattttaatttaaatgacgctttgctaattttaagtgttaagcattttgcattaaaatattcatataata

SEQ ID NO: 295680 - DNA, 4858 bp, Homo sapiens
  misc_feature (1082)..(1082): n is a, c, g, or t
agcggctccgaggggggcgggtccgggaggctgtgcgtgtcttgtgagagctcttgaaccaagtcagcgctggagtcggctaggcggctggaaacggcggctgccgccggtgactcagggaggcgggaggcgggggaggagctcttcctgcaggcgtggaaaccatggtgctcacgctcggagaaagttggccggtattggtggggaggaggtttctcagtctgtccgcagccgacggcagcgatggcagccacgacagctgggacgtggagcgcgtcgccgagtggccctggctctccgggaccattcgagctgtttcccacaccgacgttaccaagaaggatctgaaggtgtgtgtggaatttgatggggaatcttggaggaaaagaagatggatagaagtctacagccttctaaggagagcatttttagtagaacataatttggttttagctgaacgaaagtcacctgaaatttctgaacgaattgtacagtggcctgcaataacgtacaaacctctgttggacaaagctggtttgggatccataacttctgttcgctttctgggagatcaacaaagagtatttctttctaaagaccttttgaagcctatacaggatgtaaacagtcttcgactttctcttacggataatcagattgtcagtaaagaatttcaagctttgattgtgaagcatttagatgaaagccatcttttaaaaggtgacaaaaacttagttggttcagaagtaaaaatttatagcttggacccatctactcagtggttttcagcaaccgttgtaaatggaaacccagcatcaaaaactcttcaagtcaactgtgaggagattccagcactgaaaattgttgatccgtcactgattcatgttgaagttgtacacgataaccttgtgacatgtggtaattctgcaagaattggagctgtaaaacgcaagtcttctgagaataatggaaccctggtttccaaacaagcaaaatcttgctctgaggcctctcccagtatgtgtcctgtgcagtctgtacctacaacagtttttaaggagatactgcttggctgtactgcngcaactccacctagtaaggacccaagacagcaaagtactccccaggctgccaactctccacctaaccttggagcaaaaattcctcaaggatgtcataaacaaagtttaccagaggaaatttcttcctgtctaaatacaaagtctgaagctctgagaacaaaaccagatgtctgcaaagcagggttgctctcaaagtcctctcagattggaactggagacttgaaaattctgactgagccaaaaggcagctgtactcagcctaagacaaacactgatcaggaaaacagattggagtctgttccacaagcattgactggccttcctaaggagtgcttacctacaaaggcttcttctaaggcagaattggaaattgccaatcctcctgaactgcagaagcacctagaacatgcaccttccccatcggatgtttcaaatgcaccagaagtgaaagcaggtgtcaatagtgatagccctaataactgttcaggaaaaaaggtagaaccttcagctttagcttgccgatcacagaatttaaaggaatcttcagtaaaagtagataatgaaagctgttgttcaagaagcaacaataaaatccagaatgccccatccaggaagtcggttttgacagacccagctaaactcaaaaagctgcaacagagtggcgaggccttcgtacaggatgattcttgtgtgaacatcgtggcacagttgcctaaatgccgagagtgtcgcttggacagtctccgcaaggataaggagcaacagaaggactcacctgtgttttgccgcttctttcacttcaggaggttacaattcaacaaacatggtgtgttgcgggtagaaggcttcttaacaccaaacaagtatgacaatgaagcaattggcttgtggttacctttaaccaaaaacgttgtggggattgatttggacacagcaaagtacatcttggccaacattggagaccacttctgtcaaatggtgatttctgaaaaggaagctatgtcaactattgagccacacagacaggttgcttggaagcgagctgtcaaaggtgttcgagaaatgtgtgatgtgtgcgacaccaccatcttcaacctgcactgggtgtgtcctcggtgtgggtttggagtatgtgtggactgctaccggatgaagagaaagaattgccaacagggtgctgcttacaagactttctcttggctaaaatgtgtgaagagtcagatacatgaaccagagaacttaatgcccacacagatcattcctggaaaagcactctatgatgttggagacattgttcattctgtaagagcgaaatggggaataaaggcaaactgcccttgttcaaacaggcaattcaaactcttttcaaagccagcctcaaaggaagacctaaaacagacttctttagctggagaaaaaccgactcttggtgcagtgctccagcagaatccctcagtgttggagccagcagctgtgggtggggaagcagcctccaagccagccggcagcatgaagcctgcctgtccagccagcacatctcctctaaactggctggccgacctaaccagcgggaatgtcaacaaggaaaacaaggaaaaacaaccaacaatgccaattttaaagaatgaaatcaaatgccttccacccctcccacctttaagcaaatccagcacagtcctccatacgtttaacagcacaattttgacacccgtaagcaacaacaattctggtttcctccggaatctcttgaattcttctacaggaaagacagaaaatggactcaagaatacaccaaaaatccttgatgacatctttgcctctttggtgcaaaataagacgacttctgatttatctaagaggcctcaaggactaaccatcaagcccagcattctgggctttgacactcctcactattggctttgtgataatcgcttgctgtgcttgcaagaccccaacaataagagcaactggaatgtgtttagggagtgctggaaacaagggcagccagtgatggtgtctggagtgcatcataaattgaactctgaactttggaaacctgaatccttcaggaaagagtttggtgagcaggaagtagacctagttaattgtaggaccaatgaaatcatcacaggagccacagtaggagacttctgggatggatttgaagatgttccaaatcgtttgaaaaatgaaaaagaaccaatggtgttgaaacttaaggactggccaccaggagaagattttagagatatgatgccttccaggtttgatgatctgatggccaacattccactgcccgagtacacaaggcgagatggcaaactgaatttggcctctaggctgccaaactactttgttcggccagatctgggccccaagatgtataatgcttatggattaatcactcctgaagatcggaaatatggaacaacaaatcttcacttagatgtatctgatgcagctaatgtcatggtctatgtgggaattcccaaaggacagtgtgagcaagaagaaggtagggtgctgagcataaaaggagggcttactctttgagccagggcttgtggtctgatatctgctttctcttcttgctctagaagtccttaagaccatccaagatggagattctgacgaactcacaataaagcgatttattgaaggaaaagagaagccaggagcactgtggcacatatatgctgcaaaggacacggagaagataagggaatttcttaaaaaggtatcagaagagcaaggtcaagaaaacccagcagaccacgatcctattcatgatcaaagctggtatttagaccgatcattaagaaaacgtcttcatcaagagtatggagttcaaggctgggctattgtacagtttcttggggatgtggtgtttatcccggcaggagctccacatcaggttcataacttatatagctgcatcaaagtggctgaagattttgtttctccagagcatgttaaacactgcttctggcttactcaggaattccgatatctgtcacagactcataccaatcacgaagataaattacaggtgaagaatgttatctaccatgcagtgaaagatgcagttgctatgctgaaagccagtgaatccagttttggcaaaccttaatctccctgcacattggaaatgaattacaggcagctgttcaaactcttcaggcaggattcctgtggactttgagattcatgttacctcatcttcttttttaaactgtacccaacttgtgagggtactctgtctaatgtatatttctagtgtttacagacagtaaatgtgtatatgtagtaactatttacagaacatgcatccttaaactgtgacttctcacctagtgcagaacttttaccaggctgtaaaagcaaaacctcgtatcagctctggaacaatacctgcagttattcttcagctgtttggacaacttagattgggtttataactattaggaatcactgcacagtttatttgggttgtgttttgtgtctgagtcccctccctcatcccttagggtccagaagagcaatggaggaagtgacagctaatgttgcagttcttattgtatggcataggactggcattatatagcagaaatcaactactgtacaatttcttggggttaaccatctttagttaaatggaattttaatttaaatgacgctttgctaattttaagtgttaagcattttgcattaaaatattcatataataaaaaaaaaaaaaattcactggccgccggtttacaacgtgtggactggga

SEQ ID NO: 295681 - DNA, 2664 bp, Homo sapiens
gtctgaatagggattctgcttggagttcattctcctagagggaggacaggttgcttggaagcgagctgtcaaaggtgttcgagaaatgtgtgatgtgtgcgacaccaccatcttcaacctgcactgggtgtgtcctcggtgtgggtttggagtatgtgtggactgctaccggatgaagagaaagaattgccaacagggtgctgcttacaagactttctcttggctaaaatgtgtgaagagtcagatacatgaaccagagaacttaatgcccacacagatcattcctggaaaagcactctatgatgttggagacattgttcattctgtaagagcgaaatggggaataaaggcaaactgcccttgttcaaacaggcaattcaaactcttttcaaagccagcctcaaaggaagacctaaaacagacttctttagctggagaaaaaccgactcttggtgcagtgctccagcagaatccctcagtgttggagccagcagctgtgggtggggaagcagcctccaagccagccggcagcatgaagcctgcctgtccagccagcacatctcctctaaactggctggccgacctaaccagcgggaatgtcaacaaggaaaacaaggctcccacctttaagcaaatccagcacagtcctccatacgtttaacagcacaattttgacacccgtaagcaacaacaattctggtttcctccggaatctcttgaattcttctacaggaaagacagaaaatggactcaagaatacaccaaaaatccttgatgacatctttgcctctttggtgcaaaataagacgacttctgatttatctaagaggcctcaaggactaaccatcaagcccagcattctgggctttgacactcctcactattggctttgtgataatcgcttgctgtgcttgcaagaccccaacaataagagcaactggaatgtgtttagggagtgctggaaacaagggcagccagtgatggtgtctggagtgcatcataaattgaactctgaactttggaaacctgaatccttcaggaaagagtttggtgagcaggaagtagacctagttaattgtaggaccaatgaaatcatcacaggagccacagtaggagacttctgggatggatttgaagatgttccaaatcgtttgaaaaatgaaaaagaaccaatggtgttgaaacttaaggactggccaccaggagaagattttagagatatgatgccttccaggtttgatgatctgatggccaacattccactgcccgagtacacaaggcgagatggcaaactgaatttggcctctaggctgccaaactactttgttcggccagatctgggccccaagatgtataatgcttatggattaatcactcctgaagatcggaaatatggaacaacaaatcttcacttagatgtatctgatgcagctaatgtcatggtctatgtgggaattcccaaaggacagtgtgagcaagaagaagaagtccttaagaccatccaagatggagattctgacgaactcacaataaagcgatttattgaaggaaaagagaagccaggagcactgtggcacatatatgctgcaaaggacacggagaagataagggaatttcttaaaaaggtatcagaagagcaaggtcaagaaaacccagcagaccacgatcctattcatgatcaaagctggtatttagaccgatcattaagaaaacgtcttcatcaagagtatggagttcaaggctgggctattgtacagtttcttggggatgtggtgtttatcccggcaggagctccacatcaggttcataacttatatagctgcatcaaagtggctgaagattttgtttctccagagcatgttaaacactgcttctggcttactcaggaattccgatatctgtcacagactcataccaatcacgaagataaattacaggtgaagaatgttatctaccatgcagtgaaagatgcagttgctatgctgaaagccagtgaatccagttttggcaaaccttaatctccctgcacattggaaatgaattacaggcagctgttcaaactcttcaggcaggattcctgtggactttgagattcatgttacctcatcttcttttttaaactgtacccaacttgtgagggtactctgtctaatgtatatttctagtgtttacagacagtaaatgtgtatatgtagtaactatttacagaacatgcatccttaaactgtgacttctcacctagtgcagaacttttaccaggctgtaaaagcaaaacctcgtatcagctctggaacaatacctgcagttattcttcagctgtttggacaacttagattgggtttataactattaggaatcactgcacagtttatttgggttgtgttttgtgtctgagtcccctccctcatcccttagggtccagaagagcaatggaggaagtgacagctaatgttgcagttcttattgtatggcataggactggcattatatagcagaaatcaactactgtacaatttcttggggttaaccatctttagttaaatggaattttaatttaaatgacgctttgctaattttaagtgttaagcattttgcattaaaatattcatataataaaaaaaaaaaaaattcactggccgccggtttacaacgtgtggactggga

SEQ ID NO: 295682 - DNA, 1556 bp, Homo sapiens
tggtgatctttattttgctgcaccttgctgcctcctggatcgtttgaaaaatgaaaaagaaccaatggtgttgaaacttaaggactggccaccaggagaagattttagagatatgatgccttccaggtttgatgatctgatggccaacattccactgcccgagtacacaaggcgagatggcaaactgaatttggcctctaggctgccaaactactttgttcggccagatctgggccccaagatgtataatgcttatggattaatcactcctgaagatcggaaatatggaacaacaaatcttcacttagatgtatctgatgcagctaatgtcatggtctatgtgggaattcccaaaggacagtgtgagcaagaagaagaagtccttaagaccatccaagatggagattctgacgaactcacaataaagcgatttattgaaggaaaagagaagccaggagcactgtggcacatatatgctgcaaaggacacggagaagataagggaatttcttaaaaaggtatcagaagagcaaggtcaagaaaacccagcagaccacgatcctattcatgatcaaagctggtatttagaccgatcattaagaaaacgtcttcatcaagagtatggagttcaaggctgggctattgtacagtttcttggggatgtggtgtttatcccggcaggagctccacatcaggttcataacttatatagctgcatcaaagtggctgaagattttgtttctccagagcatgttaaacactgcttctggcttactcaggaattccgatatctgtcacagactcataccaatcacgaagataaattacaggtgaagaatgttatctaccatgcagtgaaagatgcagttgctatgctgaaagccagtgaatccagttttggcaaaccttaatctccctgcacattggaaatgaattacaggcagctgttcaaactcttcaggcaggattcctgtggactttgagattcatgttacctcatcttcttttttaaactgtacccaacttgtgagggtactctgtctaatgtatatttctagtgtttacagacagtaaatgtgtatatgtagtaactatttacagaacatgcatccttaaactgtgacttctcacctagtgcagaacttttaccaggctgtaaaagcaaaacctcgtatcagctctggaacaatacctgcagttattcttcagctgtttggacaacttagattgggtttataactattaggaatcactgcacagtttatttgggttgtgttttgtgtctgagtcccctccctcatcccttagggtccagaagagcaatggaggaagtgacagctaatgttgcagttcttattgtatggcataggactggcattatatagcagaaatcaactactgtacaatttcttggggttaaccatctttagttaaatggaattttaatttaaatgacgctttgctaattttaagtgttaagcattttgcattaaaatattcatataataaaaaaaaaaaaaattcactggccgccggtttacaacgtgtggactggga

SEQ ID NO: 295683 - DNA, 3884 bp, Homo sapiens
  misc_feature (1082)..(1082): n is a, c, g, or t
agcggctccgaggggggcgggtccgggaggctgtgcgtgtcttgtgagagctcttgaaccaagtcagcgctggagtcggctaggcggctggaaacggcggctgccgccggtgactcagggaggcgggaggcgggggaggagctcttcctgcaggcgtggaaaccatggtgctcacgctcggagaaagttggccggtattggtggggaggaggtttctcagtctgtccgcagccgacggcagcgatggcagccacgacagctgggacgtggagcgcgtcgccgagtggccctggctctccgggaccattcgagctgtttcccacaccgacgttaccaagaaggatctgaaggtgtgtgtggaatttgatggggaatcttggaggaaaagaagatggatagaagtctacagccttctaaggagagcatttttagtagaacataatttggttttagctgaacgaaagtcacctgaaatttctgaacgaattgtacagtggcctgcaataacgtacaaacctctgttggacaaagctggtttgggatccataacttctgttcgctttctgggagatcaacaaagagtatttctttctaaagaccttttgaagcctatacaggatgtaaacagtcttcgactttctcttacggataatcagattgtcagtaaagaatttcaagctttgattgtgaagcatttagatgaaagccatcttttaaaaggtgacaaaaacttagttggttcagaagtaaaaatttatagcttggacccatctactcagtggttttcagcaaccgttgtaaatggaaacccagcatcaaaaactcttcaagtcaactgtgaggagattccagcactgaaaattgttgatccgtcactgattcatgttgaagttgtacacgataaccttgtgacatgtggtaattctgcaagaattggagctgtaaaacgcaagtcttctgagaataatggaaccctggtttccaaacaagcaaaatcttgctctgaggcctctcccagtatgtgtcctgtgcagtctgtacctacaacagtttttaaggagatactgcttggctgtactgcngcaactccacctagtaaggacccaagacagcaaagtactccccaggctgccaactctccacctaaccttggagcaaaaattcctcaaggatgtcataaacaaagtttaccagaggaaatttcttcctgtctaaatacaaagtctgaagctctgagaacaaaaccagatgtctgcaaagcagggttgctctcaaagtcctctcagattggaactggagacttgaaaattctgactgagccaaaaggcagctgtactcagcctaagacaaacactgatcaggaaaacagattggagtctgttccacaagcattgactggccttcctaaggagtgcttacctacaaaggcttcttctaaggcagaattggaaattgccaatcctcctgaactgcagaagcacctagaacatgcaccttccccatcggatgtttcaaatgcaccagaagtgaaagcaggtgtcaatagtgatagccctaataactgttcaggaaaaaaggtagaaccttcagctttagcttgccgatcacagaatttaaaggaatcttcagtaaaagtagataatgaaagctgttgttcaagaagcaacaataaaatccagaatgccccatccaggaagtcggttttgacagacccagctaaactcaaaaagctgcaacagagtggcgaggccttcgtacaggatgattcttgtgtgaacatcgtggcacagttgcctaaatgccgagagtgtcgcttggacagtctccgcaaggataaggagcaacagaaggactcacctgtgttttgccgcttctttcacttcaggaggttacaattcaacaaacatggtgtgttgcgggtagaaggcttcttaacaccaaacaagtatgacaatgaagcaattggcttgtggttacctttaaccaaaaacgttgtggggattgatttggacacagcaaagtacatcttggccaacattggagaccacttctgtcaaatggtgatttctgaaaaggaagctatgtcaactattgagccacacagacaggttgcttggaagcgagctgtcaaaggtgttcgagaaatgtgtgatgtgtgcgacaccaccatcttcaacctgcactgggtgtgtcctcggtgtgggtttggagtatgtgtggactgctaccggatgaagagaaagaattgccaacagggtgctgcttacaagactttctcttggctaaaatgtgtgaagagtcagatacatgaaccagagaacttaatgcccacacagatcattcctggaaaagcactctatgatgttggagacattgttcattctgtaagagcgaaatggggaataaaggcaaactgcccttgttcaaacaggcaattcaaactcttttcaaagccagcctcaaaggaagacctaaaacagacttctttagctggagaaaaaccgactcttggtgcagtgctccagcagaatccctcagtgttggagccagcagctgtgggtggggaagcagcctccaagccagccggcagcatgaagcctgcctgtccagccagcacatctcctctaaactggctggccgacctaaccagcgggaatgtcaacaaggaaaacaaggaaaaacaaccaacaatgccaattttaaagaatgaaatcaaatgccttccacccctcccacctttaagcaaatccagcacagtcctccatacgtttaacagcacaattttgacacccgtaagcaacaacaattctggtttcctccggaatctcttgaattcttctacaggaaagacagaaaatggactcaagaatacaccaaaaatccttgatgacatctttgcctctttggtgcaaaataagacgacttctgatttatctaagaggcctcaaggactaaccatcaagcccagcattctgggctttgacactcctcactattggctttgtgataatcgcttgctgtgcttgcaagaccccaacaataagagcaactggaatgtgtttagggagtgctggaaacaagggcagccagtgatggtgtctggagtgcatcataaattgaactctgaactttggaaacctgaatccttcaggaaagagtttggtgagcaggaagtagacctagttaattgtaggaccaatgaaatcatcacaggagccacagtaggagacttctgggatggatttgaagatgttccaaatcgtttgaaaaatgaaaaagaaccaatggtgttgaaacttaaggactggccaccaggagaagattttagagatatgatgccttccaggtttgatgatctgatggccaacattccactgcccgagtacacaaggcgagatggcaaactgaatttggcctctaggctgccaaactactttgttcggccagatctgggccccaagatgtataatgcttatggattaatcactcctgaagatcggaaatatggaacaacaaatcttcacttagatgtatctgatgcagctaatgtcatggtctatgtgggaattcccaaaggacagtgtgagcaagaagaagaagtccttaagaccatccaagatggagattctgacgaactcacaataaagcgatttattgaaggaaaagagaagccaggagcactgtggcacatatatgctgcaaaggacacggagaagataagggaatttcttaaaaaggtgtgctgcttatggcatgtgtgaacagaggcataaggaatagcaatattatgttactacatgtggtgaactgactggcttggctaggggaattgtcacaacctgaaaagttaaatctgtacctgtcagattgaataggctgaaggt

SEQ ID NO: 295684 - DNA, 3811 bp, Homo sapiens
  misc_feature (1082)..(1082): n is a, c, g, or t
agcggctccgaggggggcgggtccgggaggctgtgcgtgtcttgtgagagctcttgaaccaagtcagcgctggagtcggctaggcggctggaaacggcggctgccgccggtgactcagggaggcgggaggcgggggaggagctcttcctgcaggcgtggaaaccatggtgctcacgctcggagaaagttggccggtattggtggggaggaggtttctcagtctgtccgcagccgacggcagcgatggcagccacgacagctgggacgtggagcgcgtcgccgagtggccctggctctccgggaccattcgagctgtttcccacaccgacgttaccaagaaggatctgaaggtgtgtgtggaatttgatggggaatcttggaggaaaagaagatggatagaagtctacagccttctaaggagagcatttttagtagaacataatttggttttagctgaacgaaagtcacctgaaatttctgaacgaattgtacagtggcctgcaataacgtacaaacctctgttggacaaagctggtttgggatccataacttctgttcgctttctgggagatcaacaaagagtatttctttctaaagaccttttgaagcctatacaggatgtaaacagtcttcgactttctcttacggataatcagattgtcagtaaagaatttcaagctttgattgtgaagcatttagatgaaagccatcttttaaaaggtgacaaaaacttagttggttcagaagtaaaaatttatagcttggacccatctactcagtggttttcagcaaccgttgtaaatggaaacccagcatcaaaaactcttcaagtcaactgtgaggagattccagcactgaaaattgttgatccgtcactgattcatgttgaagttgtacacgataaccttgtgacatgtggtaattctgcaagaattggagctgtaaaacgcaagtcttctgagaataatggaaccctggtttccaaacaagcaaaatcttgctctgaggcctctcccagtatgtgtcctgtgcagtctgtacctacaacagtttttaaggagatactgcttggctgtactgcngcaactccacctagtaaggacccaagacagcaaagtactccccaggctgccaactctccacctaaccttggagcaaaaattcctcaaggatgtcataaacaaagtttaccagaggaaatttcttcctgtctaaatacaaagtctgaagctctgagaacaaaaccagatgtctgcaaagcagggttgctctcaaagtcctctcagattggaactggagacttgaaaattctgactgagccaaaaggcagctgtactcagcctaagacaaacactgatcaggaaaacagattggagtctgttccacaagcattgactggccttcctaaggagtgcttacctacaaaggcttcttctaaggcagaattggaaattgccaatcctcctgaactgcagaagcacctagaacatgcaccttccccatcggatgtttcaaatgcaccagaagtgaaagcaggtgtcaatagtgatagccctaataactgttcaggaaaaaaggtagaaccttcagctttagcttgccgatcacagaatttaaaggaatcttcagtaaaagtagataatgaaagctgttgttcaagaagcaacaataaaatccagaatgccccatccaggaagtcggttttgacagacccagctaaactcaaaaagctgcaacagagtggcgaggccttcgtacaggatgattcttgtgtgaacatcgtggcacagttgcctaaatgccgagagtgtcgcttggacagtctccgcaaggataaggagcaacagaaggactcacctgtgttttgccgcttctttcacttcaggaggttacaattcaacaaacatggtgtgttgcgggtagaaggcttcttaacaccaaacaagtatgacaatgaagcaattggcttgtggttacctttaaccaaaaacgttgtggggattgatttggacacagcaaagtacatcttggccaacattggagaccacttctgtcaaatggtgatttctgaaaaggaagctatgtcaactattgagccacacagacaggttgcttggaagcgagctgtcaaaggtgttcgagaaatgtgtgatgtgtgcgacaccaccatcttcaacctgcactgggtgtgtcctcggtgtgggtttggagtatgtgtggactgctaccggatgaagagaaagaattgccaacagggtgctgcttacaagactttctcttggctaaaatgtgtgaagagtcagatacatgaaccagagaacttaatgcccacacagatcattcctggaaaagcactctatgatgttggagacattgttcattctgtaagagcgaaatggggaataaaggcaaactgcccttgttcaaacaggcaattcaaactcttttcaaagccagcctcaaaggaagacctaaaacagacttctttagctggagaaaaaccgactcttggtgcagtgctccagcagaatccctcagtgttggagccagcagctgtgggtggggaagcagcctccaagccagccggcagcatgaagcctgcctgtccagccagcacatctcctctaaactggctggccgacctaaccagcgggaatgtcaacaaggaaaacaaggaaaaacaaccaacaatgccaattttaaagaatgaaatcaaatgccttccacccctcccacctttaagcaaatccagcacagtcctccatacgtttaacagcacaattttgacacccgtaagcaacaacaattctggtttcctccggaatctcttgaattcttctacaggaaagacagaaaatggactcaagaatacaccaaaaatccttgatgacatctttgcctctttggtgcaaaataagacgacttctgatttatctaagaggcctcaaggactaaccatcaagcccagcattctgggctttgacactcctcactattggctttgtgataatcgcttgctgtgcttgcaagaccccaacaataagagcaactggaatgtgtttagggagtgctggaaacaagggcagccagtgatggtgtctggagtgcatcataaattgaactctgaactttggaaacctgaatccttcaggaaagagtttggtgagcaggaagtagacctagttaattgtaggaccaatgaaatcatcacaggagccacagtaggagacttctgggatggatttgaagatgttccaaatcgtttgaaaaatgaaaaagaaccaatggtgttgaaacttaaggactggccaccaggagaagattttagagatatgatgccttccaggtatgattatgaaggtggggagagatgattctgtccttcacttggtaggataaattcttttttgaggtagtgagaaaacagttttcaagaaaataacaaaagttctgtaattatactgccactgatttttcatttctagtctgtagtcattggaggcatgtttatttttagatgagatgaagaagtgattggcttttaggcctggctgactaatggaacaccacagattttccatggtaggccctgctagagaagaggctcactttttcttacaaggctgatttggaggcagttgtggaatctgacctgtcagggtcaggacaatgtagtcacagcactgagttagacaagaagacatctactgggtagatctattttcctgactgagcttgaaactttgaaaagggtgtcacaactaatcaatgatatatctctaagaataactttttgtctagaatttattgc

SEQ ID NO: 295685 - DNA, 462 bp, Homo sapiens
tccttatctctttatccttaatctctctatccttaatcctctatccttaatctctctcatgcatccttaaactgtgacttctcacctagtgcagaacttttaccaggctgtaaaagcaaaacctcgtatcagctctggaacaatacctgcagttattcttcagctgtttggacaacttagattgggtttataactattaggaatcactgcacagtttatttgggttgtgttttgtgtctgagtcccctccctcatcccttagggtccagaagagcaatggaggaagtgacagctaatgttgcagttcttattgtatggcataggactggcattatatagcagaaatcaactactgtacaatttcttggggttaaccatctttagttaaatggaattttaatttaaatgacgctttgctaattttaagtgttaagcattttgcattaaaatattcatataata

SEQ ID NO: 295686 - DNA, 1063 bp, Homo sapiens
agcggctccgaggggggcgggtccgggaggctgtgcgtgtcttgtgagagctcttgaaccaagtcagcgctggagtcggctaggcggctggaaacggcggctgccgccggtgactcagggaggcgggaggcgggggaggagctcttcctgcaggcgtggaaaccatggtgctcacgctcggagaaagttggccggtattggtggggaggaggtttctcagtctgtccgcagccgacggcagcgatggcagccacgacagctgggacgtggagcgcgtcgccgagtggccctggctctccgggaccattcgagctgtttcccacaccgacgttaccaagaaggatctgaaggtgtgtgtggaatttgatggggaatcttggaggaaaagaagatggatagaagtctacagccttctaaggagagcatttttagtagaacataatttggttttagctgaacgaaagtcacctgaaatttctgaacgaattgtacagtggcctgcaataacgtacaaacctctgttggacaaagctggtttgggatccataacttctgttcgctttctgggagatcaacaaagagtatttctttctaaagaccttttgaagcctatacaggatgtaaacagtcttcgactttctcttacggataatcagattgtcagtaaagaatttcaagctttgattgtgaagcatttagatgaaagccatcttttaaaaggtgacaaaaacttagttggttcagaagtaaaaatttatagcttggacccatctactcagtggttttcagcaaccgttgtaaatggaaacccagcatcaaaaactcttcaagtcaactgtgaggaggtaaagacaacaataactctttgtaagataactcgacaaagcatgataactatacaaagcatttatgattttctaggcactaaatacctttattattttatagggtagaaataattacagttgttttaaaaagaaattattcataagaagctcctattgttatgttaatgaacctgattttcagtatgttcttgagcattttttattttccggtatct

SEQ ID NO: 295687 - DNA, 651 bp, Homo sapiens
agcggctccgaggggggcgggtccgggaggctgtgcgtgtcttgtgagagctcttgaaccaagtcagcgctggagtcggctaggcggctggaaacggcggctgccgccggtgactcagggaggcgggaggcgggggaggagctcttcctgcaggcgtggaaaccatggtgctcacgctcggagaaagttggccggtattggtggggaggaggtttctcagtctgtccgcagccgacggcagcgatggcagccacgacagctgggacgtggagcgcgtcgccgagtggccctggctctccgggaccattcgagctgtttcccacaccgacgttaccaagaaggatctgaagatcttttcaaagacagatgaattctgattgtgctccctaatagaagtattgatgtgaaaggattgtctgggaacaagcagtgaggaagccattgtaccaacaaagactcctttgtgcgaaaataactgaaaaaaggttcctaacaaagactccaaagtggtgataacttgaaggaagcttgtcagaacagaagatatttccaccctgcctagtagatgtgtttcagaatcttcacttggccatcatctttgctttttcttaaactatgttcaaataaaggcagcaagttttagcattggca

SEQ ID NO: 295688 - DNA, 516 bp, Homo sapiens
ttcgtttattgttatttttagaatggttagcttttgcattgtacttttaaaaacacaccttaaaccagtcttttttgaatttggaaagtgacagaatggacatctactaagtcaggcctctgcagaagtgagcctcgagatcgagtttgaattaaatgtctgatttgaaaacatcctaaaatgtagagttgtgaatagaagtatacattaactttgaattgtgagtctggctgtttaatttggggttttatgttgccaaatggattgagcaaataagaattgttttataaagagagtaaaactttcccagttattctgatagttgtcttctgttgagccatttttagaaattacaattgaaccaggaattgagaagggagttctctttaagggaatattgggtttttgaatagaattcagtcatatatgaatgtgatttttaaaaatttgaggtcctgtctccttaatcttttgttttcctagccccatccaggaagtcggttttgacagacccag

SEQ ID NO: 295689 - DNA, 141 bp, Homo sapiens
ataccaatagcagtgtgaagagggactgccttcgggagtggggacagagctggcagagttcagactaaagttttccttctcttcatttagccagtgatggtgtctggagtgcatcataaattgaactctgaactttggaaa

SEQ ID NO: 295690 - DNA, 453 bp, Homo sapiens
tgcgtggtgggcactcaagtcatgccaaagtgaatgcatgtgaagctgccaccatttaaaactgtcacttaaaagttcacctctgcgttgcattagtaaagtaattgccacctgactgttttcctggcacagtggttcagaggtctgaaaaagataagcttgtgatcctttgtaggaagacataagttttgtgaaaagctggagtgattacttacagtcttaaagccctgaattgtatagtttatcacttgtttcactttcctgtttctttttatttggcaatggtattatgtttgtttagtattaagcaaatgatcttaaatttggtagcattttattatttcctaactagggacttccttttaatatctgttggtttggtatcttctaggcctctcccagtatgtgtcctgtgcagtctgtacctacaacagtttttaaggagatactgct

SEQ ID NO: 295691 - DNA, 295 bp, Homo sapiens
cactggaggatgggttttatgggactatagttctgagctgggccactttctcctgttacctcacttctatgagttgtcaagtggggacaggggacgtacctttttgcctgggggtcctggcttggaatcttctggatatgtaatctatactcattatgggaatggagtttcttgatggtaagggaatgacatatttgagacttttgttctttctccaattcagacagaaaatggactcaagaatacaccaaaaatccttgatgacatctttgcctctttggtgcaaaataagacg

SEQ ID NO: 295692 - DNA, 460 bp, Homo sapiens
ctgttttcactctttattaagcattgtactggaagtcctggtcagtgcattcagggaaaaaaaatgtgtaaagagaatgctgccaatatttgtagacagtacatgcaaaaaatccaaaagaatctacatttactaaacatttgtcagggttgctagatacaaaggtcaatttacaaaattccattgtactggatagttattgtttttaacatcagtgaggaatcgtctaagtaaatcatatcattcatacttactccctaaagtattttttttgtttcagtaaatagaaagcaagttctaaagtaattctgctagtagaatactaataagggatttgcctttcagaatgttttttcatctggatgttttggttttattttagaaaaacaaccaacaatgccaattttaaagaatgaaatcaaatgccttccacccctcccacctttaagcaaatccagca

SEQ ID NO: 295693 - DNA, 416 bp, Homo sapiens
gacattgttcattctgtaagagcgaaatggggaataaaggcaaactgcccttgttcaaacaggcaattcaaactcttttcaaagccagcctcaaaggaagacctaaaacaggtatttactgcttatgttaaattcaacatctcttgtaattgtcatttgtctgtttttcaaataacccaaggatttctatcagtgcatttgaaaggaacctggggatagctatcaagtggaaagagagagagaaagaattcatacagttcatgtgacagttcagagacccgttctgacttttcacattactttcgtagactctactgtggcctcttgtagtaggttttacatttttgtttcttgaagaagcacaaagttctaaagtagtctacctaataagtagctgtcgaatttgtaaagggttt

SEQ ID NO: 295694 - DNA, 4776 bp, Homo sapiens
  misc_feature (1082)..(1082): n is a, c, g, or t
agcggctccgaggggggcgggtccgggaggctgtgcgtgtcttgtgagagctcttgaaccaagtcagcgctggagtcggctaggcggctggaaacggcggctgccgccggtgactcagggaggcgggaggcgggggaggagctcttcctgcaggcgtggaaaccatggtgctcacgctcggagaaagttggccggtattggtggggaggaggtttctcagtctgtccgcagccgacggcagcgatggcagccacgacagctgggacgtggagcgcgtcgccgagtggccctggctctccgggaccattcgagctgtttcccacaccgacgttaccaagaaggatctgaaggtgtgtgtggaatttgatggggaatcttggaggaaaagaagatggatagaagtctacagccttctaaggagagcatttttagtagaacataatttggttttagctgaacgaaagtcacctgaaatttctgaacgaattgtacagtggcctgcaataacgtacaaacctctgttggacaaagctggtttgggatccataacttctgttcgctttctgggagatcaacaaagagtatttctttctaaagaccttttgaagcctatacaggatgtaaacagtcttcgactttctcttacggataatcagattgtcagtaaagaatttcaagctttgattgtgaagcatttagatgaaagccatcttttaaaaggtgacaaaaacttagttggttcagaagtaaaaatttatagcttggacccatctactcagtggttttcagcaaccgttgtaaatggaaacccagcatcaaaaactcttcaagtcaactgtgaggagattccagcactgaaaattgttgatccgtcactgattcatgttgaagttgtacacgataaccttgtgacatgtggtaattctgcaagaattggagctgtaaaacgcaagtcttctgagaataatggaaccctggtttccaaacaagcaaaatcttgctctgaggcctctcccagtatgtgtcctgtgcagtctgtacctacaacagtttttaaggagatactgcttggctgtactgcngcaactccacctagtaaggacccaagacagcaaagtactccccaggctgccaactctccacctaaccttggagcaaaaattcctcaaggatgtcataaacaaagtttaccagaggaaatttcttcctgtctaaatacaaagtctgaagctctgagaacaaaaccagatgtctgcaaagcagggttgctctcaaagtcctctcagattggaactggagacttgaaaattctgactgagccaaaaggcagctgtactcagcctaagacaaacactgatcaggaaaacagattggagtctgttccacaagcattgactggccttcctaaggagtgcttacctacaaaggcttcttctaaggcagaattggaaattgccaatcctcctgaactgcagaagcacctagaacatgcaccttccccatcggatgtttcaaatgcaccagaagtgaaagcaggtgtcaatagtgatagccctaataactgttcaggaaaaaaggtagaaccttcagctttagcttgccgatcacagaatttaaaggaatcttcagtaaaagtagataatgaaagctgttgttcaagaagcaacaataaaatccagaatgccccatccaggaagtcggttttgacagacccagctaaactcaaaaagctgcaacagagtggcgaggccttcgtacaggatgattcttgtgtgaacatcgtggcacagttgcctaaatgccgagagtgtcgcttggacagtctccgcaaggataaggagcaacagaaggactcacctgtgttttgccgcttctttcacttcaggaggttacaattcaacaaacatggtgtgttgcgggtagaaggcttcttaacaccaaacaagtatgacaatgaagcaattggcttgtggttacctttaaccaaaaacgttgtggggattgatttggacacagcaaagtacatcttggccaacattggagaccacttctgtcaaatggtgatttctgaaaaggaagctatgtcaactattgagccacacagacaggttgcttggaagcgagctgtcaaaggtgttcgagaaatgtgtgatgtgtgcgacaccaccatcttcaacctgcactgggtgtgtcctcggtgtgggtttggagtatgtgtggactgctaccggatgaagagaaagaattgccaacagggtgctgcttacaagactttctcttggctaaaatgtgtgaagagtcagatacatgaaccagagaacttaatgcccacacagatcattcctggaaaagcactctatgatgttggagacattgttcattctgtaagagcgaaatggggaataaaggcaaactgcccttgttcaaacaggcaattcaaactcttttcaaagccagcctcaaaggaagacctaaaacagacttctttagctggagaaaaaccgactcttggtgcagtgctccagcagaatccctcagtgttggagccagcagctgtgggtggggaagcagcctccaagccagccggcagcatgaagcctgcctgtccagccagcacatctcctctaaactggctggccgacctaaccagcgggaatgtcaacaaggaaaacaaggaaaaacaaccaacaatgccaattttaaagaatgaaatcaaatgccttccacccctcccacctttaagcaaatccagcacagtcctccatacgtttaacagcacaattttgacacccgtaagcaacaacaattctggtttcctccggaatctcttgaattcttctacaggaaagacagaaaatggactcaagaatacaccaaaaatccttgatgacatctttgcctctttggtgcaaaataagacgacttctgatttatctaagaggcctcaaggactaaccatcaagcccagcattctgggctttgacactcctcactattggctttgtgataatcgcttgctgtgcttgcaagaccccaacaataagagcaactggaatgtgtttagggagtgctggaaacaagggcagccagtgatggtgtctggagtgcatcataaattgaactctgaactttggaaacctgaatccttcaggaaagagtttggtgagcaggaagtagacctagttaattgtaggaccaatgaaatcatcacaggagccacagtaggagacttctgggatggatttgaagatgttccaaatcgtttgaaaaatgaaaaagaaccaatggtgttgaaacttaaggactggccaccaggagaagattttagagatatgatgccttccaggtttgatgatctgatggccaacattccactgcccgagtacacaaggcgagatggcaaactgaatttggcctctaggctgccaaactactttgttcggccagatctgggccccaagatgtataatgcttatggattaatcactcctgaagatcggaaatatggaacaacaaatcttcacttagatgtatctgatgcagctaatgtcatggtctatgtgggaattcccaaaggacagtgtgagcaagaagaagaagtccttaagaccatccaagatggagattctgacgaactcacaataaagcgatttattgaaggaaaagagaagccaggagcactgtggcacatatatgctgcaaaggacacggagaagataagggaatttcttaaaaaggtatcagaagagcaaggtcaagaaaacccagcagaccacgatcctattcatgatcaaagctggtatttagaccgatcattaagaaaacgtcttcatcaagagtatggagttcaaggctgggctattgtacagtttcttggggatgtggtgtttatcccggcaggagctccacatcaggttcataacttatatagctgcatcaaagtggctgaagattttgtttctccagagcatgttaaacactgcttctggcttactcaggaattccgatatctgtcacagactcataccaatcacgaagataaattacaggtgaagaatgttatctaccatgcagtgaaagatgcagttgctatgctgaaagccagtgaatccagttttggcaaaccttaatctccctgcacattggaaatgaattacaggcagctgttcaaactcttcaggcaggattcctgtggactttgagattcatgttacctcatcttcttttttaaactgtacccaacttgtgagggtactctgtctaatgtatatttctagtgtttacagacagtaaatgtgtatatgtagtaactatttacagaacatgcatccttaaactgtgacttctcacctagtgcagaacttttaccaggctgtaaaagcaaaacctcgtatcagctctggaacaatacctgcagttattcttcagctgtttggacaacttagattgggtttataactattaggaatcactgcacagtttatttgggttgtgttttgtgtctgagtcccctccctcatcccttagggtccagaagagcaatggaggaagtgacagctaatgttgcagttcttattgtatggcataggactggcattatatagcagaaatcaactactgtacaatttcttggggttaaccatctttagttaaatggaattttaatttaaatgacgctttgctaattttaagtgttaagcattttgcattaaaatattcatataataaaaaaaaaaaaaattcactggccgccggtttacaacgtgtggactggga

SEQ ID NO: 295695 - DNA, 2529 bp, Homo sapiens
ggtgcggggggtaataccttgctgtgtttaagttgctgacatctctcctaccttttagttattctctactagtgcgggattactgcagctgtggggatacccagggctaactattaggtggttttgttctggatatttatcttacttgttggtcggctattaggagagaagaaaagaaaaggaagctgtcattcttcagcttatgtaaaatcgtcctttaatgcttaacacagacttctttagctggagaaaaaccgactcttggtgcagtgctccagcagaatccctcagtgttggagccagcagctgtgggtggggaagcagcctccaagccagccggcagcatgaagcctgcctgtccagccagcacatctcctctaaactggctggccgacctaaccagcgggaatgtcaacaaggaaaacaaggaaaaacaaccaacaatgccaattttaaagaatgaaatcaaatgccttccacccctcccacctttaagcaaatccagcacagtcctccatacgtttaacagcacaattttgacacccgtaagcaacaacaattctggtttcctccggaatctcttgaattcttctacaggaaagacagaaaatggactcaagaatacaccaaaaatccttgatgacatctttgcctctttggtgcaaaataagacgacttctgatttatctaagaggcctcaaggactaaccatcaagcccagcattctgggctttgacactcctcactattggctttgtgataatcgcttgctgtgcttgcaagaccccaacaataagagcaactggaatgtgtttagggagtgctggaaacaagggcagccagtgatggtgtctggagtgcatcataaattgaactctgaactttggaaacctgaatccttcaggaaagagtttggtgagcaggaagtagacctagttaattgtaggaccaatgaaatcatcacaggagccacagtaggagacttctgggatggatttgaagatgttccaaatcgtttgaaaaatgaaaaagaaccaatggtgttgaaacttaaggactggccaccaggagaagattttagagatatgatgccttccaggtttgatgatctgatggccaacattccactgcccgagtacacaaggcgagatggcaaactgaatttggcctctaggctgccaaactactttgttcggccagatctgggccccaagatgtataatgcttatggattaatcactcctgaagatcggaaatatggaacaacaaatcttcacttagatgtatctgatgcagctaatgtcatggtctatgtgggaattcccaaaggacagtgtgagcaagaagaagaagtccttaagaccatccaagatggagattctgacgaactcacaataaagcgatttattgaaggaaaagagaagccaggagcactgtggcacatatatgctgcaaaggacacggagaagataagggaatttcttaaaaaggtatcagaagagcaaggtcaagaaaacccagcagaccacgatcctattcatgatcaaagctggtatttagaccgatcattaagaaaacgtcttcatcaagagtatggagttcaaggctgggctattgtacagtttcttggggatgtggtgtttatcccggcaggagctccacatcaggttcataacttatatagctgcatcaaagtggctgaagattttgtttctccagagcatgttaaacactgcttctggcttactcaggaattccgatatctgtcacagactcataccaatcacgaagataaattacaggtgaagaatgttatctaccatgcagtgaaagatgcagttgctatgctgaaagccagtgaatccagttttggcaaaccttaatctccctgcacattggaaatgaattacaggcagctgttcaaactcttcaggcaggattcctgtggactttgagattcatgttacctcatcttcttttttaaactgtacccaacttgtgagggtactctgtctaatgtatatttctagtgtttacagacagtaaatgtgtatatgtagtaactatttacagaacatgcatccttaaactgtgacttctcacctagtgcagaacttttaccaggctgtaaaagcaaaacctcgtatcagctctggaacaatacctgcagttattcttcagctgtttggacaacttagattgggtttataactattaggaatcactgcacagtttatttgggttgtgttttgtgtctgagtcccctccctcatcccttagggtccagaagagcaatggaggaagtgacagctaatgttgcagttcttattgtatggcataggactggcattatatagcagaaatcaactactgtacaatttcttggggttaaccatctttagttaaatggaattttaatttaaatgacgctttgctaattttaagtgttaagcattttgcattaaaatattcatataataaaaaaaaaaaaaattcactggccgccggtttacaacgtgtggactggga

SEQ ID NO: 295696 - DNA, 1447 bp, Homo sapiens
aaagaatttttttgcaataatttgatccagaatttttattctcagcagaagagtcaatcagggacctaccatcccccaggtaggtagtggaaagactgtggcagcctttgttgtcttttgtaaaacttaaggcactttgtttttgcaggattaatcactcctgaagatcggaaatatggaacaacaaatcttcacttagatgtatctgatgcagctaatgtcatggtctatgtgggaattcccaaaggacagtgtgagcaagaagaagaagtccttaagaccatccaagatggagattctgacgaactcacaataaagcgatttattgaaggaaaagagaagccaggagcactgtggcacatatatgctgcaaaggacacggagaagataagggaatttcttaaaaaggtatcagaagagcaaggtcaagaaaacccagcagaccacgatcctattcatgatcaaagctggtatttagaccgatcattaagaaaacgtcttcatcaagagtatggagttcaaggctgggctattgtacagtttcttggggatgtggtgtttatcccggcaggagctccacatcaggttcataacttatatagctgcatcaaagtggctgaagattttgtttctccagagcatgttaaacactgcttctggcttactcaggaattccgatatctgtcacagactcataccaatcacgaagataaattacaggtgaagaatgttatctaccatgcagtgaaagatgcagttgctatgctgaaagccagtgaatccagttttggcaaaccttaatctccctgcacattggaaatgaattacaggcagctgttcaaactcttcaggcaggattcctgtggactttgagattcatgttacctcatcttcttttttaaactgtacccaacttgtgagggtactctgtctaatgtatatttctagtgtttacagacagtaaatgtgtatatgtagtaactatttacagaacatgcatccttaaactgtgacttctcacctagtgcagaacttttaccaggctgtaaaagcaaaacctcgtatcagctctggaacaatacctgcagttattcttcagctgtttggacaacttagattgggtttataactattaggaatcactgcacagtttatttgggttgtgttttgtgtctgagtcccctccctcatcccttagggtccagaagagcaatggaggaagtgacagctaatgttgcagttcttattgtatggcataggactggcattatatagcagaaatcaactactgtacaatttcttggggttaaccatctttagttaaatggaattttaatttaaatgacgctttgctaattttaagtgttaagcattttgcattaaaatattcatataataaaaaaaaaaaaaattcactggccgccggtttacaacgtgtggactggga

SEQ ID NO: 295697 - DNA, 2185 bp, Homo sapiens
  misc_feature (1082)..(1082): n is a, c, g, or t
  misc_feature (2183)..(2185): n is a, c, g, or t
agcggctccgaggggggcgggtccgggaggctgtgcgtgtcttgtgagagctcttgaaccaagtcagcgctggagtcggctaggcggctggaaacggcggctgccgccggtgactcagggaggcgggaggcgggggaggagctcttcctgcaggcgtggaaaccatggtgctcacgctcggagaaagttggccggtattggtggggaggaggtttctcagtctgtccgcagccgacggcagcgatggcagccacgacagctgggacgtggagcgcgtcgccgagtggccctggctctccgggaccattcgagctgtttcccacaccgacgttaccaagaaggatctgaaggtgtgtgtggaatttgatggggaatcttggaggaaaagaagatggatagaagtctacagccttctaaggagagcatttttagtagaacataatttggttttagctgaacgaaagtcacctgaaatttctgaacgaattgtacagtggcctgcaataacgtacaaacctctgttggacaaagctggtttgggatccataacttctgttcgctttctgggagatcaacaaagagtatttctttctaaagaccttttgaagcctatacaggatgtaaacagtcttcgactttctcttacggataatcagattgtcagtaaagaatttcaagctttgattgtgaagcatttagatgaaagccatcttttaaaaggtgacaaaaacttagttggttcagaagtaaaaatttatagcttggacccatctactcagtggttttcagcaaccgttgtaaatggaaacccagcatcaaaaactcttcaagtcaactgtgaggagattccagcactgaaaattgttgatccgtcactgattcatgttgaagttgtacacgataaccttgtgacatgtggtaattctgcaagaattggagctgtaaaacgcaagtcttctgagaataatggaaccctggtttccaaacaagcaaaatcttgctctgaggcctctcccagtatgtgtcctgtgcagtctgtacctacaacagtttttaaggagatactgcttggctgtactgcngcaactccacctagtaaggacccaagacagcaaagtactccccaggctgccaactctccacctaaccttggagcaaaaattcctcaaggatgtcataaacaaagtttaccagaggaaatttcttcctgtctaaatacaaagtctgaagctctgagaacaaaaccagatgtctgcaaagcagggttgctctcaaagtcctctcagattggaactggagacttgaaaattctgactgagccaaaaggcagctgtactcagcctaagacaaacactgatcaggaaaacagattggagtctgttccacaagcattgactggccttcctaaggagtgcttacctacaaaggcttcttctaaggcagaattggaaattgccaatcctcctgaactgcagaagcacctagaacatgcaccttccccatcggatgtttcaaatgcaccagaagtgaaagcaggtgtcaatagtgatagccctaataactgttcaggaaaaaaggtagaaccttcagctttagcttgccgatcacagaatttaaaggaatcttcagtaaaagtagataatgaaagctgttgttcaagaagcaacaataaaatccagaatgccccatccaggaagtcggttttgacagacccagctaaactcaaaaagctgcaacagagtggcgaggccttcgtacaggatgattcttgtgtgaacatcgtggcacagttgcctaaatgccgagagtgtcgcttggacagtctccgcaaggataaggagcaacagaaggactcacctgtgttttgccgcttctttcacttcaggaggttacaattcaacaaacatggtgtgttgcgggtagaaggcttcttaacaccaaacaagtatgacaatgaagatggtggggtccttaacaaaagtgggggctgcttggccagcaagtaatctggcaaatgggacatctgtaagggatctgaaggaatattaattgacaagaggtgtgaacgctgtaggtcgaaggtggtggaaccacttacgagagttccgggtggatttgtgagaacaataagggtaactgaatggaaaaaagacaggagatgatagagtaccctagcactccgnnn

SEQ ID NO: 295698 - DNA, 599 bp, Homo sapiens
agcggctccgaggggggcgggtccgggaggctgtgcgtgtcttgtgagagctcttgaaccaagtcagcgctggagtcggctaggcggctggaaacggcggctgccgccggtgactcagggaggcgggaggcgggggaggagctcttcctgcaggcgtggaaaccatggtgctcacgctcggagaaagttggccggtattggtggggaggaggtttctcagtctgtccgcagccgacggcagcgatggcagccacgacagctgggacgtggagcgcgtcgccgagtggccctggctctccgggaccattcgagctgtttcccacaccgacgttaccaagaaggatctgaaggtacaggcggctccgggcctctgccaccggacgtttcgcagttaccgtggtaacgcgaccatcggttccctccttccgttttctgaaaacggagaccagaaagttggcatatgatctgaaggtgcaggaagctagatcttgaaagtctttggaatggttgtatagagccgagttgtgtttggcccacagctcctggctgcctggctttaataatgggcttagggttgttcagacacgcttcattaatgc

SEQ ID NO: 295699 - DNA, 450 bp, Homo sapiens
gtttgatgatctgatggccaacattccactgcccgagtacacaaggcgagatggcaaactgaatttggcctctaggctgccaaactactttgttcggccagatctgggccccaagatgtataatgcttatggtaaggaggagatggctaactttaaaatggaaataaaacaattcaaaatgtttggaaaattgattttgtgggagggagaggtggaaaacacccataatcctaatgcgtaatacagccacagctttcatttttacatatttcctttcgttcccgtggccacatagtttgtgtgtttcattttcatagttgcagttgtagggcatatgcaattttgtagtttttccctttactgtacctaattttacattgtaaaatctttacatgttacttaatagtctttagatgacttttaatggtgtgtgatacatcattgagagaa

SEQ ID NO: 295700 - DNA, 2556 bp, Homo sapiens
  misc_feature (1150)..(1150): n is a, c, g, or t
  misc_feature (1280)..(1280): n is a, c, g, or t
  misc_feature (1755)..(1755): n is a, c, g, or t
  misc_feature (2048)..(2048): n is a, c, g, or t
  misc_feature (2334)..(2334): n is a, c, g, or t
  misc_feature (2533)..(2533): n is a, c, g, or t
catgagtcagaaattcaagccaccagatgctttccaactaacagggaccaaatgggaccgttctaagatatcctaaaagatttgggagttagaggaggtaaactaagataattatattacaaagggtacaagaccacaagacaacaaccgactccggaattcttggacctccgccttccgtacaaggtgctgggcctgggaacttgggatgggggagggggacacattgcgcggtggccctgaggtgacggggagacgcagggcgagccgtgtccctcaatctaaggggagaaataggagcgcacacatgggtcacccaacgaagcaaggcgtccctgtgaactgtgcggctggctcttgggggcaacaccagggctgacctgaggaaagggcaaccagtactcccagcgatgacttcgggtcggcggaaggaaaagacctgagcgctaagagcttgggatacgggtcaggcccatccttaggggaaaccggctgggaagcgagggggggcgcaggccgagccggaacgagacacagaccgggtaggtcaagggagggggggtgtccggctggggcagttacaagcacgggaatcggcgaggctcagcagcccgcttcccgtcttgggtcatccttctgctagcggctgctccgactgttccaggcccagccgccccgtccactgccaccaccaacgccgccgccatcttacactggccagcggccgccaccaccaccgcctccgctctctgcgcttgcgcctgcgctgccacgctttccggccccgtttgcgacgatgtgctcgagaagactgagggaagagtggtcgcgcgagctcacggctcgcaaccctcctcgaaggacgcacaaggggcggggcttaaggccaacggaaaacagagcgagaggcgcctgcgcattaccgaagaggcaaagttgtttttgtagtttcttcgggcttgcttatcttgtgatactcaaaacaaatgcgagttaggggctacccagagttgtgatagaaataaactaaatttccagcggattggcaggccacttcctggatgatggccagttttgccgtttttgaacactggaacgagcaatgattgccacaaggatttcttctgaaaatccccgtttcctttcaggnctttgtttccttaagtggtttctatactatcgaggcccattttcccctgagagtccccatttacgtatttttaaagaaggggctcagtagcttgaggtgtagctattccagaagctcttttctgaagagnggtggtgtgggtaaaggttcccaagagtgggccgggtgatgtggggtgacttttgtactctgtttcgttatgacacctacagtaaccctgcagaggattactcccagctgccaggctggggtattttttttttttttcttaccagaagcccagggtgcaaaaatctgaccctttctcacctcccctaccgctactctcctattccaagtcattacatattacttaagactaccgcaatagaaacttacctcgtttgtctacttccattattgccattacagttaaacataaggcagccagagtgctttttaaaaatgtaaggtctggccgggcgcggtggctcatgcctgtaatcctagcactttgggaggcggatgtgggcggatcacttgaggtcaggagttcgaaactcgtttgaaaccaggccaacatggtgaaacccgtctctacgaaaaatacaaaaaaaaaaaaaaanaaaaaaaaagtaatgtcgtattatttccccagtccccaccctgctcaaaacctccaattcccatcacataataaaagtcaaaagtatgatagccttagaggccatcaaaaaatgaattgcctctaaggaggaccctacatgatctgatctagcacctgcctatttatctgattcatctcctcccacactgcctagctctgctctagcctcactagccttactgtcactccagtcaaagcatgtcccagccctagggtttttttccttttcttggaatgtccatctactagatntttactagacttgaggtgtctattgaaatcctacttcctaacacaggcagctcttgactattgtaactaaaatggaacctcatgtcatcctcctctatccccttactctgcactgtttttttaataacattttttacctataacatttaatctaaaattatgtttgtgatccagctatactactagaatataaattcttgagggcaaggactgtgtttttatcatctttgtaatctcaacacctagaagagggctacagcacaaagtagctatttaatgccccacngtcctattcattctttcattcattcagtcaacaactattgaattcctgctctggaaggccctgttctatgtgctggggctgcaacagtgaatagaaccaagattcttgcattcatggaacttattagtgcaagggttgggagcataggaggaggggagagacacacagataataaagttataaagagtactgtaaaggnaaataaagcagaataaaaatggg

SEQ ID NO: 295701 - DNA, 2078 bp, Homo sapiens
  misc_feature (672)..(672): n is a, c, g, or t
  misc_feature (802)..(802): n is a, c, g, or t
  misc_feature (1277)..(1277): n is a, c, g, or t
  misc_feature (1570)..(1570): n is a, c, g, or t
  misc_feature (1856)..(1856): n is a, c, g, or t
  misc_feature (2055)..(2055): n is a, c, g, or t
catgagtcagaaattcaagccaccagatgctttccaactaacagggaccaaatgggaccgttctaagatatcctaaaagatttgggagttagaggaggtaaactaagataattatattacaaagggtacaagaccacaagacaacaaccgactccggaattcttggacctccgccttccgtacaaggcccagccgccccgtccactgccaccaccaacgccgccgccatcttacactggccagcggccgccaccaccaccgcctccgctctctgcgcttgcgcctgcgctgccacgctttccggccccgtttgcgacgatgtgctcgagaagactgagggaagagtggtcgcgcgagctcacggctcgcaaccctcctcgaaggacgcacaaggggcggggcttaaggccaacggaaaacagagcgagaggcgcctgcgcattaccgaagaggcaaagttgtttttgtagtttcttcgggcttgcttatcttgtgatactcaaaacaaatgcgagttaggggctacccagagttgtgatagaaataaactaaatttccagcggattggcaggccacttcctggatgatggccagttttgccgtttttgaacactggaacgagcaatgattgccacaaggatttcttctgaaaatccccgtttcctttcaggnctttgtttccttaagtggtttctatactatcgaggcccattttcccctgagagtccccatttacgtatttttaaagaaggggctcagtagcttgaggtgtagctattccagaagctcttttctgaagagnggtggtgtgggtaaaggttcccaagagtgggccgggtgatgtggggtgacttttgtactctgtttcgttatgacacctacagtaaccctgcagaggattactcccagctgccaggctggggtattttttttttttttcttaccagaagcccagggtgcaaaaatctgaccctttctcacctcccctaccgctactctcctattccaagtcattacatattacttaagactaccgcaatagaaacttacctcgtttgtctacttccattattgccattacagttaaacataaggcagccagagtgctttttaaaaatgtaaggtctggccgggcgcggtggctcatgcctgtaatcctagcactttgggaggcggatgtgggcggatcacttgaggtcaggagttcgaaactcgtttgaaaccaggccaacatggtgaaacccgtctctacgaaaaatacaaaaaaaaaaaaaaanaaaaaaaaagtaatgtcgtattatttccccagtccccaccctgctcaaaacctccaattcccatcacataataaaagtcaaaagtatgatagccttagaggccatcaaaaaatgaattgcctctaaggaggaccctacatgatctgatctagcacctgcctatttatctgattcatctcctcccacactgcctagctctgctctagcctcactagccttactgtcactccagtcaaagcatgtcccagccctagggtttttttccttttcttggaatgtccatctactagatntttactagacttgaggtgtctattgaaatcctacttcctaacacaggcagctcttgactattgtaactaaaatggaacctcatgtcatcctcctctatccccttactctgcactgtttttttaataacattttttacctataacatttaatctaaaattatgtttgtgatccagctatactactagaatataaattcttgagggcaaggactgtgtttttatcatctttgtaatctcaacacctagaagagggctacagcacaaagtagctatttaatgccccacngtcctattcattctttcattcattcagtcaacaactattgaattcctgctctggaaggccctgttctatgtgctggggctgcaacagtgaatagaaccaagattcttgcattcatggaacttattagtgcaagggttgggagcataggaggaggggagagacacacagataataaagttataaagagtactgtaaaggnaaataaagcagaataaaaatggg

SEQ ID NO: 295702 - DNA, 429 bp, Homo sapiens
tactctcctattccaagtcattacatattacttaagactaccgcaatagaaacttacctcgtttgtctacttccattattgccattacagttaaacataaggcagccagagtgctttttaaaaatgtaaggtctggccgggcgcggtggctcatgcctgtaatcctagcactttgggaggcggatgtgggcggatcacttgaggtcaggagttcgaaactcgtttgaaaccaggccaacatggtgaaacccgtctctacgaaaaatacaaaaaaaaaaaaaaattacccggcatggtggagcgcgcctgcaatcccagctacttgggaggctgaggcaggagaattgcttgaacccggaggcggaggttgcagtgagctgagatcgcaccactgcactccaggctgggcaatggaatgagactccgtct

SEQ ID NO: 295703 - DNA, 467 bp, Homo sapiens
atcccaccccacctcccgctgcagattaattactgtaagtgcaactccaatcgggctggtgaccccccaggaaacctctgaagctgtcccaggctgttcccaacatgggacctccactctggcacaccaggacccgaggcccctgacaggctcctcgttcctgcctcgctcaaggctcaggtcccccacctgaaatactccctcccaccagcatctcctgcctcgctcctgctgccaggtccccaaaagctcttgttcatgagctcgcctgccatccacagcccccaccagaacccaagtggctgtggaattcgctgccctgattctctgcccagagcctcggtccagactgtgttccctggcgaattagtgttcagcatttttgtttatttgtttgttctttaacaaaagttgttttggtttgagattcagcaaaaatacacactgcattcagcttcctctccaaa

SEQ ID NO: 295704 - DNA, 5909 bp, Homo sapiens
gcggcgtttcccgcgcgggctacctcagttctcgggcgtacggcgcggcctgtcctactgccgccggcgccgcggccgtcatggggttcctgaaactgattgagattgagaactttaagtcgtacaagggtcgacagattatcggaccatttcagaggttcaccgccatcattggacccaatggctctggtaagtcaaatctcatggatgccatcagctttgtgctaggtgaaaaaaccagcaacctgcgggtaaagaccctgcgggacctgatccatggagctcctgtgggcaagccagctgccaaccgggcctttgtcagcatggtctactctgaggagggtgctgaggaccgtacctttgcccgtgtcattgtaggaggttcttctgagtacaagatcaacaacaaagtggtccaactacatgagtacagtgaggaattagagaagttgggcattctcatcaaagctcgtaacttcctcgttttccagggtgctgtggaatctattgccatgaagaaccccaaagagaggacagctctatttgaagagattagtcgttctggggagctggcgcaggagtatgacaagcgaaagaaggaaatggtgaaggctgaagaggacacacagtttaattaccatcgcaagaaaaatattgcggctgaacgcaaggaagcaaagcaggagaaagaagaggctgaccggtaccagcgcctgaaggatgaggtagtacgggctcaggtacagctgcagctctttaagctttaccataatgaagtggaaattgagaagctcaacaaggaactggcctcaaagaacaaggagatcgagaaggacaagaagcgtatggacaaggtggaggatgaactgaaggagaagaagaaggagctgggcaaaatgatgcgggagcagcagcagattgagaaggagatcaaggagaaggactcagaattgaaccagaagcggcctcagtacatcaaagccaaggagaacacctcccacaaaatcaagaagctggaagcagccaagaagtctctgcagaatgctcagaagcactacaagaagcgtaaaggtgacatggatgagctggagaaggagatgctgtcagtggagaaggctcggcaggagtttgaagaacggatggaagaagagagtcagagtcagggcagagatttgacgttggaggagaatcaggtgaagaaataccaccggttgaaagaagaagccagcaagagagcagctaccctggcccaggagctggagaaattcaatcgagaccagaaagctgaccaggaccgtctggatctggaagaacggaagaaagtagagacagaggccaagatcaagcaaaagctgcgggaaattgaagagaatcagaagcggattgagaaactggaggaatacatcaccactagcaagcagtccctagaagagcagaagaagctagagggggagctgacagaggaggtggagatggccaagcggcgtattgatgaaatcaataaggagctgaaccaggtgatggagcagctaggggatgcccgcatcgaccgccaggagagcagccgccagcagcgaaaggcagagataatggaaagcatcaagcgcctttaccctggctctgtgtacggccgcctcattgacctatgccagcccacacaaaagaagtatcagattgctgtaaccaaggttttgggcaagaacatggatgccattattgtggactcggagaagacaggccgggactgtattcagtatatcaaggagcagcgtggggagcctgagaccttcttgcctcttgactacctggaggtgaagcctacagatgagaaactccgggagctgaagggggccaagctagtgattgatgtgattcgctatgagccacctcatatcaaaaaggccctgcagtatgcttgtggcaatgcccttgtctgtgacaacgtggaagatgcccgccgcattgcctttggaggccaccagcgccacaagacagtggcactggatggaaccctattccagaagtcaggagtgatctctggtggggccagtgacctgaaggccaaggcacggcgctgggatgagaaagcagtagacaagttgaaagagaagaaggagcgcttgacagaggagctgaaagagcagatgaaggcaaaacggaaagaggcagagctgcgtcaggtgcagtctcaggcccatggactgcagatgcggctcaagtactcccagagtgacctagaacagaccaagacacgacatctagccctgaatctgcaggaaaaatccaagctggagagtgagctagccaactttgggcctcgcattaatgatatcaagaggatcattcagagccgagagagggaaatgaaagacttgaaggagaagatgaaccaggtagaggatgaggtgtttgaagagttttgtcgggagattggtgtgcgcaacatccgggagtttgaggaagaaaaggtgaaacggcagaatgaaatcgccaagaagcgtttggagtttgagaatcagaagactcgcttgggcattcagttggattttgaaaagaaccaactgaaggaggaccaagataaagtacacatgtgggagcagacagtgaaaaaagatgaaaatgagatagaaaagctcaaaaaggaggaacaaagacacatgaagatcatagatgagaccatggctcagctacaagacctgaagaatcagcatctggccaagaagtcggaagtgaatgacaagaatcatgagatggaggagattcgtaagaaactcgggggcgccaacaaggaaatgacccatttacagaaggaggtgacagccattgagaccaagcttgaacagaagcgcagtgaccgtcacaacttgctacaggcctgtaagatgcaggacattaagttgccactgtcaaaaggcaccatggatgatattagtcaggaagagggtagctcccagggggaggactcagtgagtggttcacagagaatttccagtatctatgcacgagaggccctcattgagattgactacggtgatctgtgtgaggatctgaaggatgcccaggctgaggaagagatcaagcaagagatgaacacactgcagcagaagctgaatgagcagcagagtgtgcttcagcgtattgccgcccccaacatgaaggccatggaaaagctggaaagtgtccgagacaagttccaggagacctcagatgagtttgaagcagcccgaaagcgagcaaagaaggccaagcaggcattcgaacagatcaagaaggagcgctttgaccgcttcaatgcttgttttgaatctgtggctaccaacattgatgagatctataaggccctgtcccgcaatagcagtgcccaggcattcctgggccctgagaaccctgaagagccctacttggatggcatcaactacaactgtgtggctcctgggaaacgcttccggcctatggacaacttgtcaggcggggagaagacagtggcagctctggccctgctctttgccatccacagctacaagccagcccccttcttcgtcctggatgagattgatgctgccttggataacaccaacattggcaaggtggcaaattacatcaaggagcagtcgacttgcaacttccaggccatcgtcatctctctcaaggaggagttctacaccaaggccgagagcctcattggagtctatcctgagcaaggggactgtgtgatcagcaaagtcctgaccttcgacctcaccaagtacccagatgccaaccccaaccccaatgagcagtagcagtatttttgccctcccgccctgtctggatccctaagctgtccctctcccaatctctggatatttgactcccaaccttccccctacctcctggccctttttggtgtagtcatgggatttaggcactgctaatcaagcatgaagaggaacagaggtgatgttaggtctggagcaaaaattcctgaacgacagggagtattctggcctctgaaaggaggtgctgagctgaacagggccatctgttcatcacacacacccccttcctccccctcatcacccataatcgtgggccccttgggcctcttgcccactgtgtgtgtgggtatgtatgtgtgtatgtatgtatccgcatgtgtgcatgtgagtatgtttgcaaaataataaaggatattggagacctgttttagaaggagcctaggctgaatttgattccaagagagcttaggatgacagcacccctgagctgggcaaaggtactcaggacctcataggagtcttaggcagttacctgaaactgccttcattcactcatttgtgtattcattcatttatgtattcatcagacacataccgaacaccctctatttgtcaggctctgtgcttggaatacagagttgaatcagacatgatctctaccctcctagtaaggagatacagtgggttcatgaatgactatagttagctgaatgtcatatgtactttgaatttgagaagtgggtgatcccctctaggcttcctggaggtcacatttaagctagaccttgacaaattggtaggatttggtcaggcactaggagtggagcatgagctctggggacagacagttatgggttctggtcccactttttatcacttactagttgtttgaccttgggcaagtcatttgaccttctgtgcctcagtttcctcatctgtaaaatggggctaacaatattacctacctcataggatttaatgatgtcaagctcctcactggaggccttatcccttcgtggagcccactaggtgccgacccctcagaatataaccctcatgcctggacccctgagagcttctgatcccagctattagggacagaagaagcctccaaatctggaaggtgctgaatgccctgctgactgggaaagtttcagggcactgatggggtctacctggtaagcggagggcctgaggaaacctgtagcttcaatcatgtctggtaaccgggtgcctgagccccaatctgggttgtgaggaaataggggagaggtatcctgggccacatcccagcctaacacctgtgaggttcattttaggaactaacctcattagctataaggatcatgcagaggcagcaaagccgggtgcgatgagctcagcctttactcattcacatacaccatcacactttaattccaatctgtatattgctttttaaaagttaagtccattctaattacccaaatatgcatgaattcattctccttttgagaagttagattgttaaagatagtctcattcagctaccaaccactccttgatccttcccttcttagtggctgttgtttgttgtacttccgtttagactttgttttaatgcttgtacgtacatatgtgaactcattggaaatattgtgtgtttaatgcaaatgatatattgaattgtttagcaatttgttttctttgcttaacgatgtttttgagatctgtgcatgttacttaatgtagctcaatccatcttctgtaattgctgtatagattgtcatcatatgattaccacattttacttacgcatttcttttgtgatggacattaagactgtttttaggttttgctattacaaaatactacacaggagcatcactatgcctgtgtgaaagtatatgtatgaaagtttacctagggttgattcctagaagtggaattgcaaagtcataggatatttatatattggtttttaataatacttccaaattgccctcctgtactatttactcagtatttttcttgaggttgatctgaggtctaacattgttatcctatatcattttcatcccaagtagtgatatctgtgaaatcacaggtttgatgtgtgctaattatgtattcttctaatacatattaaaagacataactatcaaaacaaaa

SEQ ID NO: 295705 - DNA, 6046 bp, Homo sapiens
gcggcgtttcccgcgcgggctacctcagttctcgggcgtacggcgcggcctgtcctactgccgccggcgccgcggccgtcatggggttcctgaaactgattgagattgagaactttaagtcgtacaagggtcgacagattatcggaccatttcagaggttcaccgccatcattggacccaatggctctggtaagtcaaatctcatggatgccatcagctttgtgctaggtgaaaaaaccagcaacctgcgggtaaagaccctgcgggacctgatccatggagctcctgtgggcaagccagctgccaaccgggcctttgtcagcatggtctactctgaggagggtgctgaggaccgtacctttgcccgtgtcattgtaggaggttcttctgagtacaagatcaacaacaaagtggtccaactacatgagtacagtgaggaattagagaagttgggcattctcatcaaagctcgtaacttcctcgttttccagggtgctgtggaatctattgccatgaagaaccccaaagagaggacagctctatttgaagagattagtcgttctggggagctggcgcaggagtatgacaagcgaaagaaggaaatggtgaaggctgaagaggacacacagtttaattaccatcgcaagaaaaatattgcggctgaacgcaaggaagcaaagcaggagaaagaagaggctgaccggtaccagcgcctgaaggatgaggtagtacgggctcaggtacagctgcagctctttaagctttaccataatgaagtggaaattgagaagctcaacaaggaactggcctcaaagaacaaggagatcgagaaggacaagaagcgtatggacaaggtggaggatgaactgaaggagaagaagaaggagctgggcaaaatgatgcgggagcagcagcagattgagaaggagatcaaggagaaggactcagaattgaaccagaagcggcctcagtacatcaaagccaaggagaacacctcccacaaaatcaagaagctggaagcagccaagaagtctctgcagaatgctcagaagcactacaagaagcgtaaaggtgacatggatgagctggagaaggagatgctgtcagtggagaaggctcggcaggagtttgaagaacggatggaagaagagagtcagagtcagggcagagatttgacgttggaggagaatcaggtgaagaaataccaccggttgaaagaagaagccagcaagagagcagctaccctggcccaggagctggagaaattcaatcgagaccagaaagctgaccaggaccgtctggatctggaagaacggaagaaagtagagacagaggccaagatcaagcaaaagctgcgggaaattgaagagaatcagaagcggattgagaaactggaggaatacatcaccactagcaagcagtccctagaagagcagaagaagctagagggggagctgacagaggaggtggagatggccaagcggcgtattgatgaaatcaataaggagctgaaccaggtgatggagcagctaggggatgcccgcatcgaccgccaggagagcagccgccagcagcgaaaggcagagataatggaaagcatcaagcgcctttaccctggctctgtgtacggccgcctcattgacctatgccagcccacacaaaagaagtatcagattgctgtaaccaaggttttgggcaagaacatggatgccattattgtggactcggagaagacaggccgggactgtattcagtatatcaaggagcagcgtggggagcctgagaccttcttgcctcttgactacctggaggtgaagcctacagatgagaaactccgggagctgaagggggccaagctagtgattgatgtgattcgctatgagccacctcatatcaaaaaggccctgcagtatgcttgtggcaatgcccttgtctgtgacaacgtggaagatgcccgccgcattgcctttggaggccaccagcgccacaagacagtggcactggatggaaccctattccagaagtcaggagtgatctctggtggggccagtgacctgaaggccaaggcacggcgctgggatgagaaagcagtagacaagttgaaagagaagaaggagcgcttgacagaggagctgaaagagcagatgaaggcaaaacggaaagaggcagagctgcgtcaggtgcagtctcaggcccatggactgcagatgcggctcaagtactcccagagtgacctagaacagaccaagacacgacatctagccctgaatctgcaggaaaaatccaagctggagagtgagctagccaactttgggcctcgcattaatgatatcaagaggatcattcagagccgagagagggaaatgaaagacttgaaggagaagatgaaccaggtagaggatgaggtgtttgaagagttttgtcgggagattggtgtgcgcaacatccgggagtttgaggaagaaaaggtgaaacggcagaatgaaatcgccaagaagcgtttggagtttgagaatcagaagactcgcttgggcattcagttggattttgaaaagaaccaactgaaggaggaccaagataaagtacacatgtgggagcagacagtgaaaaaagatgaaaatgagatagaaaagctcaaaaaggaggaacaaagacacatgaagatcatagatgagaccatggctcagctacaagacctgaagaatcagcatctggccaagaagtcggaagtgaatgacaagaatcatgagatggaggagattcgtaagaaactcgggggcgccaacaaggaaatgacccatttacagaaggaggtgacagccattgagaccaagcttgaacagaagcgcagtgaccgtcacaacttgctacaggcctgtaagatgcaggacattaagttgccactgtcaaaaggcaccatggatgatattagtcaggaagagggtagctcccagggggaggactcagtgagtggttcacagagaatttccagtatctatgcacgagaggccctcattgagattgactacggtgatctgtgtgaggatctgaaggatgcccaggctgaggaagagatcaagcaagagatgaacacactgcagcagaagctgaatgagcagcagagtgtgcttcagcgtattgccgcccccaacatgaaggccatggaaaagctggaaagtgtccgagacaagttccaggagacctcagatgagtttgaagcagcccgaaagcgagcaaagaaggccaagcaggcattcgaacagatcaagaaggagcgctttgaccgcttcaatgcttgttttgaatctgtggctaccaacattgatgagatctataaggccctgtcccgcaatagcagtgcccaggcattcctgggccctgagaaccctgaagagccctacttggatggcatcaactacaactgtgtggctcctgggaaacgcttccggcctatggacaacttgtcaggcggggagaagacagtggcagctctggccctgctctttgccatccacagctacaagccagcccccttcttcgtcctggatgagattgatgctgccttggataacaccaacattggcaaggtggcaaattacatcaaggagcagtcgacttgcaacttccaggccatcgtcatctctctcaaggaggagttctacaccaaggccgagagcctcattggagtctatcctgagcaaggggactgtgtgatcagcaaagtcctgaccttcgacctcaccaagtacccagatgccaaccccaaccccaatgagcagtagcagtatttttgccctcccgccctgtctggatccctaagctgtccctctcccaatctctggatatttgactcccaaccttccccctacctcctggccctttttggtgtagtcatgggatttaggcactgctaatcaagcatgaagaggaacagaggtgatgttaggtctggagcaaaaattcctgaacgacagggagtattctggcctctgaaaggaggtgctgagctgaacagggccatctgttcatcacacacacccccttcctccccctcatcacccataatcgtgggccccttgggcctcttgcccactgtgtgtgtgggtatgtatgtgtgtatgtatgtatccgcatgtgtgcatgtgagtatgtttgcaaaataataaaggatattggagacctgttttagaaggagcctaggctgaatttgattccaagagagcttaggatgacagcacccctgagctgggcaaaggtactcaggacctcataggagtcttaggcagttacctgaaactgccttcattcactcatttgtgtattcattcatttatgtattcatcagacacataccgaacaccctctatttgtcaggctctgtgcttggaatacagagttgaatcagacatgatctctaccctcctagtaaggagatacagtgggttcatgaatgactatagttagctgaatgtcatatgtactttgaatttgagaagtgggtgatcccctctaggcttcctggaggtcacatttaagctagaccttgacaaattggtaggatttggtcaggcactaggagtggagcatgagctctggggacagacagttatgggttctggtcccactttttatcacttactagttgtttgaccttgggcaagtcatttgaccttctgtgcctcagtttcctcatctgtaaaatggggctaacaatattacctacctcataggatttaatgatgtcaagctcctcactggaggccttatcccttcgtggagcccactaggtgccgacccctcagaatataaccctcatgcctggacccctgagagcttctgatcccagctattagggacagaagaagcctccaaatctggaaggtgctgaatgccctgctgactgggaaagtttcagggcactgatggggtctacctggtaagcggagggcctgaggaaacctgtagcttcaatcatgtctggtaaccgggtgcctgagccccaatctgggttgtgaggaaataggggagaggtatcctgggccacatcccagcctaacacctgtgaggttcattttaggaactaacctcattagctataaggatcatgcagaggcagcaaagccgggtgcgatgagctcagcctttactcattcacatacaccatcacactttaattccaatctgtatattgctttttaaaagttaagtccattctaattacccaaatatgcatgaattcattctccttttgagaagttagattgttaaagatagtctcattcagctaccaaccactccttgatccttcccttcttagtggctgttgtttgttgtacttccgtttagactttgttttaatgcttgtacgtacatatgtgaactcattggaaatattgtgtgtttaatgcaaatgatatattgaattgtttagcaatttgttttctttgcttaacgatgtttttgagatctgtgcatgttacttaatgtagctcaatccatcttctgtaattgctgtatagattgtcatcatatgattaccacattttacttacgcatttcttttgtgatggacattaagactgtttttaggttttgctattacaaaatactacacaggagcatcactatgcctgtgtgaaagtatatgtatgaaagtttacctagggttgattcctagaagtggaattgcaaagtcataggatatttatatattggtttttaataatacttccaaattgccctcctgtactatttactcagtatttttcttgaggttgatctgaggtctaacattgttatcctatatcattttcatcccaagtagtgatatctgtgaaatcacaggtttgatgtgtgctaattatgtattcttctaatacatattaaaagacataactatcaaaacaaaaaagagaaaaagagaggagaagaggggaagaagaagaaaaaaagagaaggaaggggggggaaggaaaggaagggggaggggagaaaaaagaaagagaggggcgggggaagaaataagacggggggaataaggaataaa

SEQ ID NO: 295706 - DNA, 6595 bp, Homo sapiens
gcggcgtttcccgcgcgggctacctcagttctcgggcgtacggcgcggcctgtcctactgccgccggcgccgcggccgtcatggggttcctgaaactgattgagattgagaactttaagtcgtacaagggtcgacagattatcggaccatttcagaggttcaccgccatcattggacccaatggctctggtaagtcaaatctcatggatgccatcagctttgtgctaggtgaaaaaaccagcaacctgcgggtaaagaccctgcgggacctgatccatggagctcctgtgggcaagccagctgccaaccgggcctttgtcagcatggtctactctgaggagggtgctgaggaccgtacctttgcccgtgtcattgtaggaggttcttctgagtacaagatcaacaacaaagtggtccaactacatgagtacagtgaggaattagagaagttgggcattctcatcaaagctcgtaacttcctcgttttccagggtgctgtggaatctattgccatgaagaaccccaaagagaggacagctctatttgaagagattagtcgttctggggagctggcgcaggagtatgacaagcgaaagaaggaaatggtgaaggctgaagaggacacacagtttaattaccatcgcaagaaaaatattgcggctgaacgcaaggaagcaaagcaggagaaagaagaggctgaccggtaccagcgcctgaaggatgaggtagtacgggctcaggtacagctgcagctctttaagctttaccataatgaagtggaaattgagaagctcaacaaggaactggcctcaaagaacaaggagatcgagaaggacaagaagcgtatggacaaggtggaggatgaactgaaggagaagaagaaggagctgggcaaaatgatgcgggagcagcagcagattgagaaggagatcaaggagaaggactcagaattgaaccagaagcggcctcagtacatcaaagccaaggagaacacctcccacaaaatcaagaagctggaagcagccaagaagtctctgcagaatgctcagaagcactacaagaagcgtaaaggtgacatggatgagctggagaaggagatgctgtcagtggagaaggctcggcaggagtttgaagaacggatggaagaagagagtcagagtcagggcagagatttgacgttggaggagaatcaggtgaagaaataccaccggttgaaagaagaagccagcaagagagcagctaccctggcccaggagctggagaaattcaatcgagaccagaaagctgaccaggaccgtctggatctggaagaacggaagaaagtagagacagaggccaagatcaagcaaaagctgcgggaaattgaagagaatcagaagcggattgagaaactggaggaatacatcaccactagcaagcagtccctagaagagcagaagaagctagagggggagctgacagaggaggtggagatggccaagcggcgtattgatgaaatcaataaggagctgaaccaggtgatggagcagctaggggatgcccgcatcgaccgccaggagagcagccgccagcagcgaaaggcagagataatggaaagcatcaagcgcctttaccctggctctgtgtacggccgcctcattgacctatgccagcccacacaaaagaagtatcagattgctgtaaccaaggttttgggcaagaacatggatgccattattgtggactcggagaagacaggccgggactgtattcagtatatcaaggagcagcgtggggagcctgagaccttcttgcctcttgactacctggaggtgaagcctacagatgagaaactccgggagctgaagggggccaagctagtgattgatgtgattcgctatgagccacctcatatcaaaaaggccctgcagtatgcttgtggcaatgcccttgtctgtgacaacgtggaagatgcccgccgcattgcctttggaggccaccagcgccacaagacagtggcactggatggaaccctattccagaagtcaggagtgatctctggtggggccagtgacctgaaggccaaggcacggcgctgggatgagaaagcagtagacaagttgaaagagaagaaggagcgcttgacagaggagctgaaagagcagatgaaggcaaaacggaaagaggcagagctgcgtcaggtgcagtctcaggcccatggactgcagatgcggctcaagtactcccagagtgacctagaacagaccaagacacgacatctagccctgaatctgcaggaaaaatccaagctggagagtgagctagccaactttgggcctcgcattaatgatatcaagaggatcattcagagccgagagagggaaatgaaagacttgaaggagaagatgaaccaggtagaggatgaggtgtttgaagagttttgtcgggagattggtgtgcgcaacatccgggagtttgaggaagaaaaggtgaaacggcagaatgaaatcgccaagaagcgtttggagtttgagaatcagaagactcgcttgggcattcagttggattttgaaaagaaccaactgaaggaggaccaagataaagtacacatgtgggagcagacagtgaaaaaagatgaaaatgagatagaaaagctcaaaaaggaggaacaaagacacatgaagatcatagatgagaccatggctcagctacaagacctgaagaatcagcatctggccaagaagtcggaagtgaatgacaagaatcatgagatggaggagattcgtaagaaactcgggggcgccaacaaggaaatgacccatttacagaaggaggtgacagccattgagaccaagcttgaacagaagcgcagtgaccgtcacaacttgctacaggcctgtaagatgcaggacattaagttgccactgtcaaaaggcaccatggatgatattagtcaggaagagggtagctcccagggggaggactcagtgagtggttcacagagaatttccagtatctatgcacgagaggccctcattgagattgactacggtgatctgtgtgaggatctgaaggatgcccaggctgaggaagagatcaagcaagagatgaacacactgcagcagaagctgaatgagcagcagagtgtgcttcagcgtattgccgcccccaacatgaaggccatggaaaagctggaaagtgtccgagacaagttccaggagacctcagatgagtttgaagcagcccgaaagcgagcaaagaaggccaagcaggcattcgaacagatcaagaaggagcgctttgaccgcttcaatgcttgttttgaatctgtggctaccaacattgatgagatctataaggccctgtcccgcaatagcagtgcccaggcattcctgggccctgagaaccctgaagagccctacttggatggcatcaactacaactgtgtggctcctgggaaacgcttccggcctatggacaacttgtcaggcggggagaagacagtggcagctctggccctgctctttgccatccacagctacaagccagcccccttcttcgtcctggatgagattgatgctgccttggataacaccaacattggcaaggtggcaaattacatcaaggagcagtcgacttgcaacttccaggccatcgtcatctctctcaaggaggagttctacaccaaggccgagagcctcattggagtctatcctgagcaaggggactgtgtgatcagcaaagtcctgaccttcgacctcaccaagtacccagatgccaaccccaaccccaatgagcagtagcagtatttttgccctcccgccctgtctggatccctaagctgtccctctcccaatctctggatatttgactcccaaccttccccctacctcctggccctttttggtgtagtcatgggatttaggcactgctaatcaagcatgaagaggaacagaggtgatgttaggtctggagcaaaaattcctgaacgacagggagtattctggcctctgaaaggaggtgctgagctgaacagggccatctgttcatcacacacacccccttcctccccctcatcacccataatcgtgggccccttgggcctcttgcccactgtgtgtgtgggtatgtatgtgtgtatgtatgtatccgcatgtgtgcatgtgagtatgtttgcaaaataataaaggatattggagacctgttttagaaggagcctaggctgaatttgattccaagagagcttaggatgacagcacccctgagctgggcaaaggtactcaggacctcataggagtcttaggcagttacctgaaactgccttcattcactcatttgtgtattcattcatttatgtattcatcagacacataccgaacaccctctatttgtcaggctctgtgcttggaatacagagttgaatcagacatgatctctaccctcctagtaaggagatacagtgggttcatgaatgactatagttagctgaatgtcatatgtactttgaatttgagaagtgggtgatcccctctaggcttcctggaggtcacatttaagctagaccttgacaaattggtaggatttggtcaggcactaggagtggagcatgagctctggggacagacagttatgggttctggtcccactttttatcacttactagttgtttgaccttgggcaagtcatttgaccttctgtgcctcagtttcctcatctgtaaaatggggctaacaatattacctacctcataggatttaatgatgtcaagctcctcactggaggccttatcccttcgtggagcccactaggtgccgacccctcagaatataaccctcatgcctggacccctgagagcttctgatcccagctattagggacagaagaagcctccaaatctggaaggtgctgaatgccctgctgactgggaaagtttcagggcactgatggggtctacctggtaagcggagggcctgaggaaacctgtagcttcaatcatgtctggtaaccgggtgcctgagccccaatctgggttgtgaggaaataggggagaggtatcctgggccacatcccagcctaacacctgtgaggttcattttaggaactaacctcattagctataaggatcatgcagaggcagcaaagccgggtgcgatgagctcagcctttactcattcacatacaccatcacactttaattccaatctgtatattgctttttaaaagttaagtccattctaattacccaaatatgcatgaattcattctccttttgagaagttagattgttaaagatagtctcattcagctaccaaccactccttgatccttcccttcttagtggctgttgtttgttgtacttccgtttagactttgttttaatgcttgtacgtacatatgtgaactcattggaaatattgtgtgtttaatgcaaatgatatattgaattgtttagcaatttgttttctttgcttaacgatgtttttgagatctgtgcatgttacttaatgtagctcaatccatcttctgtaattgctgtatagattgtcatcatatgattaccacattttacttacgcatttcttttgtgatggacattaagactgtttttaggttttgctattacaaaatactacacaggagcatcactatgcctgtgtgaaagtatatgtatgaaagtttacctagggttgattcctagaagtggaattgcaaagtcataggatatttatatattggtttttaataatacttccaaattgccctcctgtactatttactcagtatttttcttgaggttgatctgaggtctaacattgttatcctatatcattttcatcccaagtagtgatatctgtgaaatcacaggtttgatgtgtgctaattatgtattcttctaatacatattaaaagacataactatcaaaacaaaaaaataaatttgtctgttttcaaccaaagaagtcacgtaccactggtggtactgtgtgccataatttggcaaatgctggcctttatggacgagcacaattcgggggtcagacctggttcaaattctagctgtagaaacttgtgcaagttacttcacctctgagcctaagtttccacatctgtaaaaggagataataaacacctaccttgcagtagtgaagcaaagagaaaattaaatatatatgaagcaatttggctggcatctagatcattcacagccctttaaaggtcacctttgctgttctccccactttacagataaggaaactgaggcccaaaaaggtttgaacccaggtcttccaagtcattcaagtgctttctccactgtacaggtggttatcaaccttggctgcgcatcagaatcgtttgtaaagctttttctttttcctttttaaaaagtaaagcaatatatacacaggtaaaaaaataaaatagtacagaagggcttataatgagaagcagcagttccctgcttgcacccccacatccaaaggatgtggagctctttaaaaataaattgctctggtcccacctctggaaatctgattcagccagcatggataataacccagataactaacccctacctcacaggataaaaaggattacatgagatgccttaggctaa

SEQ ID NO: 295707 - DNA, 5607 bp, Homo sapiens
gcggcgtttcccgcgcgggctacctcagttctcgggcgtacggcgcggcctgtcctactgccgccggcgccgcggccgtcatggggttcctgaaactgattgagattgagaactttaagtcgtacaagggtcgacagattatcggaccatttcagaggttcaccgccatcattggacccaatggctctgggtgctgtggaatctattgccatgaagaaccccaaagagaggacagctctatttgaagagattagtcgttctggggagctggcgcaggagtatgacaagcgaaagaaggaaatggtgaaggctgaagaggacacacagtttaattaccatcgcaagaaaaatattgcggctgaacgcaaggaagcaaagcaggagaaagaagaggctgaccggtaccagcgcctgaaggatgaggtagtacgggctcaggtacagctgcagctctttaagctttaccataatgaagtggaaattgagaagctcaacaaggaactggcctcaaagaacaaggagatcgagaaggacaagaagcgtatggacaaggtggaggatgaactgaaggagaagaagaaggagctgggcaaaatgatgcgggagcagcagcagattgagaaggagatcaaggagaaggactcagaattgaaccagaagcggcctcagtacatcaaagccaaggagaacacctcccacaaaatcaagaagctggaagcagccaagaagtctctgcagaatgctcagaagcactacaagaagcgtaaaggtgacatggatgagctggagaaggagatgctgtcagtggagaaggctcggcaggagtttgaagaacggatggaagaagagagtcagagtcagggcagagatttgacgttggaggagaatcaggtgaagaaataccaccggttgaaagaagaagccagcaagagagcagctaccctggcccaggagctggagaaattcaatcgagaccagaaagctgaccaggaccgtctggatctggaagaacggaagaaagtagagacagaggccaagatcaagcaaaagctgcgggaaattgaagagaatcagaagcggattgagaaactggaggaatacatcaccactagcaagcagtccctagaagagcagaagaagctagagggggagctgacagaggaggtggagatggccaagcggcgtattgatgaaatcaataaggagctgaaccaggtgatggagcagctaggggatgcccgcatcgaccgccaggagagcagccgccagcagcgaaaggcagagataatggaaagcatcaagcgcctttaccctggctctgtgtacggccgcctcattgacctatgccagcccacacaaaagaagtatcagattgctgtaaccaaggttttgggcaagaacatggatgccattattgtggactcggagaagacaggccgggactgtattcagtatatcaaggagcagcgtggggagcctgagaccttcttgcctcttgactacctggaggtgaagcctacagatgagaaactccgggagctgaagggggccaagctagtgattgatgtgattcgctatgagccacctcatatcaaaaaggccctgcagtatgcttgtggcaatgcccttgtctgtgacaacgtggaagatgcccgccgcattgcctttggaggccaccagcgccacaagacagtggcactggatggaaccctattccagaagtcaggagtgatctctggtggggccagtgacctgaaggccaaggcacggcgctgggatgagaaagcagtagacaagttgaaagagaagaaggagcgcttgacagaggagctgaaagagcagatgaaggcaaaacggaaagaggcagagctgcgtcaggtgcagtctcaggcccatggactgcagatgcggctcaagtactcccagagtgacctagaacagaccaagacacgacatctagccctgaatctgcaggaaaaatccaagctggagagtgagctagccaactttgggcctcgcattaatgatatcaagaggatcattcagagccgagagagggaaatgaaagacttgaaggagaagatgaaccaggtagaggatgaggtgtttgaagagttttgtcgggagattggtgtgcgcaacatccgggagtttgaggaagaaaaggtgaaacggcagaatgaaatcgccaagaagcgtttggagtttgagaatcagaagactcgcttgggcattcagttggattttgaaaagaaccaactgaaggaggaccaagataaagtacacatgtgggagcagacagtgaaaaaagatgaaaatgagatagaaaagctcaaaaaggaggaacaaagacacatgaagatcatagatgagaccatggctcagctacaagacctgaagaatcagcatctggccaagaagtcggaagtgaatgacaagaatcatgagatggaggagattcgtaagaaactcgggggcgccaacaaggaaatgacccatttacagaaggaggtgacagccattgagaccaagcttgaacagaagcgcagtgaccgtcacaacttgctacaggcctgtaagatgcaggacattaagttgccactgtcaaaaggcaccatggatgatattagtcaggaagagggtagctcccagggggaggactcagtgagtggttcacagagaatttccagtatctatgcacgagaggccctcattgagattgactacggtgatctgtgtgaggatctgaaggatgcccaggctgaggaagagatcaagcaagagatgaacacactgcagcagaagctgaatgagcagcagagtgtgcttcagcgtattgccgcccccaacatgaaggccatggaaaagctggaaagtgtccgagacaagttccaggagacctcagatgagtttgaagcagcccgaaagcgagcaaagaaggccaagcaggcattcgaacagatcaagaaggagcgctttgaccgcttcaatgcttgttttgaatctgtggctaccaacattgatgagatctataaggccctgtcccgcaatagcagtgcccaggcattcctgggccctgagaaccctgaagagccctacttggatggcatcaactacaactgtgtggctcctgggaaacgcttccggcctatggacaacttgtcaggcggggagaagacagtggcagctctggccctgctctttgccatccacagctacaagccagcccccttcttcgtcctggatgagattgatgctgccttggataacaccaacattggcaaggtggcaaattacatcaaggagcagtcgacttgcaacttccaggccatcgtcatctctctcaaggaggagttctacaccaaggccgagagcctcattggagtctatcctgagcaaggggactgtgtgatcagcaaagtcctgaccttcgacctcaccaagtacccagatgccaaccccaaccccaatgagcagtagcagtatttttgccctcccgccctgtctggatccctaagctgtccctctcccaatctctggatatttgactcccaaccttccccctacctcctggccctttttggtgtagtcatgggatttaggcactgctaatcaagcatgaagaggaacagaggtgatgttaggtctggagcaaaaattcctgaacgacagggagtattctggcctctgaaaggaggtgctgagctgaacagggccatctgttcatcacacacacccccttcctccccctcatcacccataatcgtgggccccttgggcctcttgcccactgtgtgtgtgggtatgtatgtgtgtatgtatgtatccgcatgtgtgcatgtgagtatgtttgcaaaataataaaggatattggagacctgttttagaaggagcctaggctgaatttgattccaagagagcttaggatgacagcacccctgagctgggcaaaggtactcaggacctcataggagtcttaggcagttacctgaaactgccttcattcactcatttgtgtattcattcatttatgtattcatcagacacataccgaacaccctctatttgtcaggctctgtgcttggaatacagagttgaatcagacatgatctctaccctcctagtaaggagatacagtgggttcatgaatgactatagttagctgaatgtcatatgtactttgaatttgagaagtgggtgatcccctctaggcttcctggaggtcacatttaagctagaccttgacaaattggtaggatttggtcaggcactaggagtggagcatgagctctggggacagacagttatgggttctggtcccactttttatcacttactagttgtttgaccttgggcaagtcatttgaccttctgtgcctcagtttcctcatctgtaaaatggggctaacaatattacctacctcataggatttaatgatgtcaagctcctcactggaggccttatcccttcgtggagcccactaggtgccgacccctcagaatataaccctcatgcctggacccctgagagcttctgatcccagctattagggacagaagaagcctccaaatctggaaggtgctgaatgccctgctgactgggaaagtttcagggcactgatggggtctacctggtaagcggagggcctgaggaaacctgtagcttcaatcatgtctggtaaccgggtgcctgagccccaatctgggttgtgaggaaataggggagaggtatcctgggccacatcccagcctaacacctgtgaggttcattttaggaactaacctcattagctataaggatcatgcagaggcagcaaagccgggtgcgatgagctcagcctttactcattcacatacaccatcacactttaattccaatctgtatattgctttttaaaagttaagtccattctaattacccaaatatgcatgaattcattctccttttgagaagttagattgttaaagatagtctcattcagctaccaaccactccttgatccttcccttcttagtggctgttgtttgttgtacttccgtttagactttgttttaatgcttgtacgtacatatgtgaactcattggaaatattgtgtgtttaatgcaaatgatatattgaattgtttagcaatttgttttctttgcttaacgatgtttttgagatctgtgcatgttacttaatgtagctcaatccatcttctgtaattgctgtatagattgtcatcatatgattaccacattttacttacgcatttcttttgtgatggacattaagactgtttttaggttttgctattacaaaatactacacaggagcatcactatgcctgtgtgaaagtatatgtatgaaagtttacctagggttgattcctagaagtggaattgcaaagtcataggatatttatatattggtttttaataatacttccaaattgccctcctgtactatttactcagtatttttcttgaggttgatctgaggtctaacattgttatcctatatcattttcatcccaagtagtgatatctgtgaaatcacaggtttgatgtgtgctaattatgtattcttctaatacatattaaaagacataactatcaaaacaaaa

SEQ ID NO: 295708 - DNA, 4659 bp, Homo sapiens
acctggcacttctcgtaggaggagaatcaggtgaagaaacaacagaaatcaatcgagacaggtcggaagaaagtagagacagaggccaagatcaagcaaaagctgcgggaaattgaagagaatcagaagcggattgagaaactggaggaatacatcaccactagcaagcagtccctagaagagcagaagaagctagagggggagctgacagaggaggtggagatggccaagcggcgtattgatgaaatcaataaggagctgaaccaggtgatggagcagctaggggatgcccgcatcgaccgccaggagagcagccgccagcagcgaaaggcagagataatggaaagcatcaagcgcctttaccctggctctgtgtacggccgcctcattgacctatgccagcccacacaaaagaagtatcagattgctgtaaccaaggttttgggcaagaacatggatgccattattgtggactcggagaagacaggccgggactgtattcagtatatcaaggagcagcgtggggagcctgagaccttcttgcctcttgactacctggaggtgaagcctacagatgagaaactccgggagctgaagggggccaagctagtgattgatgtgattcgctatgagccacctcatatcaaaaaggccctgcagtatgcttgtggcaatgcccttgtctgtgacaacgtggaagatgcccgccgcattgcctttggaggccaccagcgccacaagacagtggcactggatggaaccctattccagaagtcaggagtgatctctggtggggccagtgacctgaaggccaaggcacggcgctgggatgagaaagcagtagacaagttgaaagagaagaaggagcgcttgacagaggagctgaaagagcagatgaaggcaaaacggaaagaggcagagctgcgtcaggtgcagtctcaggcccatggactgcagatgcggctcaagtactcccagagtgacctagaacagaccaagacacgacatctagccctgaatctgcaggaaaaatccaagctggagagtgagctagccaactttgggcctcgcattaatgatatcaagaggatcattcagagccgagagagggaaatgaaagacttgaaggagaagatgaaccaggtagaggatgaggtgtttgaagagttttgtcgggagattggtgtgcgcaacatccgggagtttgaggaagaaaaggtgaaacggcagaatgaaatcgccaagaagcgtttggagtttgagaatcagaagactcgcttgggcattcagttggattttgaaaagaaccaactgaaggaggaccaagataaagtacacatgtgggagcagacagtgaaaaaagatgaaaatgagatagaaaagctcaaaaaggaggaacaaagacacatgaagatcatagatgagaccatggctcagctacaagacctgaagaatcagcatctggccaagaagtcggaagtgaatgacaagaatcatgagatggaggagattcgtaagaaactcgggggcgccaacaaggaaatgacccatttacagaaggaggtgacagccattgagaccaagcttgaacagaagcgcagtgaccgtcacaacttgctacaggcctgtaagatgcaggacattaagttgccactgtcaaaaggcaccatggatgatattagtcaggaagagggtagctcccagggggaggactcagtgagtggttcacagagaatttccagtatctatgcacgagaggccctcattgagattgactacggtgatctgtgtgaggatctgaaggatgcccaggctgaggaagagatcaagcaagagatgaacacactgcagcagaagctgaatgagcagcagagtgtgcttcagcgtattgccgcccccaacatgaaggccatggaaaagctggaaagtgtccgagacaagttccaggagacctcagatgagtttgaagcagcccgaaagcgagcaaagaaggccaagcaggcattcgaacagatcaagaaggagcgctttgaccgcttcaatgcttgttttgaatctgtggctaccaacattgatgagatctataaggccctgtcccgcaatagcagtgcccaggcattcctgggccctgagaaccctgaagagccctacttggatggcatcaactacaactgtgtggctcctgggaaacgcttccggcctatggacaacttgtcaggcggggagaagacagtggcagctctggccctgctctttgccatccacagctacaagccagcccccttcttcgtcctggatgagattgatgctgccttggataacaccaacattggcaaggtggcaaattacatcaaggagcagtcgacttgcaacttccaggccatcgtcatctctctcaaggaggagttctacaccaaggccgagagcctcattggagtctatcctgagcaaggggactgtgtgatcagcaaagtcctgaccttcgacctcaccaagtacccagatgccaaccccaaccccaatgagcagtagcagtatttttgccctcccgccctgtctggatccctaagctgtccctctcccaatctctggatatttgactcccaaccttccccctacctcctggccctttttggtgtagtcatgggatttaggcactgctaatcaagcatgaagaggaacagaggtgatgttaggtctggagcaaaaattcctgaacgacagggagtattctggcctctgaaaggaggtgctgagctgaacagggccatctgttcatcacacacacccccttcctccccctcatcacccataatcgtgggccccttgggcctcttgcccactgtgtgtgtgggtatgtatgtgtgtatgtatgtatccgcatgtgtgcatgtgagtatgtttgcaaaataataaaggatattggagacctgttttagaaggagcctaggctgaatttgattccaagagagcttaggatgacagcacccctgagctgggcaaaggtactcaggacctcataggagtcttaggcagttacctgaaactgccttcattcactcatttgtgtattcattcatttatgtattcatcagacacataccgaacaccctctatttgtcaggctctgtgcttggaatacagagttgaatcagacatgatctctaccctcctagtaaggagatacagtgggttcatgaatgactatagttagctgaatgtcatatgtactttgaatttgagaagtgggtgatcccctctaggcttcctggaggtcacatttaagctagaccttgacaaattggtaggatttggtcaggcactaggagtggagcatgagctctggggacagacagttatgggttctggtcccactttttatcacttactagttgtttgaccttgggcaagtcatttgaccttctgtgcctcagtttcctcatctgtaaaatggggctaacaatattacctacctcataggatttaatgatgtcaagctcctcactggaggccttatcccttcgtggagcccactaggtgccgacccctcagaatataaccctcatgcctggacccctgagagcttctgatcccagctattagggacagaagaagcctccaaatctggaaggtgctgaatgccctgctgactgggaaagtttcagggcactgatggggtctacctggtaagcggagggcctgaggaaacctgtagcttcaatcatgtctggtaaccgggtgcctgagccccaatctgggttgtgaggaaataggggagaggtatcctgggccacatcccagcctaacacctgtgaggttcattttaggaactaacctcattagctataaggatcatgcagaggcagcaaagccgggtgcgatgagctcagcctttactcattcacatacaccatcacactttaattccaatctgtatattgctttttaaaagttaagtccattctaattacccaaatatgcatgaattcattctccttttgagaagttagattgttaaagatagtctcattcagctaccaaccactccttgatccttcccttcttagtggctgttgtttgttgtacttccgtttagactttgttttaatgcttgtacgtacatatgtgaactcattggaaatattgtgtgtttaatgcaaatgatatattgaattgtttagcaatttgttttctttgcttaacgatgtttttgagatctgtgcatgttacttaatgtagctcaatccatcttctgtaattgctgtatagattgtcatcatatgattaccacattttacttacgcatttcttttgtgatggacattaagactgtttttaggttttgctattacaaaatactacacaggagcatcactatgcctgtgtgaaagtatatgtatgaaagtttacctagggttgattcctagaagtggaattgcaaagtcataggatatttatatattggtttttaataatacttccaaattgccctcctgtactatttactcagtatttttcttgaggttgatctgaggtctaacattgttatcctatatcattttcatcccaagtagtgatatctgtgaaatcacaggtttgatgtgtgctaattatgtattcttctaatacatattaaaagacataactatcaaaacaaaa

SEQ ID NO: 295709 - DNA, 4018 bp, Homo sapiens
tgtggattcccttgcccaggctggagctggacaggctcagtactggagattcatttgttcagcttctccccctcttctctcttccccctgctgtgtgtagacagtggcactggatggaaccctattccagaagtcaggagtgatctctggtggggccagtgacctgaaggccaaggcacggcgctgggatgagaaagcagtagacaagttgaaagagaagaaggagcgcttgacagaggagctgaaagagcagatgaaggcaaaacggaaagaggcagagctgcgtcaggtgcagtctcaggcccatggactgcagatgcggctcaagtactcccagagtgacctagaacagaccaagacacgacatctagccctgaatctgcaggaaaaatccaagctggagagtgagctagccaactttgggcctcgcattaatgatatcaagaggatcattcagagccgagagagggaaatgaaagacttgaaggagaagatgaaccaggtagaggatgaggtgtttgaagagttttgtcgggagattggtgtgcgcaacatccgggagtttgaggaagaaaaggtgaaacggcagaatgaaatcgccaagaagcgtttggagtttgagaatcagaagactcgcttgggcattcagttggattttgaaaagaaccaactgaaggaggaccaagataaagtacacatgtgggagcagacagtgaaaaaagatgaaaatgagatagaaaagctcaaaaaggaggaacaaagacacatgaagatcatagatgagaccatggctcagctacaagacctgaagaatcagcatctggccaagaagtcggaagtgaatgacaagaatcatgagatggaggagattcgtaagaaactcgggggcgccaacaaggaaatgacccatttacagaaggaggtgacagccattgagaccaagcttgaacagaagcgcagtgaccgtcacaacttgctacaggcctgtaagatgcaggacattaagttgccactgtcaaaaggcaccatggatgatattagtcaggaagagggtagctcccagggggaggactcagtgagtggttcacagagaatttccagtatctatgcacgagaggccctcattgagattgactacggtgatctgtgtgaggatctgaaggatgcccaggctgaggaagagatcaagcaagagatgaacacactgcagcagaagctgaatgagcagcagagtgtgcttcagcgtattgccgcccccaacatgaaggccatggaaaagctggaaagtgtccgagacaagttccaggagacctcagatgagtttgaagcagcccgaaagcgagcaaagaaggccaagcaggcattcgaacagatcaagaaggagcgctttgaccgcttcaatgcttgttttgaatctgtggctaccaacattgatgagatctataaggccctgtcccgcaatagcagtgcccaggcattcctgggccctgagaaccctgaagagccctacttggatggcatcaactacaactgtgtggctcctgggaaacgcttccggcctatggacaacttgtcaggcggggagaagacagtggcagctctggccctgctctttgccatccacagctacaagccagcccccttcttcgtcctggatgagattgatgctgccttggataacaccaacattggcaaggtggcaaattacatcaaggagcagtcgacttgcaacttccaggccatcgtcatctctctcaaggaggagttctacaccaaggccgagagcctcattggagtctatcctgagcaaggggactgtgtgatcagcaaagtcctgaccttcgacctcaccaagtacccagatgccaaccccaaccccaatgagcagtagcagtatttttgccctcccgccctgtctggatccctaagctgtccctctcccaatctctggatatttgactcccaaccttccccctacctcctggccctttttggtgtagtcatgggatttaggcactgctaatcaagcatgaagaggaacagaggtgatgttaggtctggagcaaaaattcctgaacgacagggagtattctggcctctgaaaggaggtgctgagctgaacagggccatctgttcatcacacacacccccttcctccccctcatcacccataatcgtgggccccttgggcctcttgcccactgtgtgtgtgggtatgtatgtgtgtatgtatgtatccgcatgtgtgcatgtgagtatgtttgcaaaataataaaggatattggagacctgttttagaaggagcctaggctgaatttgattccaagagagcttaggatgacagcacccctgagctgggcaaaggtactcaggacctcataggagtcttaggcagttacctgaaactgccttcattcactcatttgtgtattcattcatttatgtattcatcagacacataccgaacaccctctatttgtcaggctctgtgcttggaatacagagttgaatcagacatgatctctaccctcctagtaaggagatacagtgggttcatgaatgactatagttagctgaatgtcatatgtactttgaatttgagaagtgggtgatcccctctaggcttcctggaggtcacatttaagctagaccttgacaaattggtaggatttggtcaggcactaggagtggagcatgagctctggggacagacagttatgggttctggtcccactttttatcacttactagttgtttgaccttgggcaagtcatttgaccttctgtgcctcagtttcctcatctgtaaaatggggctaacaatattacctacctcataggatttaatgatgtcaagctcctcactggaggccttatcccttcgtggagcccactaggtgccgacccctcagaatataaccctcatgcctggacccctgagagcttctgatcccagctattagggacagaagaagcctccaaatctggaaggtgctgaatgccctgctgactgggaaagtttcagggcactgatggggtctacctggtaagcggagggcctgaggaaacctgtagcttcaatcatgtctggtaaccgggtgcctgagccccaatctgggttgtgaggaaataggggagaggtatcctgggccacatcccagcctaacacctgtgaggttcattttaggaactaacctcattagctataaggatcatgcagaggcagcaaagccgggtgcgatgagctcagcctttactcattcacatacaccatcacactttaattccaatctgtatattgctttttaaaagttaagtccattctaattacccaaatatgcatgaattcattctccttttgagaagttagattgttaaagatagtctcattcagctaccaaccactccttgatccttcccttcttagtggctgttgtttgttgtacttccgtttagactttgttttaatgcttgtacgtacatatgtgaactcattggaaatattgtgtgtttaatgcaaatgatatattgaattgtttagcaatttgttttctttgcttaacgatgtttttgagatctgtgcatgttacttaatgtagctcaatccatcttctgtaattgctgtatagattgtcatcatatgattaccacattttacttacgcatttcttttgtgatggacattaagactgtttttaggttttgctattacaaaatactacacaggagcatcactatgcctgtgtgaaagtatatgtatgaaagtttacctagggttgattcctagaagtggaattgcaaagtcataggatatttatatattggtttttaataatacttccaaattgccctcctgtactatttactcagtatttttcttgaggttgatctgaggtctaacattgttatcctatatcattttcatcccaagtagtgatatctgtgaaatcacaggtttgatgtgtgctaattatgtattcttctaatacatattaaaagacataactatcaaaacaaaa

SEQ ID NO: 295710 - DNA, 3549 bp, Homo sapiens
cgcacaaagactgagatctctgagatgaaccgggtagaggatgaggtgtttgaagagttttgtcgggagattggtgtgcgcaacatccgggagtttgaggaagaaaaggtgaaacggcagaatgaaatcgccaagaagcgtttggagtttgagaatcagaagactcgcttgggcattcagttggattttgaaaagaaccaactgaaggaggaccaagataaagtacacatgtgggagcagacagtgaaaaaagatgaaaatgagatagaaaagctcaaaaaggaggaacaaagacacatgaagatcatagatgagaccatggctcagctacaagacctgaagaatcagcatctggccaagaagtcggaagtgaatgacaagaatcatgagatggaggagattcgtaagaaactcgggggcgccaacaaggaaatgacccatttacagaaggaggtgacagccattgagaccaagcttgaacagaagcgcagtgaccgtcacaacttgctacaggcctgtaagatgcaggacattaagttgccactgtcaaaaggcaccatggatgatattagtcaggaagagggtagctcccagggggaggactcagtgagtggttcacagagaatttccagtatctatgcacgagaggccctcattgagattgactacggtgatctgtgtgaggatctgaaggatgcccaggctgaggaagagatcaagcaagagatgaacacactgcagcagaagctgaatgagcagcagagtgtgcttcagcgtattgccgcccccaacatgaaggccatggaaaagctggaaagtgtccgagacaagttccaggagacctcagatgagtttgaagcagcccgaaagcgagcaaagaaggccaagcaggcattcgaacagatcaagaaggagcgctttgaccgcttcaatgcttgttttgaatctgtggctaccaacattgatgagatctataaggccctgtcccgcaatagcagtgcccaggcattcctgggccctgagaaccctgaagagccctacttggatggcatcaactacaactgtgtggctcctgggaaacgcttccggcctatggacaacttgtcaggcggggagaagacagtggcagctctggccctgctctttgccatccacagctacaagccagcccccttcttcgtcctggatgagattgatgctgccttggataacaccaacattggcaaggtggcaaattacatcaaggagcagtcgacttgcaacttccaggccatcgtcatctctctcaaggaggagttctacaccaaggccgagagcctcattggagtctatcctgagcaaggggactgtgtgatcagcaaagtcctgaccttcgacctcaccaagtacccagatgccaaccccaaccccaatgagcagtagcagtatttttgccctcccgccctgtctggatccctaagctgtccctctcccaatctctggatatttgactcccaaccttccccctacctcctggccctttttggtgtagtcatgggatttaggcactgctaatcaagcatgaagaggaacagaggtgatgttaggtctggagcaaaaattcctgaacgacagggagtattctggcctctgaaaggaggtgctgagctgaacagggccatctgttcatcacacacacccccttcctccccctcatcacccataatcgtgggccccttgggcctcttgcccactgtgtgtgtgggtatgtatgtgtgtatgtatgtatccgcatgtgtgcatgtgagtatgtttgcaaaataataaaggatattggagacctgttttagaaggagcctaggctgaatttgattccaagagagcttaggatgacagcacccctgagctgggcaaaggtactcaggacctcataggagtcttaggcagttacctgaaactgccttcattcactcatttgtgtattcattcatttatgtattcatcagacacataccgaacaccctctatttgtcaggctctgtgcttggaatacagagttgaatcagacatgatctctaccctcctagtaaggagatacagtgggttcatgaatgactatagttagctgaatgtcatatgtactttgaatttgagaagtgggtgatcccctctaggcttcctggaggtcacatttaagctagaccttgacaaattggtaggatttggtcaggcactaggagtggagcatgagctctggggacagacagttatgggttctggtcccactttttatcacttactagttgtttgaccttgggcaagtcatttgaccttctgtgcctcagtttcctcatctgtaaaatggggctaacaatattacctacctcataggatttaatgatgtcaagctcctcactggaggccttatcccttcgtggagcccactaggtgccgacccctcagaatataaccctcatgcctggacccctgagagcttctgatcccagctattagggacagaagaagcctccaaatctggaaggtgctgaatgccctgctgactgggaaagtttcagggcactgatggggtctacctggtaagcggagggcctgaggaaacctgtagcttcaatcatgtctggtaaccgggtgcctgagccccaatctgggttgtgaggaaataggggagaggtatcctgggccacatcccagcctaacacctgtgaggttcattttaggaactaacctcattagctataaggatcatgcagaggcagcaaagccgggtgcgatgagctcagcctttactcattcacatacaccatcacactttaattccaatctgtatattgctttttaaaagttaagtccattctaattacccaaatatgcatgaattcattctccttttgagaagttagattgttaaagatagtctcattcagctaccaaccactccttgatccttcccttcttagtggctgttgtttgttgtacttccgtttagactttgttttaatgcttgtacgtacatatgtgaactcattggaaatattgtgtgtttaatgcaaatgatatattgaattgtttagcaatttgttttctttgcttaacgatgtttttgagatctgtgcatgttacttaatgtagctcaatccatcttctgtaattgctgtatagattgtcatcatatgattaccacattttacttacgcatttcttttgtgatggacattaagactgtttttaggttttgctattacaaaatactacacaggagcatcactatgcctgtgtgaaagtatatgtatgaaagtttacctagggttgattcctagaagtggaattgcaaagtcataggatatttatatattggtttttaataatacttccaaattgccctcctgtactatttactcagtatttttcttgaggttgatctgaggtctaacattgttatcctatatcattttcatcccaagtagtgatatctgtgaaatcacaggtttgatgtgtgctaattatgtattcttctaatacatattaaaagacataactatcaaaacaaaa

SEQ ID NO: 295711 - DNA, 3669 bp, Homo sapiens
ctggtctgctttgtcctctcaacccattgcctgtaggaaaaatccaagctggagagtgagctagccaactttgggcctcgcattaatgatatcaagaggatcattcagagccgagagagggaaatgaaagacttgaaggagaagatgaaccaggtagaggatgaggtgtttgaagagttttgtcgggagattggtgtgcgcaacatccgggagtttgaggaagaaaaggtgaaacggcagaatgaaatcgccaagaagcgtttggagtttgagaatcagaagactcgcttgggcattcagttggattttgaaaagaaccaactgaaggaggaccaagataaagtacacatgtgggagcagacagtgaaaaaagatgaaaatgagatagaaaagctcaaaaaggaggaacaaagacacatgaagatcatagatgagaccatggctcagctacaagacctgaagaatcagcatctggccaagaagtcggaagtgaatgacaagaatcatgagatggaggagattcgtaagaaactcgggggcgccaacaaggaaatgacccatttacagaaggaggtgacagccattgagaccaagcttgaacagaagcgcagtgaccgtcacaacttgctacaggcctgtaagatgcaggacattaagttgccactgtcaaaaggcaccatggatgatattagtcaggaagagggtagctcccagggggaggactcagtgagtggttcacagagaatttccagtatctatgcacgagaggccctcattgagattgactacggtgatctgtgtgaggatctgaaggatgcccaggctgaggaagagatcaagcaagagatgaacacactgcagcagaagctgaatgagcagcagagtgtgcttcagcgtattgccgcccccaacatgaaggccatggaaaagctggaaagtgtccgagacaagttccaggagacctcagatgagtttgaagcagcccgaaagcgagcaaagaaggccaagcaggcattcgaacagatcaagaaggagcgctttgaccgcttcaatgcttgttttgaatctgtggctaccaacattgatgagatctataaggccctgtcccgcaatagcagtgcccaggcattcctgggccctgagaaccctgaagagccctacttggatggcatcaactacaactgtgtggctcctgggaaacgcttccggcctatggacaacttgtcaggcggggagaagacagtggcagctctggccctgctctttgccatccacagctacaagccagcccccttcttcgtcctggatgagattgatgctgccttggataacaccaacattggcaaggtggcaaattacatcaaggagcagtcgacttgcaacttccaggccatcgtcatctctctcaaggaggagttctacaccaaggccgagagcctcattggagtctatcctgagcaaggggactgtgtgatcagcaaagtcctgaccttcgacctcaccaagtacccagatgccaaccccaaccccaatgagcagtagcagtatttttgccctcccgccctgtctggatccctaagctgtccctctcccaatctctggatatttgactcccaaccttccccctacctcctggccctttttggtgtagtcatgggatttaggcactgctaatcaagcatgaagaggaacagaggtgatgttaggtctggagcaaaaattcctgaacgacagggagtattctggcctctgaaaggaggtgctgagctgaacagggccatctgttcatcacacacacccccttcctccccctcatcacccataatcgtgggccccttgggcctcttgcccactgtgtgtgtgggtatgtatgtgtgtatgtatgtatccgcatgtgtgcatgtgagtatgtttgcaaaataataaaggatattggagacctgttttagaaggagcctaggctgaatttgattccaagagagcttaggatgacagcacccctgagctgggcaaaggtactcaggacctcataggagtcttaggcagttacctgaaactgccttcattcactcatttgtgtattcattcatttatgtattcatcagacacataccgaacaccctctatttgtcaggctctgtgcttggaatacagagttgaatcagacatgatctctaccctcctagtaaggagatacagtgggttcatgaatgactatagttagctgaatgtcatatgtactttgaatttgagaagtgggtgatcccctctaggcttcctggaggtcacatttaagctagaccttgacaaattggtaggatttggtcaggcactaggagtggagcatgagctctggggacagacagttatgggttctggtcccactttttatcacttactagttgtttgaccttgggcaagtcatttgaccttctgtgcctcagtttcctcatctgtaaaatggggctaacaatattacctacctcataggatttaatgatgtcaagctcctcactggaggccttatcccttcgtggagcccactaggtgccgacccctcagaatataaccctcatgcctggacccctgagagcttctgatcccagctattagggacagaagaagcctccaaatctggaaggtgctgaatgccctgctgactgggaaagtttcagggcactgatggggtctacctggtaagcggagggcctgaggaaacctgtagcttcaatcatgtctggtaaccgggtgcctgagccccaatctgggttgtgaggaaataggggagaggtatcctgggccacatcccagcctaacacctgtgaggttcattttaggaactaacctcattagctataaggatcatgcagaggcagcaaagccgggtgcgatgagctcagcctttactcattcacatacaccatcacactttaattccaatctgtatattgctttttaaaagttaagtccattctaattacccaaatatgcatgaattcattctccttttgagaagttagattgttaaagatagtctcattcagctaccaaccactccttgatccttcccttcttagtggctgttgtttgttgtacttccgtttagactttgttttaatgcttgtacgtacatatgtgaactcattggaaatattgtgtgtttaatgcaaatgatatattgaattgtttagcaatttgttttctttgcttaacgatgtttttgagatctgtgcatgttacttaatgtagctcaatccatcttctgtaattgctgtatagattgtcatcatatgattaccacattttacttacgcatttcttttgtgatggacattaagactgtttttaggttttgctattacaaaatactacacaggagcatcactatgcctgtgtgaaagtatatgtatgaaagtttacctagggttgattcctagaagtggaattgcaaagtcataggatatttatatattggtttttaataatacttccaaattgccctcctgtactatttactcagtatttttcttgaggttgatctgaggtctaacattgttatcctatatcattttcatcccaagtagtgatatctgtgaaatcacaggtttgatgtgtgctaattatgtattcttctaatacatattaaaagacataactatcaaaacaaaa

SEQ ID NO: 295712 - DNA, 5138 bp, Homo sapiens
gcggcgtttcccgcgcgggctacctcagttctcgggcgtacggcgcggcctgtcctactgccgccggcgccgcggccgtcatggggttcctgaaactgattgagattgagaactttaagtcgtacaagggtcgacagattatcggaccatttcagaggttcaccgccatcattggacccaatggctctggtaagtcaaatctcatggatgccatcagctttgtgctaggtgaaaaaaccagcaacctgcgggtaaagaccctgcgggacctgatccatggagctcctgtgggcaagccagctgccaaccgggcctttgtcagcatggtctactctgaggagggtgctgaggaccgtacctttgcccgtgtcattgtaggaggttcttctgagtacaagatcaacaacaaagtggtccaactacatgagtacagtgaggaattagagaagttgggcattctcatcaaagctcgtaacttcctcgttttccagggtgctgtggaatctattgccatgaagaaccccaaagagaggacagctctatttgaagagattagtcgttctggggagctggcgcaggagtatgacaagcgaaagaaggaaatggtgaaggctgaagaggacacacagtttaattaccatcgcaagaaaaatattgcggctgaacgcaaggaagcaaagcaggagaaagaagaggctgaccggtaccagcgcctgaaggatgaggtagtacgggctcaggtacagctgcagctctttaagctttaccataatgaagtggaaattgagaagctcaacaaggaactggcctcaaagaacaaggagatcgagaaggacaagaagcgtatggacaaggtggaggatgaactgaaggagaagaagaaggagctgggcaaaatgatgcgggagcagcagcagattgagaaggagatcaaggagaaggactcagaattgaaccagaagcggcctcagtacatcaaagccaaggagaacacctcccacaaaatcaagaagctggaagcagccaagaagtctctgcagaatgctcagaagcactacaagaagcgtaaaggtgacatggatgagctggagaaggagatgctgtcagtggagaaggctcggcaggagtttgaagaacggatggaagaagagagtcagagtcagggcagagatttgacgttggaggagaatcaggtgaagaaataccaccggttgaaagaagaagccagcaagagagcagctaccctggcccaggagctggagaaattcaatcgagaccagaaagctgaccaggaccgtctggatctggaagaacggaagaaagtagagacagaggccaagatcaagcaaaagctgcgggaaattgaagagaatcagaagcggattgagaaactggaggaatacatcaccactagcaagcagtccctagaagagcagaagaagctagagggggagctgacagaggaggtggagatggccaagcggcgtattgatgaaatcaataaggagctgaaccaggtgatggagcagctaggggatgcccgcatcgaccgccaggagagcagccgccagcagcgaaaggcagagataatggaaagcatcaagcgcctttaccctggctctgtgtacggccgcctcattgacctatgccagcccacacaaaagaagtatcagattgctgtaaccaaggttttgggcaagaacatggatgccattattgtggactcggagaagacaggccgggactgtattcagtatatcaaggagcagcgtggggagcctgagaccttcttgcctcttgactacctggaggtgaagcctacagatgagaaactccgggagctgaagggggccaagctagtgattgatgtgattcgctatgagccacctcatatcaaaaaggccctgcagtatgcttgtggcaatgcccttgtctgtgacaacgtggaagatgcccgccgcattgcctttggaggccaccagcgccacaagacagtggcactggatggaaccctattccagaagtcaggagtgatctctggtggggccagtgacctgaaggccaaggcacggcgctgggatgagaaagcagtagacaagttgaaagagaagaaggagcgcttgacagaggagctgaaagagcagatgaaggcaaaacggaaagaggcagagctgcgtcaggtgcagtctcaggcccatggactgcagatgcggctcaagtactcccagagtgacctagaacagaccaagacacgacatctagccctgaatctgcaggaaaaatccaagctggagagtgagctagccaactttgggcctcgcattaatgatatcaagaggatcattcagagccgagagagggaaatgaaagacttgaaggagaagatgaaccaggtagaggatgaggtgtttgaagagttttgtcgggagattggtgtgcgcaacatccgggagtttgaggaagaaaaggtgaaacggcagaatgaaatcgccaagaagcgtttggagtttgagaatcagaagactcgcttgggcattcagttggattttgaaaagaaccaactgaaggaggaccaagataaagtacacatgtgggagcagacagtgaaaaaagatgaaaatgagatagaaaagctcaaaaaggaggaacaaagacacatgaagatcatagatgagaccatggctcagctacaagacctgaagaatcagcatctggccaagaagtcggaagtgaatgacaagaatcatgagatggaggagattcgtaagaaactcgggggcgccaacaaggaaatgacccatttacagaaggaggtgacagccattgagaccaagcttgaacagaagcgcagtgaccgtcacaacttgctacaggcctgtaagatgcaggacattaagttgccactgtcaaaaggcaccatggatgatattagtcaggaagagggtagctcccagggggaggactcagtgagtggttcacagagaatttccagtatctatgcacgagaggccctcattgagattgactacggtgatctgtgtgaggatctgaaggatgcccaggctgaggaagagatcaagcaagagatgaacacactgcagcagaagctgaatgagcagcagagtgtgcttcagcgtattgccgcccccaacatgaaggccatggaaaagctggaaagtgtccgagacaagttccaggagacctcagatgagtttgaagcagcccgaaagcgagcaaagaaggccaagcaggcattcgaacagatcaagaaggagcgctttgaccgcttcaatgcttgttttgaatctgtggctaccaacattgatgagatctataaggccctgtcccgcaatagcagtgcccaggcattcctgggccctgagaaccctgaagagccctacttggatggcatcaactacaactgtgtggctcctgggaaacgcttccggcctatggacaacttgtcaggcggggagaagacagtggcagctctggccctgctctttgccatccacagctacaagccagcccccttcttcgtcctggatgagattgatgctgccttggataacaccaacattggcaaggtggcaaattacatcaaggagcagtcgacttgcaacttccaggccatcgtcatctctctcaaggaggagttctacaccaaggccgagagcctcattggagtctatcctgagcaaggggactgtgtgatcagcaaagtcctgaccttcgacctcaccaagtacccagatgccaaccccaaccccaatgagcagtagcagtatttttgccctcccgccctgtctggatccctaagctgtccctctcccaatctctggatatttgactcccaaccttccccctacctcctggccctttttggtgtagtcatgggatttaggcactgctaatcaagcatgaagaggaacagaggtgatgttaggtctggagcaaaaattcctgaacgacagggagtattctggcctctgaaaggaggtgctgagctgaacagggccatctgttcatcacacacacccccttcctccccctcatcacccataatcgtgggccccttgggcctcttgcccactgtgtgtgtgggtatgtatgtgtgtatgtatgtatccgcatgtgtgcatgtgagtatgtttgcaaaataataaaggatattggagacctgttttagaaggagcctaggctgaatttgattccaagagagcttaggatgacagcacccctgagctgggcaaaggtactcaggacctcataggagtcttaggcagttacctgaaactgccttcattcactcatttgtgtattcattcatttatgtattcatcagacacataccgaacaccctctatttgtcaggctctgtgcttggaatacagagttgaatcagacatgatctctaccctcctagtaaggagatacagtgggttcatgaatgactatagttagctgaatgtcatatgtactttgaatttgagaagtgggtgatcccctctaggcttcctggaggtcacatttaagctagaccttgacaaattggtaggatttggtcaggcactaggagtggagcatgagctctggggacagacagttatgggttctggtcccactttttatcacttactagttgtttgaccttgggcaagtcatttgaccttctgtgcctcagtttcctcatctgtaaaatggggctaacaatattacctacctcataggatttaatgatgtcaagctcctcactggaggccttatcccttcgtggagcccactaggtgccgacccctcaggggccatggtttgttgctgagcatctcaacacactgaaaaccagatgtttcacactttgctgtgaatatagttccttttggaaaaagtttcatatctatactctgacccaggtcaatcagtgccaagccagcagataaatcatcttcatcatcctgttccaaaaatccgtttccaagtatgaaattgtctggtttaatgtctccatgaatgatttcacagtcatgcacttgctcaatcatgtaaagcattctcatagcaaaagagatgacaagaccttgaggcatcactttttcaggggtatttttatagaggttaatggcatttaatgtcgacgc

SEQ ID NO: 295713 - DNA, 2888 bp, Homo sapiens
  misc_feature (2655)..(2655): n is a, c, g, or t
  misc_feature (2792)..(2792): n is a, c, g, or t
  misc_feature (2801)..(2801): n is a, c, g, or t
  misc_feature (2805)..(2805): n is a, c, g, or t
gcggcgtttcccgcgcgggctacctcagttctcgggcgtacggcgcggcctgtcctactgccgccggcgccgcggccgtcatggggttcctgaaactgattgagattgagaactttaagtcgtacaagggtcgacagattatcggaccatttcagaggttcaccgccatcattggacccaatggctctggtaagtcaaatctcatggatgccatcagctttgtgctaggtgaaaaaaccagcaacctgcgggtaaagaccctgcgggacctgatccatggagctcctgtgggcaagccagctgccaaccgggcctttgtcagcatggtctactctgaggagggtgctgaggaccgtacctttgcccgtgtcattgtaggaggttcttctgagtacaagatcaacaacaaagtggtccaactacatgagtacagtgaggaattagagaagttgggcattctcatcaaagctcgtaacttcctcgttttccagggtgctgtggaatctattgccatgaagaaccccaaagagaggacagctctatttgaagagattagtcgttctggggagctggcgcaggagtatgacaagcgaaagaaggaaatggtgaaggctgaagaggacacacagtttaattaccatcgcaagaaaaatattgcggctgaacgcaaggaagcaaagcaggagaaagaagaggctgaccggtaccagcgcctgaaggatgaggtagtacgggctcaggtacagctgcagctctttaagctttaccataatgaagtggaaattgagaagctcaacaaggaactggcctcaaagaacaaggagatcgagaaggacaagaagcgtatggacaaggtggaggatgaactgaaggagaagaagaaggagctgggcaaaatgatgcgggagcagcagcagattgagaaggagatcaaggagaaggactcagaattgaaccagaagcggcctcagtacatcaaagccaaggagaacacctcccacaaaatcaagaagctggaagcagccaagaagtctctgcagaatgctcagaagcactacaagaagcgtaaaggtgacatggatgagctggagaaggagatgctgtcagtggagaaggctcggcaggagtttgaagaacggatggaagaagagagtcagagtcagggcagagatttgacgttggaggagaatcaggtgaagaaataccaccggttgaaagaagaagccagcaagagagcagctaccctggcccaggagctggagaaattcaatcgagaccagaaagctgaccaggaccgtctggatctggaagaacggaagaaagtagagacagaggccaagatcaagcaaaagctgcgggaaattgaagagaatcagaagcggattgagaaactggaggaatacatcaccactagcaagcagtccctagaagagcagaagaagctagagggggagctgacagaggaggtggagatggccaagcggcgtattgatgaaatcaataaggagctgaaccaggtgatggagcagctaggggatgcccgcatcgaccgccaggagagcagccgccagcagcgaaaggcagagataatggaaagcatcaagcgcctttaccctggctctgtgtacggccgcctcattgacctatgccagcccacacaaaagaagtatcagattgctgtaaccaaggttttgggcaagaacatggatgccattattgtggactcggagaagacaggccgggactgtattcagtatatcaaggagcagcgtggggagcctgagaccttcttgcctcttgactacctggaggtgaagcctacagatgagaaactccgggagctgaagggggccaagctagtgattgatgtgattcgctatgagccacctcatatcaaaaaggccctgcagtatgcttgtggcaatgcccttgtctgtgacaacgtggaagatgcccgccgcattgcctttggaggccaccagcgccacaagacagtggcactggatggaaccctattccagaagtcaggagtgatctctggtggggccagtgacctgaaggccaaggcacggcgctgggatgagaaagcagtagacaagttgaaagagaagaaggagcgcttgacagaggagctgaaagagcagatgaaggcaaaacggaaagaggcagagctgcgtcaggtgcagtctcaggcccatggactgcagatgcggctcaagtactcccagagtgacctagaacagaccaagacacgacatctagccctgaatctgcaggaaaaatccaagctggagagtgagctagccaactttgggcctcgcattaatgatatcaagaggatcattcagagccgagagagggaaatgaaagacttgaaggagaagatgaaccaggtagaggatgaggtgtttgaagagttttgtcgggagattggtgtgcgcaacatccgggagtttgaggaagaaaaggtgaaacggcagaatgaaatcgccaagaagcgtttggagtttgagaatcagaagactcgcttgggcattcagttggattttgaaaagaaccaactgaaggaggaccaagataaagtacacatgtgggagcagacagtgaaaaaagatgaaaatgagatagaaaagctcaaaaaggaactggcctcanagaacaaggagatcgagaaggacaagaagcgtatggacaaggtggaggatgaactgaatgagaagaagaaggagctgggcaaaatgatgcgggagcagcagcagattgacaaggagatccacggagaaggactcagnattgaaccngaancgggcctttgtcagcatggtctactctgaggagggtgctgaggccgtaccttggcccttatcagggtaccagctcgagtcgta

SEQ ID NO: 295714 - DNA, 1864 bp, Homo sapiens
  misc_feature (1817)..(1817): n is a, c, g, or t
  misc_feature (1827)..(1827): n is a, c, g, or t
  misc_feature (1829)..(1829): n is a, c, g, or t
  misc_feature (1840)..(1840): n is a, c, g, or t
  misc_feature (1842)..(1842): n is a, c, g, or t
  misc_feature (1851)..(1851): n is a, c, g, or t
gcggcgtttcccgcgcgggctacctcagttctcgggcgtacggcgcggcctgtcctactgccgccggcgccgcggccgtcatggggttcctgaaactgattgagattgagaactttaagtcgtacaagggtcgacagattatcggaccatttcagaggttcaccgccatcattggacccaatggctctggtaagtcaaatctcatggatgccatcagctttgtgctaggtgaaaaaaccagcaacctgcgggtaaagaccctgcgggacctgatccatggagctcctgtgggcaagccagctgccaaccgggcctttgtcagcatggtctactctgaggagggtgctgaggaccgtacctttgcccgtgtcattgtaggaggttcttctgagtacaagatcaacaacaaagtggtccaactacatgagtacagtgaggaattagagaagttgggcattctcatcaaagctcgtaacttcctcgttttccagggtgctgtggaatctattgccatgaagaaccccaaagagaggacagctctatttgaagagattagtcgttctggggagctggcgcaggagtatgacaagcgaaagaaggaaatggtgaaggctgaagaggacacacagtttaattaccatcgcaagaaaaatattgcggctgaacgcaaggaagcaaagcaggagaaagaagaggctgaccggtaccagcgcctgaaggatgaggtagtacgggctcaggtacagctgcagctctttaagctttaccataatgaagtggaaattgagaagctcaacaaggaactggcctcaaagaacaaggagatcgagaaggacaagaagcgtatggacaaggtggaggatgaactgaaggagaagaagaaggagctgggcaaaatgatgcgggagcagcagcagattgagaaggagatcaaggagaaggactcagaattgaaccagaagcggcctcagtacatcaaagccaaggagaacacctcccacaaaatcaagaagctggaagcagccaagaagtctctgcagaatgctcagaagcactacaagaagcgtaaaggtgacatggatgagctggagaaggagatgctgtcagtggagaaggctcggcaggagtttgaagaacggatggaagaagagagtcagagtcagggcagagatttgacgttggaggagaatcaggtgaagaaataccaccggttgaaagaagaagccagcaagagagcagctaccctggcccaggagctggagaaattcaatcgagaccagaaagctgaccaggaccgtctggatctggaagaacggaagaaagtagagacagaggccaagatcaagcaaaagctgcgggaaattgaagagaatcagaagcggattgagaaactggaggaatacatcaccactagcaagcagtccctagaagagcagaagaagctagagggggagctgacagaggaggtggagatggccaagcggcgtattgatgaaatcaataaggagctgaaccaggtgatggagcagctaggggatgcccgcatcgaccgccaggagagcagccgccagcagcgaaaggcagagataatggaaagcatcaagcgcctttaccctggctctgtgtacggccgcctcattgacctatgccagcccacacaaaagaagtatcagattgctgtaaccaaggttttgggcaagaacatggatgccattattgtggactcggagaagacaggccgggactgtattcagtatatcaaggagcagcgtggggagcctgagaccttcttgcctcttgactacctggagatgaanccttttagangngccactcgggncntctaaggangctcaagggtatt

SEQ ID NO: 295715 - DNA, 1790 bp, Homo sapiens
gcggcgtttcccgcgcgggctacctcagttctcgggcgtacggcgcggcctgtcctactgccgccggcgccgcggccgtcatggggttcctgaaactgattgagattgagaactttaagtcgtacaagggtcgacagattatcggaccatttcagaggttcaccgccatcattggacccaatggctctggtaagtcaaatctcatggatgccatcagctttgtgctaggtgaaaaaaccagcaacctgcgggtaaagaccctgcgggacctgatccatggagctcctgtgggcaagccagctgccaaccgggcctttgtcagcatggtctactctgaggagggtgctgaggaccgtacctttgcccgtgtcattgtaggaggttcttctgagtacaagatcaacaacaaagtggtccaactacatgagtacagtgaggaattagagaagttgggcattctcatcaaagctcgtaacttcctcgttttccagggtgctgtggaatctattgccatgaagaaccccaaagagaggacagctctatttgaagagattagtcgttctggggagctggcgcaggagtatgacaagcgaaagaaggaaatggtgaaggctgaagaggacacacagtttaattaccatcgcaagaaaaatattgcggctgaacgcaaggaagcaaagcaggagaaagaagaggctgaccggtaccagcgcctgaaggatgaggtagtacgggctcaggtacagctgcagctctttaagctttaccataatgaagtggaaattgagaagctcaacaaggaactggcctcaaagaacaaggagatcgagaaggacaagaagcgtatggacaaggtggaggatgaactgaaggagaagaagaaggagctgggcaaaatgatgcgggagcagcagcagattgagaaggagatcaaggagaaggactcagaattgaaccagaagcggcctcagtacatcaaagccaaggagaacacctcccacaaaatcaagaagctggaagcagccaagaagtctctgcagaatgctcagaagcactacaagaagcgtaaaggtgacatggatgagctggagaaggagatgctgtcagtggagaaggctcggcaggagtttgaagaacggatggaagaagagagtcagagtcagggcagagatttgacgttggaggagaatcaggtgaagaaataccaccggttgaaagaagaagccagcaagagagcagctaccctggcccaggagctggagaaattcaatcgagaccagaaagctgaccaggaccgtctggatctggaagaacggaagaaagtagagacagaggccaagatcaagcaaaagctgcgggaaattgaagagaatcagaagcggattgagaaactggaggaatacatcaccactagcaagcagtccctagaagagcagaagaagctagagggggagctgacagaggaggtggagatggccaagcggcgtattgatgaaatcaataaggagctgaaccaggggcatacctggaccttctggggacagggactttatgcatttgtttactgctgtatcttaggctcaaagttggcactcaataaatattggttaaataagtgaattacaagcaggttggattattaggtaatatggttcgcagtgtgggactcctgaactccaagatgtctttgaaagtagccattttttttaatttctaatggtttagtcagactacggattacttaataacagggactatagttcattcatggatatatccccagaatcagg

SEQ ID NO: 295716 - DNA, 1443 bp, Homo sapiens
  misc_feature (1274)..(1274): n is a, c, g, or t
  misc_feature (1283)..(1283): n is a, c, g, or t
  misc_feature (1287)..(1287): n is a, c, g, or t
gcggcgtttcccgcgcgggctacctcagttctcgggcgtacggcgcggcctgtcctactgccgccggcgccgcggccgtcatggggttcctgaaactgattgagattgagaactttaagtcgtacaagggtcgacagattatcggaccatttcagaggttcaccgccatcattggacccaatggctctggtaagtcaaatctcatggatgccatcagctttgtgctaggtgaaaaaaccagcaacctgcgggtaaagaccctgcgggacctgatccatggagctcctgtgggcaagccagctgccaaccgggcctttgtcagcatggtctactctgaggagggtgctgaggaccgtacctttgcccgtgtcattgtaggaggttcttctgagtacaagatcaacaacaaagtggtccaactacatgagtacagtgaggaattagagaagttgggcattctcatcaaagctcgtaacttcctcgttttccagggtgctgtggaatctattgccatgaagaaccccaaagagaggacagctctatttgaagagattagtcgttctggggagctggcgcaggagtatgacaagcgaaagaaggaaatggtgaaggctgaagaggacacacagtttaattaccatcgcaagaaaaatattgcggctgaacgcaaggaagcaaagcaggagaaagaagaggctgaccggtaccagcgcctgaaggatgaggtagtacgggctcaggtacagctgcagctctttaagctttaccataatgaagtggaaattgagaagctcaacaaggaactggcctcaaagaacaaggagatcgagaaggacaagaagcgtatggacaaggtggaggatgaactgaaggagaagaagaaggagctgggcaaaatgatgcgggagcagcagcagattgagaaggagatcaaggagaaggactcagaattgaaccagaagcggcctcagtacatcaaagccaaggagaacacctcccacaaaatcaagaagctggaagcagccaagaagtctctgcagaatgctcagaagcactacaagaagcgtaaaggtgacatggatgagctggagaaggagatgctgtcagtggagaaggctcggcaggagtttgaagaacggatggaagaagagagtcagagtcagggcagagatttgacgttggaggagaatcagaatgagaagaagaaggagctgggcaaaatgatgcgggagcagcagcagattgacaaggagatccacggagaaggactcagnattgaaccngaancggcctcagtacatcaaagccaaggaggacacctcccacaacatcaagaagctggaagcagccaagaagtctctgcagaatgctcaggagcatctacacgaagcgtaaaggtgacatggatgagcctggagaaggagatgctctcagtgagaagga

SEQ ID NO: 295717 - DNA, 1045 bp, Homo sapiens
  misc_feature (949)..(949): n is a, c, g, or t
  misc_feature (958)..(958): n is a, c, g, or t
  misc_feature (962)..(962): n is a, c, g, or t
gcggcgtttcccgcgcgggctacctcagttctcgggcgtacggcgcggcctgtcctactgccgccggcgccgcggccgtcatggggttcctgaaactgattgagattgagaactttaagtcgtacaagggtcgacagattatcggaccatttcagaggttcaccgccatcattggacccaatggctctggtaagtcaaatctcatggatgccatcagctttgtgctaggtgaaaaaaccagcaacctgcgggtaaagaccctgcgggacctgatccatggagctcctgtgggcaagccagctgccaaccgggcctttgtcagcatggtctactctgaggagggtgctgaggaccgtacctttgcccgtgtcattgtaggaggttcttctgagtacaagatcaacaacaaagtggtccaactacatgagtacagtgaggaattagagaagttgggcattctcatcaaagctcgtaacttcctcgttttccagggtgctgtggaatctattgccatgaagaaccccaaagagaggacagctctatttgaagagattagtcgttctggggagctggcgcaggagtatgacaagcgaaagaaggaaatggtgaaggctgaagaggacacacagtttaattaccatcgcaagaaaaatattgcggctgaacgcaaggaagcaaagcaggagaaagaagaggctgaccggtaccagcgcctgaaggatgaggtagtacgggctcaggtacagctgcagctctttaagctttaccataatgaagtggaaattgagaagctcaacaaggaactggcctcaaagaacaaggagatcgagaaggacaagaagcgtatggacaaggtggaggatgaactgaaggagaagaagaaggagctgggcaaaatgatgcgggagcagcagcagattgagaaggagatcaaggagaaggactcagnattgaaccngaancgggcctttgtcagcatggtctactctgaggagggtgctgaggccgtaccttggcccttatcagggtaccagctcgagtcgta

SEQ ID NO: 295718 - DNA, 954 bp, Homo sapiens
gcggcgtttcccgcgcgggctacctcagttctcgggcgtacggcgcggcctgtcctactgccgccggcgccgcggccgtcatggggttcctgaaactgattgagattgagaactttaagtcgtacaagggtcgacagattatcggaccatttcagaggttcaccgccatcattggacccaatggctctggtaagtcaaatctcatggatgccatcagctttgtgctaggtgaaaaaaccagcaacctgcgggtaaagaccctgcgggacctgatccatggagctcctgtgggcaagccagctgccaaccgggcctttgtcagcatggtctactctgaggagggtgctgaggaccgtacctttgcccgtgtcattgtaggaggttcttctgagtacaagatcaacaacaaagtggtccaactacatgagtacagtgaggaattagagaagttgggcattctcatcaaagctcgtaacttcctcgttttccagggtgctgtggaatctattgccatgaagaaccccaaagagaggacagctctatttgaagagattagtcgttctggggagctggcgcaggagtatgacaagcgaaagaaggaaatggtgaaggctgaagaggacacacagtttaattaccatcgcaagaaaaatattgcggctgaacgcaaggaagcaaagcaggagaaagaagaggctgaccggtaccagcgcctgaaggatgaggtagtacgggctcaggtacagctgcagctctttaagctttaccataatgaagtggaaattgagaagctcaacaaggaactggcctcaaagaacaaggagatcgagaaggacaagaagcgtatggacaaggtggaggacagctctatttgaagagattagtcgttctggggagctggcgcaggagtatgacaagcgaaagaaggaaatggtgaacgcggggatcctctag

SEQ ID NO: 295719 - DNA, 417 bp, Homo sapiens
attctcatcaaagctcgtaacttcctcgttttccaggtgggcgtttttaacagttattggctatctggtttttgccagaccatgtcccatccccactctgtctgctccatctcaggctttatcatctctcccttgaactaatgtagcaccttgttcactgagcttcccaacttcagtctggcccctgagccaggttcatcttatgaggacacacatttgttttgtttcccctcccttttttccttaaaacatttcagtgattccgtattgccttacaatggtggttcttaaactgtagtctccagaccagcagtatcagcattacctggtaacatgttagaaaatgcacattctcaggccctatcctagacttcctgacttggaagaaactgtggagtggggcacagcagtttgtgt

SEQ ID NO: 295720 - DNA, 601 bp, Homo sapiens
  misc_feature (24)..(24): n is a, c, g, or t
attcggcatgaggtttgtggctcnccagcctacaaaagactttcatgtcctctattgggctgggaaaatcctgttcttcaagttatctttagtcatgctagaaaagaagcaaactgggaagagaaagacaagagaaattcataggggaaaaaaaattaaagaccagacttaaggttcctgtgagaaaaaaggaaactgaattataaatctgtcatatttagaaagactatgaaaatgatgttagataaaaattaaattcaagcaattttcttgttcgagttcaaaacgggtcataaagcagcagagataacttgcaacatcaacaatgcatttggcccaggaactgctaatgaacatacagtgcagtgcttgttcaagaagttttgcaaaggagaagaggaagatgaggagtgtagtgaccagccattagaagttgacaacaaccaagtgggagcaatcatcaaagctcatccttttacaactacacgagaaggtgccgaagagctcaccattgaccattctatggtcatttggcatttgaagcaaactggaaaggtgaaaaagctcgataagtggatgcctcatgagctgaaccaaaaaa

SEQ ID NO: 295721 - DNA, 1441 bp, Homo sapiens
ttttttttttattagaaggcagattttattgattttatacccctagacttgttgcatatcaaacctatgtaaaaacatctataaatcaaatcattaattgcacctagtataataattctatatatggaggtaatgtttgattcttcaggagctttaataacttgaagcccgtttgattgctttaaaatgatttctcattgtatttgtttatattgtatcattaagcaaaagtacagagtaagcaattagtgtgattaattcctcttctataatacagtaaagcactgcctccatagaccaattctctgggatccctggaaaacatctggcatccagcaagtcttgacccctctttagaaagccatggagaaactggaggcaattctgttaattatttgccctctagaggcaattgggttaattaccctcccttccctatccatgacacaatttctccagttacatgtagaatgctgttatgtgtctcctgaccagaccccttatttcatagatgtggaaactgaggccatgaaggatgaggtgactgttcacaatccacatggctagttagtgtccagagcctggcctggacttctctcttgttctggggccttgagttctctccctcttctttagtacatatggccacaggtaacgtaatctgcgtaccacatttgcatttggagtgcatctgttttgcattcatttaatcttgttgagatggtttgcttgttgacctactcagtcagttatcttttcacctttgtgagttgagagctttgtgtattaaatctgtaaaactttgcatcgtggaaagtgacataatctgtagcagacccatgctgtttttagatgcatcttcattgtggtagtgacagtgattgagaaactttacatgtttttctgtgctatttcagaatatgccttctgaattcagctagaggtggagtcaaaaacaacagaatactatatttttgtttctctgatttaggtaaaatacctcttttctgacaagactaggactcttacatagactaccatgaactaaaagaagcacaacattgccagagtaacctgtggtacgtgtattaatcacttactgaacattttacttgcattctttcaagaaaatgagtttatttttagatacttagtcaaattatcttgactttctgatgtttttaaagagtatttataatagatttagttatttcattaatattgaatgtatttaaaactaaatgcatcccaaaggaaactgaacagttaaaacatggtttatttctgcaaatattaacttagtgagaaatcccagggaatctgcacatttgtgttttctatctaacaatcatgaatttcttagtgtatgttttgatcaggctgtcttttgatcacagttttgtgaccactctgttattcctctctctctggcagtcatttc

SEQ ID NO: 295722 - DNA, 1395 bp, Homo sapiens
ttttttttttattagaaggcagattttattgattttatacccctagacttgttgcatatcaaacctatgtaaaaacatctataaatcaaatcattaattgcacctagtataataattctatatatggaggtaatgtttgattcttcaggagctttaataacttgaagcccgtttgattgctttaaaatgatttctcattgtatttgtttatattgtatcattaagcaaaagtacagagtaagcaattagtgtgattaattcctcttctataatacagtaaagcactgcctccatagaccaattctctgggatccctggaaaacatctggcatccagcaagtcttgacccctctttagaaagccatggagaaactggaggcaattctgttaattatttgccctctagaggcaattgggttaattaccctcccttccctatccatgacacaatttctccagttacatgtagaatgctgttatgtgtctcctgaccagaccccttatttcatagatgtggaaactgaggccatgaaggatgaggtgactgttcacaatccacatggctagttagtgtccagagcctggcctggacttctctcttgttctggggccttgagttctctccctcttctttagtacatatggccacaggtaacgtaatctgcgtaccacatttgcatttggagtgcatctgttttgcattcatttaatcttgttgagatggtttgcttgttgacctactcagtcagttatcttttcacctttgtgagttgagagctttgtgtattaaatctgtaaaactttgcatcgtggaaagtgacataatctgtagcagacccatgctgtttttagatgcatcttcattgtggtagtgacagtgattgagaaactttacatgtttttctgtgctatttcagaatatgccttctgaattcagctagaggtggagtcaaaaacaacagaatactatatttttgtttctctgatttaggtaaaatacctcttttctgacaagactaggactcttacatagactaccatgaactaaaagaagcacaacattgccagagtaacctgtgatactgtcttcatgcgaacttggtatcctgtttccatcccagccttctataacccagtaacatcttttttgaaaccagtgggtgagaaagacacctggtcaggaacgcggaccacaggacaactcaggctcacccacggcatcagactaaaggcaaacaaggactctgtataaagtaccggtggcatgtgtattagtggagatgcagcctgtgctctgcagacagggagtcacacagacacttttctataatttcttaagtgctttgaatgttcaagtagaaagtctaacattaaatttgattgaacaattgtata

SEQ ID NO: 295723 - DNA, 1066 bp, Homo sapiens
ttttttttttattagaaggcagattttattgattttatacccctagacttgttgcatatcaaacctatgtaaaaacatctataaatcaaatcattaattgcacctagtataataattctatatatggaggtaatgtttgattcttcaggagctttaataacttgaagcccgtttgattgctttaaaatgatttctcattgtatttgtttatattgtatcattaagcaaaagtacagagtaagcaattagtgtgattaattcctcttctataatacagtaaagcactgcctccatagaccaattctctgggatccctggaaaacatctggcatccagcaagtcttgacccctctttagaaagccatggagaaactggaggcaattctgttaattatttgccctctagaggcaattgggttaattaccctcccttccctatccatgacacaatttctccagttacatgtagaatgctgttatgtgtctcctgaccagaccccttatttcatagatgtggaaactgaggccatgaaggatgaggtgactgttcacaatccacatggctagttagtgtccagagcctggcctggacttctctcttgttctggggccttgagttctctccctcttctttagtacatatggccacaggtaacgtaatctgcgtaccacatttgcatttggagtgcatctgttttgcattcatttaatcttgttgagatggtttgcttgttgacctactcagtcagttatcttttcacctttgtgagttgagagctttgtgtattaaatctgtaaaactttgcatcgtggaaagtgacataatctgtagcagacccatgctgtttttagatgcatcttcattgtggtagtgacagtgattgagaaactttacatgtttttctgtgctatttcagaatatgccttctgaattcagctagaggtggagtcaaaaacaacagaatactatatttttgtttctctgatttaggtaaaatacctcttttctgacaagccacggtcaacccacaagccacggtcaacccacaagccacggtcaacccac

SEQ ID NO: 295724 - DNA, 2996 bp, Homo sapiens
attctttaactgaggtggttaaatggccctgaaaagtgaaataagctgttttcccactgcttactgtgagttctacttaggggttttccctcagcacctatcccttttcctgcagatgatgggagaggaatataagataaagctataagatgtagcttggtcgagaactaccttgtagtgacagggtcatgtgcacataatttgccttttccaaagtgagacgatatgctacgggtgcggtcaatgtaaatctgctcaggagagtcgagggaaaaagtgttaactgcatattgagctcgcaaaattgtgtagtaacctgaaaatattcctaatagttttgcgaccaagcctcaccatataaactttccttccgcacctgtagacctccattctgtggttgaagcaatttttggtttatatagctctcttgtctcaatttggtattcctttcaggtactgtgagtctataggtatttatttctgggtttcaagacgttaaatgccatcagaattgagtaatgcaaaggctgctgtcatggatagtaaagctttttagtcaagtgctgatagacaattccccattgttatcgttgggtattttacaattttctgggcaagaaatgtaatgaaaaattaagtaagttttaaaggccttcgtctttgagactggatacctaaaacaatagtgtttcctaaacagttaaaacttatttaaccctgaagctttcgagacacacaaatatatacaaatatatattgtatatttcttaaaccccacatagttccactgatctaaatcactgggggcgagaggcaaggatagacaatctatgacacaacaccaggtgattcataagtttggtaaccactgacatttgattatgcagttgccatattccttagtaagaacctggtcacaattttcactcactaccccaggcaattccccctccccacaccccccttttttctgagaatttcagtgagatatacaaaagtttcatttaatcctttattaattccagactttatatatttttattaggatttaaaatacatttcaaaaagatcaagtgagaacagaagataaaagtaccaagataaaggcataatacaaacttagaaaatacatgttaagcatactgcggcgtcctggtagccccttgcttttgttcacttttttctcttatgtacctacataaaatcccaaatagtatcttccaggatgacacacttgctgtctgccccacccaattaaaaacagattttttagttattaggtattgtgctgaatctaccttattttattgccaaaagaaaaaaaaaaaaaagcttttcaaagcttcatccccaggaaacattttcctgcttttacacataccttatatggctctactgagagataaggcctaagcctgaaaagttaatttaaagcatggaggtaggggtgagacagaaagacaacagggaaaagttgagtttataaggtaagtatatatcttccttttaacagccacctgcatggcgttcggtaaataacctaattatatgtggggaaggtagtggtcaacatttggtcctggggactgagaataagagcaggaaagcaataaacagctaactatgagagtgacttaatgtaattatattacctgtcaatcgctacttttcctttcttaccaaaattcacacaggtatgaaagcaatatgacattcaggctccattatgtgtatttgtgcacatcacttcccacgataagggagaagaaaagaaaccactgcacattcggataaaacatgctgggaatacagcagtaaacagaatagaaaaagtctacattttaattagcagataagtaaaaataagtgactaaatgtatattattcagggggccatatgtgcaattgctgttaagtaaagcagaacatggagtggagtagggatgacaggtttcatcagttaatacttgagcagagagctgaatacagtaagatagttgtaggatatcttgaggcagagtattctcagaacagaacatggtaagtacaaaggccccaaggcaggaacaagcttggtgaatgtgagaaatatgcaagctggttaatgtggctgaagcacagtgaccaagggaaagttttacagagatcacggaggtgcttgagggctggattatgtaggccattaaggagcatcacaggccactgcagagattttgtcttttaaatgagatagagtgctcttggagaatgtgactggagaggccgatggtagcagtggagatgcagagtagtagccgagatattttaaatgaaattgatttagtataggctgactgaaagagaaatcaaggattaattgtaggtttttacactgagcacttgaaaagagctgctatttgctgatatgagtaaggagtagtcttggaggaagaaaaccaagagtactgttttgaacaaaatgttgaagactcctggtaaatatcgaagtgtaaatatcaaataggaagtcagaaatatgagaatctggagtttaggaaagagaagggggttaggtttgtaagatctcatatcagtctgattcttatttttttgtagataatctaccctttctttctgtaaatgtttagaagcatgatgtctatgtgtgtatatatacacacacactcactcccccccgccaggactgcctcagttttcatctcagtatttgactaaaaccttctattcaacttcagtttcagccttagaataaccagatgtctaagtcaatgtcatttggggcatctctagacttgtgcaatcacaaaagtcaccattaccgctacatagtacgtattatgaccaatggatatcattcagagttctagtttacatatgctattatcaaacatatgtaagccttttaatgtaacttgggagtgaaattagtaaaattctatcaatttacataaattaattttactgtaaaaataaaatacattatgaaagtttctgta

SEQ ID NO: 295725 - DNA, 2789 bp, Homo sapiens
attctttaactgaggtggttaaatggccctgaaaagtgaaataagctgttttcccactgcttactgtgagttctacttaggggttttccctcagcacctatcccttttcctgcagatgatgggagaggaatataagataaacctcaccatataaactttccttccgcacctgtagacctccattctgtggttgaagcaatttttggtttatatagctctcttgtctcaatttggtattcctttcaggtactgtgagtctataggtatttatttctgggtttcaagacgttaaatgccatcagaattgagtaatgcaaaggctgctgtcatggatagtaaagctttttagtcaagtgctgatagacaattccccattgttatcgttgggtattttacaattttctgggcaagaaatgtaatgaaaaattaagtaagttttaaaggccttcgtctttgagactggatacctaaaacaatagtgtttcctaaacagttaaaacttatttaaccctgaagctttcgagacacacaaatatatacaaatatatattgtatatttcttaaaccccacatagttccactgatctaaatcactgggggcgagaggcaaggatagacaatctatgacacaacaccaggtgattcataagtttggtaaccactgacatttgattatgcagttgccatattccttagtaagaacctggtcacaattttcactcactaccccaggcaattccccctccccacaccccccttttttctgagaatttcagtgagatatacaaaagtttcatttaatcctttattaattccagactttatatatttttattaggatttaaaatacatttcaaaaagatcaagtgagaacagaagataaaagtaccaagataaaggcataatacaaacttagaaaatacatgttaagcatactgcggcgtcctggtagccccttgcttttgttcacttttttctcttatgtacctacataaaatcccaaatagtatcttccaggatgacacacttgctgtctgccccacccaattaaaaacagattttttagttattaggtattgtgctgaatctaccttattttattgccaaaagaaaaaaaaaaaaaagcttttcaaagcttcatccccaggaaacattttcctgcttttacacataccttatatggctctactgagagataaggcctaagcctgaaaagttaatttaaagcatggaggtaggggtgagacagaaagacaacagggaaaagttgagtttataaggtaagtatatatcttccttttaacagccacctgcatggcgttcggtaaataacctaattatatgtggggaaggtagtggtcaacatttggtcctggggactgagaataagagcaggaaagcaataaacagctaactatgagagtgacttaatgtaattatattacctgtcaatcgctacttttcctttcttaccaaaattcacacaggtatgaaagcaatatgacattcaggctccattatgtgtatttgtgcacatcacttcccacgataagggagaagaaaagaaaccactgcacattcggataaaacatgctgggaatacagcagtaaacagaatagaaaaagtctacattttaattagcagataagtaaaaataagtgactaaatgtatattattcagggggccatatgtgcaattgctgttaagtaaagcagaacatggagtggagtagggatgacaggtttcatcagttaatacttgagcagagagctgaatacagtaagatagttgtaggatatcttgaggcagagtattctcagaacagaacatggtaagtacaaaggccccaaggcaggaacaagcttggtgaatgtgagaaatatgcaagctggttaatgtggctgaagcacagtgaccaagggaaagttttacagagatcacggaggtgcttgagggctggattatgtaggccattaaggagcatcacaggccactgcagagattttgtcttttaaatgagatagagtgctcttggagaatgtgactggagaggccgatggtagcagtggagatgcagagtagtagccgagatattttaaatgaaattgatttagtataggctgactgaaagagaaatcaaggattaattgtaggtttttacactgagcacttgaaaagagctgctatttgctgatatgagtaaggagtagtcttggaggaagaaaaccaagagtactgttttgaacaaaatgttgaagactcctggtaaatatcgaagtgtaaatatcaaataggaagtcagaaatatgagaatctggagtttaggaaagagaagggggttaggtttgtaagatctcatatcagtctgattcttatttttttgtagataatctaccctttctttctgtaaatgtttagaagcatgatgtctatgtgtgtatatatacacacacactcactcccccccgccaggactgcctcagttttcatctcagtatttgactaaaaccttctattcaacttcagtttcagccttagaataaccagatgtctaagtcaatgtcatttggggcatctctagacttgtgcaatcacaaaagtcaccattaccgctacatagtacgtattatgaccaatggatatcattcagagttctagtttacatatgctattatcaaacatatgtaagccttttaatgtaacttgggagtgaaattagtaaaattctatcaatttacataaattaattttactgtaaaaataaaatacattatgaaagtttctgta

SEQ ID NO: 295726 - DNA, 2252 bp, Homo sapiens
agcggccgctcgcgatctgaactagaaaccccacatagttccactgatctaaatcactgggggcgagaggcaaggatagacaatctatgacacaacaccaggtgattcataagtttggtaaccactgacatttgattatgcagttgccatattccttagtaagaacctggtcacaattttcactcactaccccaggcaattccccctccccacaccccccttttttctgagaatttcagtgagatatacaaaagtttcatttaatcctttattaattccagactttatatatttttattaggatttaaaatacatttcaaaaagatcaagtgagaacagaagataaaagtaccaagataaaggcataatacaaacttagaaaatacatgttaagcatactgcggcgtcctggtagccccttgcttttgttcacttttttctcttatgtacctacataaaatcccaaatagtatcttccaggatgacacacttgctgtctgccccacccaattaaaaacagattttttagttattaggtattgtgctgaatctaccttattttattgccaaaagaaaaaaaaaaaaaagcttttcaaagcttcatccccaggaaacattttcctgcttttacacataccttatatggctctactgagagataaggcctaagcctgaaaagttaatttaaagcatggaggtaggggtgagacagaaagacaacagggaaaagttgagtttataaggtaagtatatatcttccttttaacagccacctgcatggcgttcggtaaataacctaattatatgtggggaaggtagtggtcaacatttggtcctggggactgagaataagagcaggaaagcaataaacagctaactatgagagtgacttaatgtaattatattacctgtcaatcgctacttttcctttcttaccaaaattcacacaggtatgaaagcaatatgacattcaggctccattatgtgtatttgtgcacatcacttcccacgataagggagaagaaaagaaaccactgcacattcggataaaacatgctgggaatacagcagtaaacagaatagaaaaagtctacattttaattagcagataagtaaaaataagtgactaaatgtatattattcagggggccatatgtgcaattgctgttaagtaaagcagaacatggagtggagtagggatgacaggtttcatcagttaatacttgagcagagagctgaatacagtaagatagttgtaggatatcttgaggcagagtattctcagaacagaacatggtaagtacaaaggccccaaggcaggaacaagcttggtgaatgtgagaaatatgcaagctggttaatgtggctgaagcacagtgaccaagggaaagttttacagagatcacggaggtgcttgagggctggattatgtaggccattaaggagcatcacaggccactgcagagattttgtcttttaaatgagatagagtgctcttggagaatgtgactggagaggccgatggtagcagtggagatgcagagtagtagccgagatattttaaatgaaattgatttagtataggctgactgaaagagaaatcaaggattaattgtaggtttttacactgagcacttgaaaagagctgctatttgctgatatgagtaaggagtagtcttggaggaagaaaaccaagagtactgttttgaacaaaatgttgaagactcctggtaaatatcgaagtgtaaatatcaaataggaagtcagaaatatgagaatctggagtttaggaaagagaagggggttaggtttgtaagatctcatatcagtctgattcttatttttttgtagataatctaccctttctttctgtaaatgtttagaagcatgatgtctatgtgtgtatatatacacacacactcactcccccccgccaggactgcctcagttttcatctcagtatttgactaaaaccttctattcaacttcagtttcagccttagaataaccagatgtctaagtcaatgtcatttggggcatctctagacttgtgcaatcacaaaagtcaccattaccgctacatagtacgtattatgaccaatggatatcattcagagttctagtttacatatgctattatcaaacatatgtaagccttttaatgtaacttgggagtgaaattagtaaaattctatcaatttacataaattaattttactgtaaaaataaaatacattatgaaagtttctgta

SEQ ID NO: 295727 - DNA, 3881 bp, Homo sapiens
attctttaactgaggtggttaaatggccctgaaaagtgaaataagctgttttcccactgcttactgtgagttctacttaggggttttccctcagcacctatcccttttcctgcagatgatgggagaggaatataagataaagctataagatgtagcttggtcgagaactaccttgtagtgacagggtcatgtgcacataatttgccttttccaaagtgagacgatatgctacgggtgcggtcaatgtaaatctgctcaggagagtcgagggaaaaagtgttaactgcatattgagctcgcaaaattgtgtagtaacctgaaaatattcctaatagttttgcgaccaagcctcaccatataaactttccttccgcacctgtagacctccattctgtggttgaagcaatttttggtttatatagctctcttgtctcaatttggtattcctttcaggtactgtgagtctataggtatttatttctgggtttcaagacgttaaatgccatcagaattgagtaatgcaaaggctgctgtcatggatagtaaagctttttagtcaagtgctgatagacaattccccattgttatcgttgggtattttacaattttctgggcaagaaatgtaatgaaaaattaagtaagttttaaaggccttcgtctttgagactggatacctaaaacaatagtgtttcctaaacagttaaaacttatttaaccctgaagctttcgagacacacaaatatatacaaatatatattgtatatttcttaaaccccacatagttccactgatctaaatcactgggggcgagaggcaaggatagacaatctatgacacaacaccaggtgattcataagtttggtaaccactgacatttgattatgcagttgccatattccttagtaagaacctggtcacaattttcactcactaccccaggcaattccccctccccacaccccccttttttctgagaatttcagtgagatatacaaaagtttcatttaatcctttattaattccagactttatatatttttattaggatttaaaatacatttcaaaaagatcaagtgagaacagaagataaaagtaccaagataaaggcataatacaaacttagaaaatacatgttaagcatactgcggcgtcctggtagccccttgcttttgttcacttttttctcttatgtacctacataaaatcccaaatagtatcttccaggatgacacacttgctgtctgccccacccaattaaaaacagattttttagttattaggtattgtgctgaatctaccttattttattgccaaaagaaaaaaaaaaaaaagcttttcaaagcttcatccccaggaaacattttcctgcttttacacataccttatatggctctactgagagataaggcctaagcctgaaaagttaatttaaagcatggaggtaggggtgagacagaaagacaacagggaaaagttgagtttataaggtaagtatatatcttccttttaacagccacctgcatggcgttcggtaaataacctaattatatgtggggaaggtagtggtcaacatttggtcctggggactgagaataagagcaggaaagcaataaacagctaactatgagagtgacttaatgtaattatattacctgtcaatcgctacttttcctttcttaccaaaattcacacaggtatgaaagcaatatgacattcaggctccattatgtgtatttgtgcacatcacttcccacgataagggagaagaaaagaaaccactgcacattcggataaaacatgctgggaatacagcagtaaacagaatagaaaaagtctacattttaattagcagataagtaaaaataagtgactaaatgtatattattcagggggccatatgtgcaattgctgttaagtaaagcagaacatggagtggagtagggatgacaggtttcatcagttaatacttgagcagagagctgaatacagtaagatagttgtaggatatcttgaggcagagtattctcagaacagaacatggtaagtacaaaggccccaaggcaggaacaagcttggtgaatgtgagaaatatgcaagctggttaatgtggctgaagcacagtgaccaagggaaagttttacagagatcacggaggtgcttgagggctggattatgtaggccattaaggagcatcacaggccactgcagagattttgtcttttaaatgagatagagtgctcttggagaatgtgactggagaggccgatggtagcagtggagatgcagagtagtagccgagatattttaaatgaaattgatttagtataggctgactgaaagagaaatcaaggattaattgtaggtttttacactgagcacttgaaaagagctgctatttgctgatatgagtaaggagtagtcttggaggaagaaaaccaagagtactgttttgaacaaaatgttgaagactcctggtaaatatcgaagtgtaaatatcaaataggaagtcagaaatatgagaatctggagtttaggaaagagaagggggttaggtttgtaagatctcatatcagtctgattcttatttttttgtagataatctaccctttctttctgtaaatgtttagaagcatgatgtctatgtgtgtatatatacacacacactcactcccccccgccaggactgcctcagttttcatctcagtatttgactaaaaccttctattcaacttcagtttcagccttagaataaccagatgtctaagtcaatgtcatttggggcatctctagacttgtgcaatcacaaaagtcaccattaccgctacatagtacgtattatgaccaatggatatcattcagagttctagtttacatatgctattatcaaacatatgtaagccttttaatgtaacttgggagtgaaattagtaaaattctatcaatttacataaattaattttactgtaaaaataaaatacattatgaaagtttctgtactaatgtctttgattacaatttttaaagtatttcccattttttattttgaaaattttaaacctacagaaaagttggaaaaaaaagtacaaagaccagccatagtcccttcacctggattcaccaattattacaattttgctgcatttgccttatctttgtcttctcatgtacacagacagcctctgaaccatttgaaaataaactgcaaatatgttggcacttctccctaaatatggtggcatgtctcttaaaaataggatattctcctaaatagctacaatcacattattacacctaacaaatttaatgctgattcagtaatattaatatgcaatccatattcaaatttctccaattattgaaaaaattctatatagatgttgtattagtttcttgtggctgctgcaacaaattactacaaactcaatggttttaaaacaacagtcattctcttacagttttggaggtctgaagtacaaaatcaattttactcggtagaaatcaaggctgcactccctccagagaccttaagggagggtctatttccatgccttttccagcttctagaggtttatttctggtttatggtcccttccctctgtcttcaaagcaagcagcctattaatcttcaaatccctctctccttctatcgcctccttctacacttgactttcttgcctctcctataaggactgtggtgattacatttggggcctacctggataatctggcataatctctcaatctcagaatcacatctgcaaaatcctcttggctatataaggtaatattcacaggctgtagggattaggatatggacatatttgggagccacatttagcctgccacagccattgactactgttatgggttgagttgtgtcc

SEQ ID NO: 295728 - DNA, 1194 bp, Homo sapiens
ttatataaggtgaaagacaaggccagatccaagttggcaagctggagggcaaactactaaaggagcccctaacttgtgcctaactttgggaccaatggtcaaaagcaggtcaagtaaagcagaacatggagtggagtagggatgacaggtttcatcagttaatacttgagcagagagctgaatacagtaagatagttgtaggatatcttgaggcagagtattctcagaacagaacatggtaagtacaaaggccccaaggcaggaacaagcttggtgaatgtgagaaatatgcaagctggttaatgtggctgaagcacagtgaccaagggaaagttttacagagatcacggaggtgcttgagggctggattatgtaggccattaaggagcatcacaggccactgcagagattttgtcttttaaatgagatagagtgctcttggagaatgtgactggagaggccgatggtagcagtggagatgcagagtagtagccgagatattttaaatgaaattgatttagtataggctgactgaaagagaaatcaaggattaattgtaggtttttacactgagcacttgaaaagagctgctatttgctgatatgagtaaggagtagtcttggaggaagaaaaccaagagtactgttttgaacaaaatgttgaagactcctggtaaatatcgaagtgtaaatatcaaataggaagtcagaaatatgagaatctggagtttaggaaagagaagggggttaggtttgtaagatctcatatcagtctgattcttatttttttgtagataatctaccctttctttctgtaaatgtttagaagcatgatgtctatgtgtgtatatatacacacacactcactcccccccgccaggactgcctcagttttcatctcagtatttgactaaaaccttctattcaacttcagtttcagccttagaataaccagatgtctaagtcaatgtcatttggggcatctctagacttgtgcaatcacaaaagtcaccattaccgctacatagtacgtattatgaccaatggatatcattcagagttctagtttacatatgctattatcaaacatatgtaagccttttaatgtaacttgggagtgaaattagtaaaattctatcaatttacataaattaattttactgtaaaaataaaatacattatgaaagtttctgta

SEQ ID NO: 295729 - DNA, 1002 bp, Homo sapiens
attctttaactgaggtggttaaatggccctgaaaagtgaaataagctgttttcccactgcttactgtgagttctacttaggggttttccctcagcacctatcccttttcctgcagatgatgggagaggaatataagataaagctataagatgtagcttggtcgagaactaccttgtagtgacagggtcatgtgcacataatttgccttttccaaagtgagacgatatgctacgggtgcggtcaatgtaaatctgctcaggagagtcgagggaaaaagtgttaactgcatattgagctcgcaaaattgtgtagtaacctgaaaatattcctaatagttttgcgaccaagcctcaccatataaactttccttccgcacctgtagacactcccctgctgagttagttgttactcagttcacttcctgaaatgttaaatgccaatgagtttgatctagattcctgaactaatcacagtaagaagcaggttcagacagcaattaaactaatcaggccaaccctaagaactgtgggtaaaatgcgtttctgggaaacacatgtggcagcactataacagaaacaattagaaaaataaatgctacctagtcaataacatacattataggactatgaactactaagttacacctcatgacaaacacatgagtaataaagtctagaaaaatacttaaaggtgatgtccatcattctcattgctgtgttcacagttcacaggtagaccctaaagacaggcttgtgttgtctttactgaaccctagatgcatctctcaaactgtcaactgcacatatccacttgaatagcaaagagcttctcaaatttcagtcggaactctggatctcccttcagtgtcccaacgaatatcttctctcagtgttctatcctaatagtaccactatgtacacagttgctcaagccaaaaatctaggggtttcactgttagctaaatcctgttcctcagccacacctattaattctacctcaaag

SEQ ID NO: 295730 - DNA, 1094 bp, Homo sapiens
gatttagtttatttaaaatttttaaataaaatttcacatctgaaaaaaaaccctggacatttttcctgtgatggtaatattagtctttagccttagtcaagtattaacatttggacatctgttccaaatatgtaattggagcaactctgtcctaattgaccctatttgacttgagacctttcatgaaaggtctttccttttatctaggaaattattattcctgaaatatttcaagattcaaactggtataagtaaatatgtcagacaaattggcttaactggaagtccaaaggtgcagcagggatccaaggttggctgaactccatgagtggctcagttccctgattctcccacactgtgtcctcctctgcatattgtctataatcattcttgccttcatacctaaagacagtccatcctcctgctgcctcttgaaagcaaataagctgctttcccaaaagataatagcatactacactcccctgctgagttagttgttactcagttcacttcctgaaatgttaaatgccaatgagtttgatctagattcctgaactaatcacagtaagaagcaggttcagacagcaattaaactaatcaggccaaccctaagaactgtgggtaaaatgcgtttctgggaaacacatgtggcagcactataacagaaacaattagaaaaataaatgctacctagtcaataacatacattataggactatgaactactaagttacacctcatgacaaacacatgagtaataaagtctagaaaaatacttaaaggtgatgtccatcattctcattgctgtgttcacagttcacaggtagaccctaaagacaggcttgtgttgtctttactgaaccctagatgcatctctcaaactgtcaactgcacatatccacttgaatagcaaagagcttctcaaatttcagtcggaactctggatctcccttcagtgtcccaacgaatatcttctctcagtgttctatcctaatagtaccactatgtacacagttgctcaagccaaaaatctaggggtttcactgttagctaaatcctgttcctcagccacacctattaattctacctcaaag

SEQ ID NO: 295731 - DNA, 683 bp, Homo sapiens
gcagcgtcatgcgcacagcctctgtaagtacacagtcgtttccggtagaccccgagcctaccgctctgcttgcgttctcgggggtcggtgtcggtcttgggtctggccatgcctgagcctgcaaagttcgcgccggctcccaagaagggctccaagaaagccgtcaccaaagcccagaagaaagacggcaagaagcgcaagcgcagccgcaaggagagctactccatctacgtgtacaaggtgctgaagcgggtccaccccgacaccggcatctggtgcaaggccatgggcatcatgaactccttcctcaacgacatcttcgagcgcatcgcgggagaggcgtcccgcctggcgcactacaacaagcgctccaccatcacgtcccggagatccagacggccgtgcgcctgctgctgcccggcgagctggccaagcacgccgtgtccgagggcaccaaggcggtcaccaagtacgccagctccaagtgagtccctgccgggacctggcgctcgctcgctccctccctccctccctccgcgggtcgccggctgctttgtctccaaaggctcttttcagggccacttaaccccgttagtgaaataagctgttttcccactgcttactgtgagttctacttaggggttttccctcagcacctatcccttttcctgcagatgatggga

SEQ ID NO: 295732 - DNA, 981 bp, Homo sapiens
gcagagggctcttccggcgccttcccaggcggggatgctgcggctccgcagcgggctgaggcaccttcgggcaacacccaatactcggggctccgctcggcttcttcgcgccgagatgcctaagaaggctggtgcgacgaccaagggtaaaagccagagcaaggaaccagagagaccacttcctcccttaggtcctgtggcagttgatcctaaaggatgcgtcaccatagccatccatgcaaaacctggctccaaacaaaatgctgtaacagatttgacagcagaggctgtaaatgtagctattgcagcacctccatcagagggagaggctaatgctgagctctgtcggtatctttccaaggtcctagaactcaggaagagtgatgtggttttggataagaagttgagagacttactcaagattgtaccatgcaagctggcaactagaacccaaatccttggactacttgttgaatgcagtttttctagattgtaaattaaaaatcatatctccacaacggttctggaattctggggattgccttctaatccagtttacaagtgacagaaaacctgttatgctgctttgtagtcttaccttagatttttaaatgcttatttaaatgtaaaaaaaatttttttttacatcttttaaagactatatttaccattttgttgaaaaagtaaagaaaaatcatgacttgtaattaaatgtgaattataatttttgagaagtcactgaattttcatcttcctctaataacttaaataatcagcaaattcagtagtttttatgaatctccaaagatccttaaaagaagaaagaggacttggaagctattttcagtatttgtaaaagcttgtcagaaattacatctatattaaagtttcaaaagctaataatatatttttacatcttcaggtcaagttatagtaatttattaaagaaaataaaattaatttcctttgctgatcaggaga

SEQ ID NO: 295733 - DNA, 954 bp, Homo sapiens
gcagagggctcttccggcgccttcccaggcggggatgctgcggctccgcagcgggctgaggcaccttcgggcaacacccaatactcggggctccgctcggcttcttcgcgccgagatgcctaagaaggctggtgcgacgaccaagggtaaaagccagagcaaggaaccagagagaccacttcctcccttaggtcctgtggcagttgatcctaaaggatgcgtcaccatagccatccatgcaaaacctggctccaaacaaaatgctgtaacagatttgacagcagaggctgtaaatgtagctattgcagcacctccatcagagggagaggctaatgctgagctctgtcggtatctttccaaggtcctagaactcaggaagagtgatgtggttttggataaggtaggtctcgctctcttttttttttttttgagacaaaatcttgctctgtcgcccaagctggagtgcagtggcgtagtcttggctcactgcaacctccacctcctgggttcaagctattctcctgcctcagcttcctgagtagctgggattataggcgcatgccaccatgcctggctaatttttgtatttttaatagagacggagtttcaccatgttggtcaggctggtcttgaactcctgacctcaaatgatccacctgccttctcctcccgaagcgctgggattagaggtatgagccaccatgcccggaggtctctctctttttaaacttctttaattattttctttttttttttgagacggagtctcgctctgttgtccagcctggagtgcagtggtgcaatcttgacgcactgctacctctcactcctggattcaagcgattctcctgcctcagcctcctgagtagttgggattacaggcacccaccaccaggcccacctaatttttgtatttgtagtagagacagggtttcaccatgttggacaggctgg

SEQ ID NO: 295734 - DNA, 1701 bp, Homo sapiens
gcagagggctcttccggcgccttcccaggcggggatgctgcggctccgcagcgggctgaggcaccttcgggcaacacccaatactcggggctccgctcggcttcttcgcgccgagatgcctaagaaggctggtgcgacgaccaagggtaaaagccagagcaaggaaccagagagaccacttcctcccttaggtcctgtggcagttgatcctaaaggatgcgtcaccatagccatccatgcaaaacctggctccaaacaaaatgctgtaacagatttgacagcagaggctgtaaatgtagctattgcagcacctccatcagagggagaggctaatgctgagctctgtcggtatctttccaaggtcctagaactcaggaagagtgatgtggttttggataagggtggtaaatctcgtgaaaaggtggtgaagcttttggcttctacaactccagaagagatcttggagaaattaaaaaaggaagccaaaaaaacataaaagcaagaaatgaggccgggcgcagtggctcatgcctgtaatcccagcactttgggaggccgtggtgggcggatcacctgaggtcaggagttcgagaccagcctgaccaacatggtgaaaccccatctctacgaaaaatacaaaattagccagatgtgatggcgcatgcctgtaatcccagttactcaggaggctgaggcaggagaatcacttgaacctggggggcggaggttgcagtaagccgagatcgcgccgttgcactccagcctgggcaacaagagtgaaactctctccccccgaaaaaaaagaaataaaaaatacatccttgagaaacttttttattgctaatggtgaagaggctgttaaatagaaaaatatactacatgcacagaagaacatgggggacatatatatatgtatatattcgaataagactccaaaaagtagaaatttaaaaagtgctatacattgcatcaggttctaaaatcccaaaccccaaacagcctggaacatgttactctgatttcatggcgttgtaaaataacagagctgggaagaatattcaagatgacctgatttaacacctttcattctgttggggggcctttgatttcctatatccagaagttgagagacttactcaagattgtaccatgcaagctggcaactagaacccaaatccttggactacttgttgaatgcagtttttctagattgtaaattaaaaatcatatctccacaacggttctggaattctggggattgccttctaatccagtttacaagtgacagaaaacctgttatgctgctttgtagtcttaccttagatttttaaatgcttatttaaatgtaaaaaaaatttttttttacatcttttaaagactatatttaccattttgttgaaaaagtaaagaaaaatcatgacttgtaattaaatgtgaattataatttttgagaagtcactgaattttcatcttcctctaataacttaaataatcagcaaattcagtagtttttatgaatctccaaagatccttaaaagaagaaagaggacttggaagctattttcagtatttgtaaaagcttgtcagaaattacatctatattaaagtttcaaaagctaataatatatttttacatcttcaggtcaagttatagtaatttattaaagaaaataaaattaatttcctttgctgatcaggaga

SEQ ID NO: 295735 - DNA, 1446 bp, Homo sapiens
gcagagggctcttccggcgccttcccaggcggggatgctgcggctccgcagcgggctgaggcaccttcgggcaacacccaatactcggggctccgctcggcttcttcgcgccgagatgcctaagaaggctggtgcgacgaccaagggtggtaaatctcgtgaaaaggtggtgaagcttttggcttctacaactccagaagagatcttggagaaattaaaaaaggaagccaaaaaaacataaaagcaagaaatgaggccgggcgcagtggctcatgcctgtaatcccagcactttgggaggccgtggtgggcggatcacctgaggtcaggagttcgagaccagcctgaccaacatggtgaaaccccatctctacgaaaaatacaaaattagccagatgtgatggcgcatgcctgtaatcccagttactcaggaggctgaggcaggagaatcacttgaacctggggggcggaggttgcagtaagccgagatcgcgccgttgcactccagcctgggcaacaagagtgaaactctctccccccgaaaaaaaagaaataaaaaatacatccttgagaaacttttttattgctaatggtgaagaggctgttaaatagaaaaatatactacatgcacagaagaacatgggggacatatatatatgtatatattcgaataagactccaaaaagtagaaatttaaaaagtgctatacattgcatcaggttctaaaatcccaaaccccaaacagcctggaacatgttactctgatttcatggcgttgtaaaataacagagctgggaagaatattcaagatgacctgatttaacacctttcattctgttggggggcctttgatttcctatatccagaagttgagagacttactcaagattgtaccatgcaagctggcaactagaacccaaatccttggactacttgttgaatgcagtttttctagattgtaaattaaaaatcatatctccacaacggttctggaattctggggattgccttctaatccagtttacaagtgacagaaaacctgttatgctgctttgtagtcttaccttagatttttaaatgcttatttaaatgtaaaaaaaatttttttttacatcttttaaagactatatttaccattttgttgaaaaagtaaagaaaaatcatgacttgtaattaaatgtgaattataatttttgagaagtcactgaattttcatcttcctctaataacttaaataatcagcaaattcagtagtttttatgaatctccaaagatccttaaaagaagaaagaggacttggaagctattttcagtatttgtaaaagcttgtcagaaattacatctatattaaagtttcaaaagctaataatatatttttacatcttcaggtcaagttatagtaatttattaaagaaaataaaattaatttcctttgctgatcaggaga

SEQ ID NO: 295736 - DNA, 2385 bp, Homo sapiens
cacgcgcccctcctccgcatctgagcgggggagcggcggcccccagctgaatgggcgcgagagcggcgctgggggcgggtgggggcgcggggtaccgggctggcggccggccggcgccccctcattagtatgcggacgaaggcggcgggctgcgcggagcggcgtcccctgcagccgcggaccgaggcagcggcggcacctgccggccgagcaatgccaagtgagtacacctatgtgaaactgagaagtgattgctcgaggccttccctgcaatggtacacccgagctcaaagcaagatgagaaggcccagcttgttattaaaagacatcctcaaatgtacattgcttgtgtttggagtgtggatcctttatatcctcaagttaaattatactactgaagaatgtgacatgaaaaaaatgcattatgtggaccctgaccatgtaaagagagctcagaaatatgctcagcaagtcttgcagaaggaatgtcgtcccaagtttgccaagacatcaatggcgctgttatttgagcacaggtatagcgtggacttactcccttttgtgcagaaggcccccaaagacagtgaagctgagtccaagtacgatcctccttttgggttccggaagttctccagtaaagtccagaccctcttggaactcttgccagagcacgacctccctgaacacttgaaagccaagacctgtcggcgctgtgtggttattggaagcggaggaatactgcacggattagaactgggccacaccctgaaccagttcgatgttgtgataaggttaaacagtgcaccagttgagggatattcagaacatgttggaaataaaactactataaggatgacttatccagagggcgcaccactgtctgaccttgaatattattccaatgacttatttgttgctgttttatttaagagtgttgatttcaactggcttcaagcaatggtaaaaaaggaaaccctgccattctgggtacgactcttcttttggaagcaggtggcagaaaaaatcccactgcagccaaaacatttcaggattttgaatccagttatcatcaaagagactgcctttgacatccttcagtactcagagcctcagtcaaggttctggggccgagataagaacgtccccacaatcggtgtcattgccgttgtcttagccacacatctgtgcgatgaagtcagtttggcgggttttggatatgacctcaatcaacccagaacacctttgcactacttcgacagtcaatgcatggctgctatgaactttcagaccatgcataatgtgacaacggaaaccaagttcctcttaaagctggtcaaagagggagtggtgaaagatctcagtggaggcattgatcgtgaattttgaacacagaaaacctcagttgaaaatgcaactctaactctgagagctgtttttgacagccttcttgatgtatttctccatcctgcagatactttgaagtgcagctcatgtttttaacttttaatttaaaaacacaaaaaaaattttagctcttcccactttttttttcctatttatttgaggtcagtgtttgtttttgcacaccattttgtaaatgaaacttaagaattgaattggaaagacttctcaaagagaattgtatgtaacgatgttgtattgatttttaagaaagtaatttaatttgtaaaacttctgctcgtttacactgcacattgaatacaggtaactaattggaaggagaggggaggtcactcttttgatggtggccctgaacctcattctggttccctgctgcgctgcttggtgtgacccacggaggatccactcccaggatgacgtgctccgtagctctgctgctgatactgggtctgcgatgcagcggcgtgaggcctgggctggttggagaaggtcacaacccttctctgttggtctgccttctgctgaaagactcgagaaccaaccagggaagctgtcctggaggtccctggtcggagagggacatagaatctgtgacctctgacaactgtgaagccaccctgggctacagaaaccacagtcttcccagcaattattacaattcttgaattccttggggattttttactgccctttcaaagcacttaagtgttagatctaacgtgttccagtgtctgtctgaggtgacttaaaaaatcagaacaaaacttctattatccagagtcatgggagagtacaccctttccaggaataatgttttgggaaacactgaaatgaaatcttcccagtattataaattgtgtatttaaaaaaaagaaacttttctgaatgcctacctggcggtgtataccaggcagtgtgccagtttaaaaagatgaaaaagaataaaaacttttgaggaaaaaa

SEQ ID NO: 295737 - DNA, 3491 bp, Homo sapiens
  misc_feature (402)..(402): n is a, c, g, or t
  misc_feature (440)..(440): n is a, c, g, or t
gtggcacgatctcggctcactgcaagctctgcctcccgggttcacaccattctcctgcctcagcctcccgagtagctgggactacaggtgcccaccaccacgtgcccggctaatttttgtatttttagtagagacgagtttcaccgtattagccaggatggtcatgtttttgttcttgtttttgttttagagacagggtctccctctgtcacccaggctggagtgcagtggcacaatcacagctcactacagtgtcaaccttccaggttgaggatcactcgatactcatgcctcagcctcccatgtagctggggccacaggggcacaccaccactcctgacccattttttaaaaaattttttgtataggtggggtctcaccatgttgcccaggctagcctcnaactcctgggctcaagcaaccctctcaccttggcctcncaaagtgctgagattataggtgtgacccgccatgcccgcctttcctctgagttttgttgcattcacgcagctcctggctgaggcaaaacattaaaatgcatatggaaatgcaggctgggaaaatgctttgaaaccaatgcaatttctgtgttaaggggacattccctgattctttcaggtaatttgcattctagactgtgacattctgtatctcaactgataaataagcctgtttgtcatcctgctagatgagaacctgatatatgaaaccttttttttaatcgtggttaaaaaaaacataaaatttaccatcataattatttttaaatgtaccatttggcagcattaagtatatttaaactcttgtgaaacaaatttctagaatgttttcatcttgcaaaaccgaaacgctgtacctattaaacaactccccttttctccctctcttcaaccctggtaaccatgtttttatgaatttgactactttagatacctcatataagtcaggtcatacagtatttgtctctttgtgactggcttcacttagcataatgtcctcaaagtttaactatgttgtagcatgtatcagaattttatgaaacatgaagtcttagacaccccgaagtacattttcaccccaaatgtatttgaacagtgttaggctgggggtgggaggcgggagtccttcttgctttgcctgtgcaatgaaatgaataccctgctgtgtttatctccttgtcatgtgattctcccaggttgtttcttcaagtttctgagccaaacttaactctaaaaagcaaatattctgtgttaaaagacagtaatcaacacgggagctacatcagacatcataggacaaattgtcatctagaagagtatatttttaatgcaggagagtttttaaaacccagattggtgtgatttcattccagagagctcagaaatatgctcagcaagtcttgcagaaggaatgtcgtcccaagtttgccaagacatcaatggcgctgttatttgagcacaggtatagcgtggacttactcccttttgtgcagaaggcccccaaagacagtgaagctgagtccaagtacgatcctccttttgggttccggaagttctccagtaaagtccagaccctcttggaactcttgccagagcacgacctccctgaacacttgaaagccaagacctgtcggcgctgtgtggttattggaagcggaggaatactgcacggattagaactgggccacaccctgaaccagttcgatgttgtgataagaactcagtgcactgctcttggtcagtgtggctccaggaacagtgagggacacaggaagctcttcacagtccctgcccacaagggacttaacgtttgagaagttgaaacaaaaacacaaaatggttggatgctccaaactgtcatactgaccctaagttggaggagcatgctgctggctacagttaaacagtgcaccagttgagggatattcagaacatgttggaaataaaactactataaggatgacttatccagagggcgcaccactgtctgaccttgaatattattccaatgacttatttgttgctgttttatttaagagtgttgatttcaactggcttcaagcaatggtaaaaaaggaaaccctgccattctgggtacgactcttcttttggaagcaggtggcagaaaaaatcccactgcagccaaaacatttcaggattttgaatccagttatcatcaaagagactgcctttgacatccttcagtactcagagcctcagtcaaggttctggggccgagataagaacgtccccacaatcggtgtcattgccgttgtcttagccacacatctgtgcgatgaagtcagtttggcgggttttggatatgacctcaatcaacccagaacacctttgcactacttcgacagtcaatgcatggctgctatgaactttcagaccatgcataatgtgacaacggaaaccaagttcctcttaaagctggtcaaagagggagtggtgaaagatctcagtggaggcattgatcgtgaattttgaacacagaaaacctcagttgaaaatgcaactctaactctgagagctgtttttgacagccttcttgatgtatttctccatcctgcagatactttgaagtgcagctcatgtttttaacttttaatttaaaaacacaaaaaaaattttagctcttcccactttttttttcctatttatttgaggtcagtgtttgtttttgcacaccattttgtaaatgaaacttaagaattgaattggaaagacttctcaaagagaattgtatgtaacgatgttgtattgatttttaagaaagtaatttaatttgtaaaacttctgctcgtttacactgcacattgaatacaggtaactaattggaaggagaggggaggtcactcttttgatggtggccctgaacctcattctggttccctgctgcgctgcttggtgtgacccacggaggatccactcccaggatgacgtgctccgtagctctgctgctgatactgggtctgcgatgcagcggcgtgaggcctgggctggttggagaaggtcacaacccttctctgttggtctgccttctgctgaaagactcgagaaccaaccagggaagctgtcctggaggtccctggtcggagagggacatagaatctgtgacctctgacaactgtgaagccaccctgggctacagaaaccacagtcttcccagcaattattacaattcttgaattccttggggattttttactgccctttcaaagcacttaagtgttagatctaacgtgttccagtgtctgtctgaggtgacttaaaaaatcagaacaaaacttctattatccagagtcatgggagagtacaccctttccaggaataatgttttgggaaacactgaaatgaaatcttcccagtattataaattgtgtatttaaaaaaaagaaacttttctgaatgcctacctggcggtgtataccaggcagtgtgccagtttaaaaagatgaaaaagaataaaaacttttgaggaaaaaa

SEQ ID NO: 295738 - DNA, 2319 bp, Homo sapiens
aatgcgagagcatataaccagcatgtcttgagtcttttacccatgtgcctgttatatggatgctgctgtttttgtaagatgaaatgacccttggatattctgggttatgatcagcatttcttcgtctaggcgagaaaagaaacagcaatgccaagtgagtacacctatgtgaaactgagaagtgattgctcgaggccttccctgcaatggtacacccgagctcaaagcaagatgagaaggcccagcttgttattaaaagacatcctcaaatgtacattgcttgtgtttggagtgtggatcctttatatcctcaagttaaattatactactgaagaatgtgacatgaaaaaaatgcattatgtggaccctgaccatgtaaagagagctcagaaatatgctcagcaagtcttgcagaaggaatgtcgtcccaagtttgccaagacatcaatggcgctgttatttgagcacaggtatagcgtggacttactcccttttgtgcagaaggcccccaaagacagtgaagctgagtccaagtacgatcctccttttgggttccggaagttctccagtaaagtccagaccctcttggaactcttgccagagcacgacctccctgaacacttgaaagccaagacctgtcggcgctgtgtggttattggaagcggaggaatactgcacggattagaactgggccacaccctgaaccagttcgatgttgtgataaggttaaacagtgcaccagttgagggatattcagaacatgttggaaataaaactactataaggatgacttatccagagggcgcaccactgtctgaccttgaatattattccaatgacttatttgttgctgttttatttaagagtgttgatttcaactggcttcaagcaatggtaaaaaaggaaaccctgccattctgggtacgactcttcttttggaagcaggtggcagaaaaaatcccactgcagccaaaacatttcaggattttgaatccagttatcatcaaagagactgcctttgacatccttcagtactcagagcctcagtcaaggttctggggccgagataagaacgtccccacaatcggtgtcattgccgttgtcttagccacacatctgtgcgatgaagtcagtttggcgggttttggatatgacctcaatcaacccagaacacctttgcactacttcgacagtcaatgcatggctgctatgaactttcagaccatgcataatgtgacaacggaaaccaagttcctcttaaagctggtcaaagagggagtggtgaaagatctcagtggaggcattgatcgtgaattttgaacacagaaaacctcagttgaaaatgcaactctaactctgagagctgtttttgacagccttcttgatgtatttctccatcctgcagatactttgaagtgcagctcatgtttttaacttttaatttaaaaacacaaaaaaaattttagctcttcccactttttttttcctatttatttgaggtcagtgtttgtttttgcacaccattttgtaaatgaaacttaagaattgaattggaaagacttctcaaagagaattgtatgtaacgatgttgtattgatttttaagaaagtaatttaatttgtaaaacttctgctcgtttacactgcacattgaatacaggtaactaattggaaggagaggggaggtcactcttttgatggtggccctgaacctcattctggttccctgctgcgctgcttggtgtgacccacggaggatccactcccaggatgacgtgctccgtagctctgctgctgatactgggtctgcgatgcagcggcgtgaggcctgggctggttggagaaggtcacaacccttctctgttggtctgccttctgctgaaagactcgagaaccaaccagggaagctgtcctggaggtccctggtcggagagggacatagaatctgtgacctctgacaactgtgaagccaccctgggctacagaaaccacagtcttcccagcaattattacaattcttgaattccttggggattttttactgccctttcaaagcacttaagtgttagatctaacgtgttccagtgtctgtctgaggtgacttaaaaaatcagaacaaaacttctattatccagagtcatgggagagtacaccctttccaggaataatgttttgggaaacactgaaatgaaatcttcccagtattataaattgtgtatttaaaaaaaagaaacttttctgaatgcctacctggcggtgtataccaggcagtgtgccagtttaaaaagatgaaaaagaataaaaacttttgaggaaaaaa

SEQ ID NO: 295739 - DNA, 564 bp, Homo sapiens
cacgcgcccctcctccgcatctgagcgggggagcggcggcccccagctgaatgggcgcgagagcggcgctgggggcgggtgggggcgcggggtaccgggctggcggccggccggcgccccctcattagtatgcggacgaaggcggcgggctgcgcggagcggcgtcccctgcagccgcggaccgaggcagcggcggcacctgccggccgagcaatgccaagtgagtacacctatgtgaaactgagaagtgattgctcgaggccttccctgcaatggtacacccgagctcaaagcaagatgagaaggcccagcttgttattaaaagacatcctcaaatgtacattgcttgtgtttggagtgtggatcctttatatcctcaagttaaattatactactgaagaatgtgacatgaaaaaaatgcattatgtggaccctgaccatgtaaaggttagatatcccattggtgtggtttaaatgaaaacattgccaagcatatgctcaaactataatatcattagtctactgtgtgacaaatatatgttaataaaagtttgaactcagagg

SEQ ID NO: 295740 - DNA, 2572 bp, Homo sapiens
cacgcgcccctcctccgcatctgagcgggggagcggcggcccccagctgaatgggcgcgagagcggcgctgggggcgggtgggggcgcggggtaccgggctggcggccggccggcgccccctcattagtatgcggacgaaggcggcgggctgcgcggagcggcgtcccctgcagccgcggaccgaggcagcggcggcacctgccggccgaggcactgtgaagacagtggtgtgcaaagcagagacccctgcttgcatggaatctgcattctagtgggggagacaagacaaacgtgtaattcaaaagtaaaaaacttatgaagaatcacatgtctcatgattagtgttataaagaaaaaagaaagcatgcatacaggaatatccacataagcaattttgcaatgccaagtgagtacacctatgtgaaactgagaagtgattgctcgaggccttccctgcaatggtacacccgagctcaaagcaagatgagaaggcccagcttgttattaaaagacatcctcaaatgtacattgcttgtgtttggagtgtggatcctttatatcctcaagttaaattatactactgaagaatgtgacatgaaaaaaatgcattatgtggaccctgaccatgtaaagagagctcagaaatatgctcagcaagtcttgcagaaggaatgtcgtcccaagtttgccaagacatcaatggcgctgttatttgagcacaggtatagcgtggacttactcccttttgtgcagaaggcccccaaagacagtgaagctgagtccaagtacgatcctccttttgggttccggaagttctccagtaaagtccagaccctcttggaactcttgccagagcacgacctccctgaacacttgaaagccaagacctgtcggcgctgtgtggttattggaagcggaggaatactgcacggattagaactgggccacaccctgaaccagttcgatgttgtgataaggttaaacagtgcaccagttgagggatattcagaacatgttggaaataaaactactataaggatgacttatccagagggcgcaccactgtctgaccttgaatattattccaatgacttatttgttgctgttttatttaagagtgttgatttcaactggcttcaagcaatggtaaaaaaggaaaccctgccattctgggtacgactcttcttttggaagcaggtggcagaaaaaatcccactgcagccaaaacatttcaggattttgaatccagttatcatcaaagagactgcctttgacatccttcagtactcagagcctcagtcaaggttctggggccgagataagaacgtccccacaatcggtgtcattgccgttgtcttagccacacatctgtgcgatgaagtcagtttggcgggttttggatatgacctcaatcaacccagaacacctttgcactacttcgacagtcaatgcatggctgctatgaactttcagaccatgcataatgtgacaacggaaaccaagttcctcttaaagctggtcaaagagggagtggtgaaagatctcagtggaggcattgatcgtgaattttgaacacagaaaacctcagttgaaaatgcaactctaactctgagagctgtttttgacagccttcttgatgtatttctccatcctgcagatactttgaagtgcagctcatgtttttaacttttaatttaaaaacacaaaaaaaattttagctcttcccactttttttttcctatttatttgaggtcagtgtttgtttttgcacaccattttgtaaatgaaacttaagaattgaattggaaagacttctcaaagagaattgtatgtaacgatgttgtattgatttttaagaaagtaatttaatttgtaaaacttctgctcgtttacactgcacattgaatacaggtaactaattggaaggagaggggaggtcactcttttgatggtggccctgaacctcattctggttccctgctgcgctgcttggtgtgacccacggaggatccactcccaggatgacgtgctccgtagctctgctgctgatactgggtctgcgatgcagcggcgtgaggcctgggctggttggagaaggtcacaacccttctctgttggtctgccttctgctgaaagactcgagaaccaaccagggaagctgtcctggaggtccctggtcggagagggacatagaatctgtgacctctgacaactgtgaagccaccctgggctacagaaaccacagtcttcccagcaattattacaattcttgaattccttggggattttttactgccctttcaaagcacttaagtgttagatctaacgtgttccagtgtctgtctgaggtgacttaaaaaatcagaacaaaacttctattatccagagtcatgggagagtacaccctttccaggaataatgttttgggaaacactgaaatgaaatcttcccagtattataaattgtgtatttaaaaaaaagaaacttttctgaatgcctacctggcggtgtataccaggcagtgtgccagtttaaaaagatgaaaaagaataaaaacttttgaggaaaaaa

SEQ ID NO: 295741 - DNA, 2216 bp, Homo sapiens
cattatcctgtctcgccgccacccaggacatggcttctgttccaatgccaagtgagtacacctatgtgaaactgagaagtgattgctcgaggccttccctgcaatggtacacccgagctcaaagcaagatgagaaggcccagcttgttattaaaagacatcctcaaatgtacattgcttgtgtttggagtgtggatcctttatatcctcaagttaaattatactactgaagaatgtgacatgaaaaaaatgcattatgtggaccctgaccatgtaaagagagctcagaaatatgctcagcaagtcttgcagaaggaatgtcgtcccaagtttgccaagacatcaatggcgctgttatttgagcacaggtatagcgtggacttactcccttttgtgcagaaggcccccaaagacagtgaagctgagtccaagtacgatcctccttttgggttccggaagttctccagtaaagtccagaccctcttggaactcttgccagagcacgacctccctgaacacttgaaagccaagacctgtcggcgctgtgtggttattggaagcggaggaatactgcacggattagaactgggccacaccctgaaccagttcgatgttgtgataaggttaaacagtgcaccagttgagggatattcagaacatgttggaaataaaactactataaggatgacttatccagagggcgcaccactgtctgaccttgaatattattccaatgacttatttgttgctgttttatttaagagtgttgatttcaactggcttcaagcaatggtaaaaaaggaaaccctgccattctgggtacgactcttcttttggaagcaggtggcagaaaaaatcccactgcagccaaaacatttcaggattttgaatccagttatcatcaaagagactgcctttgacatccttcagtactcagagcctcagtcaaggttctggggccgagataagaacgtccccacaatcggtgtcattgccgttgtcttagccacacatctgtgcgatgaagtcagtttggcgggttttggatatgacctcaatcaacccagaacacctttgcactacttcgacagtcaatgcatggctgctatgaactttcagaccatgcataatgtgacaacggaaaccaagttcctcttaaagctggtcaaagagggagtggtgaaagatctcagtggaggcattgatcgtgaattttgaacacagaaaacctcagttgaaaatgcaactctaactctgagagctgtttttgacagccttcttgatgtatttctccatcctgcagatactttgaagtgcagctcatgtttttaacttttaatttaaaaacacaaaaaaaattttagctcttcccactttttttttcctatttatttgaggtcagtgtttgtttttgcacaccattttgtaaatgaaacttaagaattgaattggaaagacttctcaaagagaattgtatgtaacgatgttgtattgatttttaagaaagtaatttaatttgtaaaacttctgctcgtttacactgcacattgaatacaggtaactaattggaaggagaggggaggtcactcttttgatggtggccctgaacctcattctggttccctgctgcgctgcttggtgtgacccacggaggatccactcccaggatgacgtgctccgtagctctgctgctgatactgggtctgcgatgcagcggcgtgaggcctgggctggttggagaaggtcacaacccttctctgttggtctgccttctgctgaaagactcgagaaccaaccagggaagctgtcctggaggtccctggtcggagagggacatagaatctgtgacctctgacaactgtgaagccaccctgggctacagaaaccacagtcttcccagcaattattacaattcttgaattccttggggattttttactgccctttcaaagcacttaagtgttagatctaacgtgttccagtgtctgtctgaggtgacttaaaaaatcagaacaaaacttctattatccagagtcatgggagagtacaccctttccaggaataatgttttgggaaacactgaaatgaaatcttcccagtattataaattgtgtatttaaaaaaaagaaacttttctgaatgcctacctggcggtgtataccaggcagtgtgccagtttaaaaagatgaaaaagaataaaaacttttgaggaaaaaa

SEQ ID NO: 295742 - DNA, 3153 bp, Homo sapiens
cacgcgcccctcctccgcatctgagcgggggagcggcggcccccagctgaatgggcgcgagagcggcgctgggggcgggtgggggcgcggggtaccgggctggcggccggccggcgccccctcattagtatgcggacgaaggcggcgggctgcgcggagcggcgtcccctgcagccgcggaccgaggcagcggcggcacctgccggccgaggcactgtgaagacagtggtgtgcaaagcagagacccctgcttgcatggaatctgcattctagtgggggagacaagacaaacgtgtaattcaaaagtaaaaaacttatgaagaatcacatgtctcatgattagtgttataaagaaaaaagaaagcatgcatacaggaatatccacataagcaattttgcaatgccaagtgagtacacctatgtgaaactgagaagtgattgctcgaggccttccctgcaatggtacacccgagctcaaagcaagatgagaaggcccagcttgttattaaaagacatcctcaaatgtacattgcttgtgtttggagtgtggatcctttatatcctcaagttaaattatactactgaagaatgtgacatgaaaaaaatgcattatgtggaccctgaccatgtaaagacctacaccgtgcctttaaaggaagcagggccctccctgctgaagcattcagtgagcccaggcaccagcatcttcaaaccgagtcttttctctccttagtgctgctccccgctttccaggccttcctgggatatcttagagctcctgaaggtgcggcactcgccttgaggcactttcttctgagctgtgagctatgggcaagcagtggagggggaagagagcagctgaagcagatgccggttcaacttacttaaagatgtgggacaagctctgaggaagcccccaagacaatgatgtctggttgtgcaccattgaagcaagaacagaaaccatcccagagtggaggacatggcccatgtggtcctcctgttctgagtggctatgagatggagttctgtgtgagctctctacagaaaaagccctgtctccaggcaatcagtggagatctgttaaacgagttgaaacaaaagaggacaaggaattgctgtggctttagacgttgccaggacatgtagaaactcactcaggatttactactgcatccactgtcacttaggcgcaggaggggtcacagtcagaagagagctcagaaatatgctcagcaagtcttgcagaaggaatgtcgtcccaagtttgccaagacatcaatggcgctgttatttgagcacaggtatagcgtggacttactcccttttgtgcagaaggcccccaaagacagtgaagctgagtccaagtacgatcctccttttgggttccggaagttctccagtaaagtccagaccctcttggaactcttgccagagcacgacctccctgaacacttgaaagccaagacctgtcggcgctgtgtggttattggaagcggaggaatactgcacggattagaactgggccacaccctgaaccagttcgatgttgtgataaggttaaacagtgcaccagttgagggatattcagaacatgttggaaataaaactactataaggatgacttatccagagggcgcaccactgtctgaccttgaatattattccaatgacttatttgttgctgttttatttaagagtgttgatttcaactggcttcaagcaatggtaaaaaaggaaaccctgccattctgggtacgactcttcttttggaagcaggtggcagaaaaaatcccactgcagccaaaacatttcaggattttgaatccagttatcatcaaagagactgcctttgacatccttcagtactcagagcctcagtcaaggttctggggccgagataagaacgtccccacaatcggtgtcattgccgttgtcttagccacacatctgtgcgatgaagtcagtttggcgggttttggatatgacctcaatcaacccagaacacctttgcactacttcgacagtcaatgcatggctgctatgaactttcagaccatgcataatgtgacaacggaaaccaagttcctcttaaagctggtcaaagagggagtggtgaaagatctcagtggaggcattgatcgtgaattttgaacacagaaaacctcagttgaaaatgcaactctaactctgagagctgtttttgacagccttcttgatgtatttctccatcctgcagatactttgaagtgcagctcatgtttttaacttttaatttaaaaacacaaaaaaaattttagctcttcccactttttttttcctatttatttgaggtcagtgtttgtttttgcacaccattttgtaaatgaaacttaagaattgaattggaaagacttctcaaagagaattgtatgtaacgatgttgtattgatttttaagaaagtaatttaatttgtaaaacttctgctcgtttacactgcacattgaatacaggtaactaattggaaggagaggggaggtcactcttttgatggtggccctgaacctcattctggttccctgctgcgctgcttggtgtgacccacggaggatccactcccaggatgacgtgctccgtagctctgctgctgatactgggtctgcgatgcagcggcgtgaggcctgggctggttggagaaggtcacaacccttctctgttggtctgccttctgctgaaagactcgagaaccaaccagggaagctgtcctggaggtccctggtcggagagggacatagaatctgtgacctctgacaactgtgaagccaccctgggctacagaaaccacagtcttcccagcaattattacaattcttgaattccttggggattttttactgccctttcaaagcacttaagtgttagatctaacgtgttccagtgtctgtctgaggtgacttaaaaaatcagaacaaaacttctattatccagagtcatgggagagtacaccctttccaggaataatgttttgggaaacactgaaatgaaatcttcccagtattataaattgtgtatttaaaaaaaagaaacttttctgaatgcctacctggcggtgtataccaggcagtgtgccagtttaaaaagatgaaaaagaataaaaacttttgaggaaaaaa

SEQ ID NO: 295743 - DNA, 2435 bp, Homo sapiens
cctgggagctctggagtcctcacagcctagtcacactgcttcctctcttcattgcagctcctgaaggtgcggcactcgccttgaggcactttcttctgagctgtgagctatgggcaagcagtggagggggaagagagcagctgaagcagatgccggttcaacttacttaaagatgtgggacaagctctgaggaagcccccaagacaatgatgtctggttgtgcaccattgaagcaagaacagaaaccatcccagagtggaggacatggcccatgtggtcctcctgttctgagtggctatgagatggagttctgtgtgagctctctacagaaaaagccctgtctccaggcaatcagtggagatctgttaaacgagttgaaacaaaagaggacaaggaattgctgtggctttagacgttgccaggacatgtagaaactcactcaggatttactactgcatccactgtcacttaggcgcaggaggggtcacagtcagaagagagctcagaaatatgctcagcaagtcttgcagaaggaatgtcgtcccaagtttgccaagacatcaatggcgctgttatttgagcacaggtatagcgtggacttactcccttttgtgcagaaggcccccaaagacagtgaagctgagtccaagtacgatcctccttttgggttccggaagttctccagtaaagtccagaccctcttggaactcttgccagagcacgacctccctgaacacttgaaagccaagacctgtcggcgctgtgtggttattggaagcggaggaatactgcacggattagaactgggccacaccctgaaccagttcgatgttgtgataaggttaaacagtgcaccagttgagggatattcagaacatgttggaaataaaactactataaggatgacttatccagagggcgcaccactgtctgaccttgaatattattccaatgacttatttgttgctgttttatttaagagtgttgatttcaactggcttcaagcaatggtaaaaaaggaaaccctgccattctgggtacgactcttcttttggaagcaggtggcagaaaaaatcccactgcagccaaaacatttcaggattttgaatccagttatcatcaaagagactgcctttgacatccttcagtactcagagcctcagtcaaggttctggggccgagataagaacgtccccacaatcggtgtcattgccgttgtcttagccacacatctgtgcgatgaagtcagtttggcgggttttggatatgacctcaatcaacccagaacacctttgcactacttcgacagtcaatgcatggctgctatgaactttcagaccatgcataatgtgacaacggaaaccaagttcctcttaaagctggtcaaagagggagtggtgaaagatctcagtggaggcattgatcgtgaattttgaacacagaaaacctcagttgaaaatgcaactctaactctgagagctgtttttgacagccttcttgatgtatttctccatcctgcagatactttgaagtgcagctcatgtttttaacttttaatttaaaaacacaaaaaaaattttagctcttcccactttttttttcctatttatttgaggtcagtgtttgtttttgcacaccattttgtaaatgaaacttaagaattgaattggaaagacttctcaaagagaattgtatgtaacgatgttgtattgatttttaagaaagtaatttaatttgtaaaacttctgctcgtttacactgcacattgaatacaggtaactaattggaaggagaggggaggtcactcttttgatggtggccctgaacctcattctggttccctgctgcgctgcttggtgtgacccacggaggatccactcccaggatgacgtgctccgtagctctgctgctgatactgggtctgcgatgcagcggcgtgaggcctgggctggttggagaaggtcacaacccttctctgttggtctgccttctgctgaaagactcgagaaccaaccagggaagctgtcctggaggtccctggtcggagagggacatagaatctgtgacctctgacaactgtgaagccaccctgggctacagaaaccacagtcttcccagcaattattacaattcttgaattccttggggattttttactgccctttcaaagcacttaagtgttagatctaacgtgttccagtgtctgtctgaggtgacttaaaaaatcagaacaaaacttctattatccagagtcatgggagagtacaccctttccaggaataatgttttgggaaacactgaaatgaaatcttcccagtattataaattgtgtatttaaaaaaaagaaacttttctgaatgcctacctggcggtgtataccaggcagtgtgccagtttaaaaagatgaaaaagaataaaaacttttgaggaaaaaa

SEQ ID NO: 295744 - DNA, 2633 bp, Homo sapiens
tctctcctttctgagagctaaagaccttatctccctgcggatggcattgcgtgcagttaattatggccagatggactcagccgcttcttcatcgtcttctctcggactctgcagacctacaccgtgcctttaaaggaagcagggccctccctgctgaagcattcagtgagcccaggcaccagcatcttcaaaccgagtcttttctctccttagtgctgctccccgctttccaggccttcctgggatatcttagagctcctgaaggtgcggcactcgccttgaggcactttcttctgagctgtgagctatgggcaagcagtggagggggaagagagcagctgaagcagatgccggttcaacttacttaaagatgtgggacaagctctgaggaagcccccaagacaatgatgtctggttgtgcaccattgaagcaagaacagaaaccatcccagagtggaggacatggcccatgtggtcctcctgttctgagtggctatgagatggagttctgtgtgagctctctacagaaaaagccctgtctccaggcaatcagtggagatctgttaaacgagttgaaacaaaagaggacaaggaattgctgtggctttagacgttgccaggacatgtagaaactcactcaggatttactactgcatccactgtcacttaggcgcaggaggggtcacagtcagaagagagctcagaaatatgctcagcaagtcttgcagaaggaatgtcgtcccaagtttgccaagacatcaatggcgctgttatttgagcacaggtatagcgtggacttactcccttttgtgcagaaggcccccaaagacagtgaagctgagtccaagtacgatcctccttttgggttccggaagttctccagtaaagtccagaccctcttggaactcttgccagagcacgacctccctgaacacttgaaagccaagacctgtcggcgctgtgtggttattggaagcggaggaatactgcacggattagaactgggccacaccctgaaccagttcgatgttgtgataaggttaaacagtgcaccagttgagggatattcagaacatgttggaaataaaactactataaggatgacttatccagagggcgcaccactgtctgaccttgaatattattccaatgacttatttgttgctgttttatttaagagtgttgatttcaactggcttcaagcaatggtaaaaaaggaaaccctgccattctgggtacgactcttcttttggaagcaggtggcagaaaaaatcccactgcagccaaaacatttcaggattttgaatccagttatcatcaaagagactgcctttgacatccttcagtactcagagcctcagtcaaggttctggggccgagataagaacgtccccacaatcggtgtcattgccgttgtcttagccacacatctgtgcgatgaagtcagtttggcgggttttggatatgacctcaatcaacccagaacacctttgcactacttcgacagtcaatgcatggctgctatgaactttcagaccatgcataatgtgacaacggaaaccaagttcctcttaaagctggtcaaagagggagtggtgaaagatctcagtggaggcattgatcgtgaattttgaacacagaaaacctcagttgaaaatgcaactctaactctgagagctgtttttgacagccttcttgatgtatttctccatcctgcagatactttgaagtgcagctcatgtttttaacttttaatttaaaaacacaaaaaaaattttagctcttcccactttttttttcctatttatttgaggtcagtgtttgtttttgcacaccattttgtaaatgaaacttaagaattgaattggaaagacttctcaaagagaattgtatgtaacgatgttgtattgatttttaagaaagtaatttaatttgtaaaacttctgctcgtttacactgcacattgaatacaggtaactaattggaaggagaggggaggtcactcttttgatggtggccctgaacctcattctggttccctgctgcgctgcttggtgtgacccacggaggatccactcccaggatgacgtgctccgtagctctgctgctgatactgggtctgcgatgcagcggcgtgaggcctgggctggttggagaaggtcacaacccttctctgttggtctgccttctgctgaaagactcgagaaccaaccagggaagctgtcctggaggtccctggtcggagagggacatagaatctgtgacctctgacaactgtgaagccaccctgggctacagaaaccacagtcttcccagcaattattacaattcttgaattccttggggattttttactgccctttcaaagcacttaagtgttagatctaacgtgttccagtgtctgtctgaggtgacttaaaaaatcagaacaaaacttctattatccagagtcatgggagagtacaccctttccaggaataatgttttgggaaacactgaaatgaaatcttcccagtattataaattgtgtatttaaaaaaaagaaacttttctgaatgcctacctggcggtgtataccaggcagtgtgccagtttaaaaagatgaaaaagaataaaaacttttgaggaaaaaa

SEQ ID NO: 295745 - DNA, 2452 bp, Homo sapiens
cacgcgcccctcctccgcatctgagcgggggagcggcggcccccagctgaatgggcgcgagagcggcgctgggggcgggtgggggcgcggggtaccgggctggcggccggccggcgccccctcattagtatgcggacgaaggcggcgggctgcgcggagcggcgtcccctgcagccgcggaccgaggcagcggcggcacctgccggccgaggcactgtgaagacagtggtgtgcaaagcagagacccctgcttgcatggaatctgcattctagtgggggagacaagacaaacgtgtaattcaaaagtaaaaaacttatgaagaatcacatgtctcatgattagtgttataaagaaaaaagaaagcatgcatacaggaatatccacataagcaattttgcaatgccaagtgagtacacctatgtgaaactgagaagtgattgctcgaggccttccctgcaatggtacacccgagctcaaagcaagatgagaaggcccagcttgttattaaaagacatcctcaaatgtacattgcttgtgtttggagtgtggatcctttatatcctcaagttaaattatactactgaagaatgtgacatgaaaaaaatgcattatgtggaccctgaccatgtaaagaaggcccccaaagacagtgaagctgagtccaagtacgatcctccttttgggttccggaagttctccagtaaagtccagaccctcttggaactcttgccagagcacgacctccctgaacacttgaaagccaagacctgtcggcgctgtgtggttattggaagcggaggaatactgcacggattagaactgggccacaccctgaaccagttcgatgttgtgataaggttaaacagtgcaccagttgagggatattcagaacatgttggaaataaaactactataaggatgacttatccagagggcgcaccactgtctgaccttgaatattattccaatgacttatttgttgctgttttatttaagagtgttgatttcaactggcttcaagcaatggtaaaaaaggaaaccctgccattctgggtacgactcttcttttggaagcaggtggcagaaaaaatcccactgcagccaaaacatttcaggattttgaatccagttatcatcaaagagactgcctttgacatccttcagtactcagagcctcagtcaaggttctggggccgagataagaacgtccccacaatcggtgtcattgccgttgtcttagccacacatctgtgcgatgaagtcagtttggcgggttttggatatgacctcaatcaacccagaacacctttgcactacttcgacagtcaatgcatggctgctatgaactttcagaccatgcataatgtgacaacggaaaccaagttcctcttaaagctggtcaaagagggagtggtgaaagatctcagtggaggcattgatcgtgaattttgaacacagaaaacctcagttgaaaatgcaactctaactctgagagctgtttttgacagccttcttgatgtatttctccatcctgcagatactttgaagtgcagctcatgtttttaacttttaatttaaaaacacaaaaaaaattttagctcttcccactttttttttcctatttatttgaggtcagtgtttgtttttgcacaccattttgtaaatgaaacttaagaattgaattggaaagacttctcaaagagaattgtatgtaacgatgttgtattgatttttaagaaagtaatttaatttgtaaaacttctgctcgtttacactgcacattgaatacaggtaactaattggaaggagaggggaggtcactcttttgatggtggccctgaacctcattctggttccctgctgcgctgcttggtgtgacccacggaggatccactcccaggatgacgtgctccgtagctctgctgctgatactgggtctgcgatgcagcggcgtgaggcctgggctggttggagaaggtcacaacccttctctgttggtctgccttctgctgaaagactcgagaaccaaccagggaagctgtcctggaggtccctggtcggagagggacatagaatctgtgacctctgacaactgtgaagccaccctgggctacagaaaccacagtcttcccagcaattattacaattcttgaattccttggggattttttactgccctttcaaagcacttaagtgttagatctaacgtgttccagtgtctgtctgaggtgacttaaaaaatcagaacaaaacttctattatccagagtcatgggagagtacaccctttccaggaataatgttttgggaaacactgaaatgaaatcttcccagtattataaattgtgtatttaaaaaaaagaaacttttctgaatgcctacctggcggtgtataccaggcagtgtgccagtttaaaaagatgaaaaagaataaaaacttttgaggaaaaaa

SEQ ID NO: 295746 - DNA, 1961 bp, Homo sapiens
tgaaacctgaaattaacctcttgagagctcagaaatatgctcagcaagtcttgcagaaggaatgtcgtcccaagtttgccaagacatcaatggcgctgttatttgagcacaggtatagcgtggacttactcccttttgtgcagaaggcccccaaagacagtgaagctgagtccaagtacgatcctccttttgggttccggaagttctccagtaaagtccagaccctcttggaactcttgccagagcacgacctccctgaacacttgaaagccaagacctgtcggcgctgtgtggttattggaagcggaggaatactgcacggattagaactgggccacaccctgaaccagttcgatgttgtgataaggttaaacagtgcaccagttgagggatattcagaacatgttggaaataaaactactataaggatgacttatccagagggcgcaccactgtctgaccttgaatattattccaatgacttatttgttgctgttttatttaagagtgttgatttcaactggcttcaagcaatggtaaaaaaggaaaccctgccattctgggtacgactcttcttttggaagcaggtggcagaaaaaatcccactgcagccaaaacatttcaggattttgaatccagttatcatcaaagagactgcctttgacatccttcagtactcagagcctcagtcaaggttctggggccgagataagaacgtccccacaatcggtgtcattgccgttgtcttagccacacatctgtgcgatgaagtcagtttggcgggttttggatatgacctcaatcaacccagaacacctttgcactacttcgacagtcaatgcatggctgctatgaactttcagaccatgcataatgtgacaacggaaaccaagttcctcttaaagctggtcaaagagggagtggtgaaagatctcagtggaggcattgatcgtgaattttgaacacagaaaacctcagttgaaaatgcaactctaactctgagagctgtttttgacagccttcttgatgtatttctccatcctgcagatactttgaagtgcagctcatgtttttaacttttaatttaaaaacacaaaaaaaattttagctcttcccactttttttttcctatttatttgaggtcagtgtttgtttttgcacaccattttgtaaatgaaacttaagaattgaattggaaagacttctcaaagagaattgtatgtaacgatgttgtattgatttttaagaaagtaatttaatttgtaaaacttctgctcgtttacactgcacattgaatacaggtaactaattggaaggagaggggaggtcactcttttgatggtggccctgaacctcattctggttccctgctgcgctgcttggtgtgacccacggaggatccactcccaggatgacgtgctccgtagctctgctgctgatactgggtctgcgatgcagcggcgtgaggcctgggctggttggagaaggtcacaacccttctctgttggtctgccttctgctgaaagactcgagaaccaaccagggaagctgtcctggaggtccctggtcggagagggacatagaatctgtgacctctgacaactgtgaagccaccctgggctacagaaaccacagtcttcccagcaattattacaattcttgaattccttggggattttttactgccctttcaaagcacttaagtgttagatctaacgtgttccagtgtctgtctgaggtgacttaaaaaatcagaacaaaacttctattatccagagtcatgggagagtacaccctttccaggaataatgttttgggaaacactgaaatgaaatcttcccagtattataaattgtgtatttaaaaaaaagaaacttttctgaatgcctacctggcggtgtataccaggcagtgtgccagtttaaaaagatgaaaaagaataaaaacttttgaggaaaaaa

SEQ ID NO: 295747 - DNA, 2994 bp, Homo sapiens
cacgcgcccctcctccgcatctgagcgggggagcggcggcccccagctgaatgggcgcgagagcggcgctgggggcgggtgggggcgcggggtaccgggctggcggccggccggcgccccctcattagtatgcggacgaaggcggcgggctgcgcggagcggcgtcccctgcagccgcggaccgaggcagcggcggcacctgccggccgaggcactgtgaagacagtggtgtgcaaagcagagacccctgcttgcatggaatctgcattctagtgggggagacaagacaaacgtgtaattcaaaagtaaaaaacttatgaagaatcacatgtctcatgattagtgttataaagaaaaaagaaagcatgcatacaggaatatccacataagcaattttgcaatgccaagtgagtacacctatgtgaaactgagaagtgattgctcgaggccttccctgcaatggtacacccgagctcaaagcaagatgagaaggcccagcttgttattaaaagacatcctcaaatgtacattgcttgtgtttggagtgtggatcctttatatcctcaagttaaattatactactgaagaatgtgacatgaaaaaaatgcattatgtggaccctgaccatgtaaagacctacaccgtgcctttaaaggaagcagggccctccctgctgaagcattcagtgagcccaggcaccagcatcttcaaaccgagtcttttctctccttagtgctgctccccgctttccaggccttcctgggatatcttagagctcctgaaggtgcggcactcgccttgaggcactttcttctgagctgtgagctatgggcaagcagtggagggggaagagagcagctgaagcagatgccggttcaacttacttaaagatgtgggacaagctctgaggaagcccccaagacaatgatgtctggttgtgcaccattgaagcaagaacagaaaccatcccagagtggaggacatggcccatgtggtcctcctgttctgagtggctatgagatggagttctgtgtgagctctctacagaaaaagccctgtctccaggcaatcagtggagatctgttaaacgagttgaaacaaaagaggacaaggaattgctgtggctttagacgttgccaggacatgtagaaactcactcaggatttactactgcatccactgtcacttaggcgcaggaggggtcacagtcagaagagagctcagaaatatgctcagcaagtcttgcagaaggaatgtcgtcccaagtttgccaagacatcaatggcgctgttatttgagcacaggtatagcgtggacttactcccttttgtgcagaaggcccccaaagacagtgaagctgagtccaagtacgatcctccttttgggttccggaagttctccagtaaagtccagaccctcttggaactcttgccagagcacgacctccctgaacacttgaaagccaagacctgtcggcgctgtgtggttattggaagcggaggaatactgcacggattagaactgggccacaccctgaaccagttcgatgttgtgataaggttaaacagtgcaccagttgagggatattcagaacatgttggaaataaaactactataaggatgacttatccagagggcgcaccactgtctgaccttgaatattattccaatgacttatttgttgctgttttatttaagagtgttgatttcaactggcttcaagcaatggtaaaaaaggaaaccctgaacgtccccacaatcggtgtcattgccgttgtcttagccacacatctgtgcgatgaagtcagtttggcgggttttggatatgacctcaatcaacccagaacacctttgcactacttcgacagtcaatgcatggctgctatgaactttcagaccatgcataatgtgacaacggaaaccaagttcctcttaaagctggtcaaagagggagtggtgaaagatctcagtggaggcattgatcgtgaattttgaacacagaaaacctcagttgaaaatgcaactctaactctgagagctgtttttgacagccttcttgatgtatttctccatcctgcagatactttgaagtgcagctcatgtttttaacttttaatttaaaaacacaaaaaaaattttagctcttcccactttttttttcctatttatttgaggtcagtgtttgtttttgcacaccattttgtaaatgaaacttaagaattgaattggaaagacttctcaaagagaattgtatgtaacgatgttgtattgatttttaagaaagtaatttaatttgtaaaacttctgctcgtttacactgcacattgaatacaggtaactaattggaaggagaggggaggtcactcttttgatggtggccctgaacctcattctggttccctgctgcgctgcttggtgtgacccacggaggatccactcccaggatgacgtgctccgtagctctgctgctgatactgggtctgcgatgcagcggcgtgaggcctgggctggttggagaaggtcacaacccttctctgttggtctgccttctgctgaaagactcgagaaccaaccagggaagctgtcctggaggtccctggtcggagagggacatagaatctgtgacctctgacaactgtgaagccaccctgggctacagaaaccacagtcttcccagcaattattacaattcttgaattccttggggattttttactgccctttcaaagcacttaagtgttagatctaacgtgttccagtgtctgtctgaggtgacttaaaaaatcagaacaaaacttctattatccagagtcatgggagagtacaccctttccaggaataatgttttgggaaacactgaaatgaaatcttcccagtattataaattgtgtatttaaaaaaaagaaacttttctgaatgcctacctggcggtgtataccaggcagtgtgccagtttaaaaagatgaaaaagaataaaaacttttgaggaaaaaa

SEQ ID NO: 295748 - DNA, 2246 bp, Homo sapiens
cacgcgcccctcctccgcatctgagcgggggagcggcggcccccagctgaatgggcgcgagagcggcgctgggggcgggtgggggcgcggggtaccgggctggcggccggccggcgccccctcattagtatgcggacgaaggcggcgggctgcgcggagcggcgtcccctgcagccgcggaccgaggcagcggcggcacctgccggccgagcaatgccaagtgagtacacctatgtgaaactgagaagtgattgctcgaggccttccctgcaatggtacacccgagctcaaagcaagatgagaaggcccagcttgttattaaaagacatcctcaaatgtacattgcttgtgtttggagtgtggatcctttatatcctcaagttaaattatactactgaagaatgtgacatgaaaaaaatgcattatgtggaccctgaccatgtaaagagagctcagaaatatgctcagcaagtcttgcagaaggaatgtcgtcccaagtttgccaagacatcaatggcgctgttatttgagcacaggtatagcgtggacttactcccttttgtgcagaaggcccccaaagacagtgaagctgagtccaagtacgatcctccttttgggttccggaagttctccagtaaagtccagaccctcttggaactcttgccagagcacgacctccctgaacacttgaaagccaagacctgtcggcgctgtgtggttattggaagcggaggaatactgcacggattagaactgggccacaccctgaaccagttcgatgttgtgataagagtgttgatttcaactggcttcaagcaatggtaaaaaaggaaaccctgccattctgggtacgactcttcttttggaagcaggtggcagaaaaaatcccactgcagccaaaacatttcaggattttgaatccagttatcatcaaagagactgcctttgacatccttcagtactcagagcctcagtcaaggttctggggccgagataagaacgtccccacaatcggtgtcattgccgttgtcttagccacacatctgtgcgatgaagtcagtttggcgggttttggatatgacctcaatcaacccagaacacctttgcactacttcgacagtcaatgcatggctgctatgaactttcagaccatgcataatgtgacaacggaaaccaagttcctcttaaagctggtcaaagagggagtggtgaaagatctcagtggaggcattgatcgtgaattttgaacacagaaaacctcagttgaaaatgcaactctaactctgagagctgtttttgacagccttcttgatgtatttctccatcctgcagatactttgaagtgcagctcatgtttttaacttttaatttaaaaacacaaaaaaaattttagctcttcccactttttttttcctatttatttgaggtcagtgtttgtttttgcacaccattttgtaaatgaaacttaagaattgaattggaaagacttctcaaagagaattgtatgtaacgatgttgtattgatttttaagaaagtaatttaatttgtaaaacttctgctcgtttacactgcacattgaatacaggtaactaattggaaggagaggggaggtcactcttttgatggtggccctgaacctcattctggttccctgctgcgctgcttggtgtgacccacggaggatccactcccaggatgacgtgctccgtagctctgctgctgatactgggtctgcgatgcagcggcgtgaggcctgggctggttggagaaggtcacaacccttctctgttggtctgccttctgctgaaagactcgagaaccaaccagggaagctgtcctggaggtccctggtcggagagggacatagaatctgtgacctctgacaactgtgaagccaccctgggctacagaaaccacagtcttcccagcaattattacaattcttgaattccttggggattttttactgccctttcaaagcacttaagtgttagatctaacgtgttccagtgtctgtctgaggtgacttaaaaaatcagaacaaaacttctattatccagagtcatgggagagtacaccctttccaggaataatgttttgggaaacactgaaatgaaatcttcccagtattataaattgtgtatttaaaaaaaagaaacttttctgaatgcctacctggcggtgtataccaggcagtgtgccagtttaaaaagatgaaaaagaataaaaacttttgaggaaaaaa

SEQ ID NO: 295749 - DNA, 2255 bp, Homo sapiens
gccagtgagtcctggaaggcagtgctggctgggacatggaaggcacacagagaagttcagactcaccatgatagccaataggcagtcatcctagattcttttttggtttcactgtttaaaaattgttttctggccaggcgcagtggctcatgcctataatcccagcactttgggaggccaaggcaggaggatcgcttgagctcaggagttcaagaccagcctgggcaacatagagacagcttgtctctacagaaaatcaaaaagtcagccaggcatggtggactagattttcccttctgattccttttttgaaattctggcaagaactaacatctgagcacaatggaaaatttctgaggatattttactggcacccagagaaagtcccaaatgtaatatgcttagattgagtaaaaatattagggctagatgaaattgcttgacattcagggattagatacaagtgttcgctcaagtactaaaggctgcattcctcgaaatcctagaaagacagagctgggaggggagatgaggctgcaaaccatgcactcattcttagtcataagaagacgtggaggacatgacatggatactgcctggtgtacagagatggttgatggcctgctttgtcagtgtgtctttgtcctttttatttaaataggttaaacagtgcaccagttgagggatattcagaacatgttggaaataaaactactataaggatgacttatccagagggcgcaccactgtctgaccttgaatattattccaatgacttatttgttgctgttttatttaagagtgttgatttcaactggcttcaagcaatggtaaaaaaggaaaccctgccattctgggtacgactcttcttttggaagcaggtggcagaaaaaatcccactgcagccaaaacatttcaggattttgaatccagttatcatcaaagagactgcctttgacatccttcagtactcagagcctcagtcaaggttctggggccgagataagaacgtccccacaatcggtgtcattgccgttgtcttagccacacatctgtgcgatgaagtcagtttggcgggttttggatatgacctcaatcaacccagaacacctttgcactacttcgacagtcaatgcatggctgctatgaactttcagaccatgcataatgtgacaacggaaaccaagttcctcttaaagctggtcaaagagggagtggtgaaagatctcagtggaggcattgatcgtgaattttgaacacagaaaacctcagttgaaaatgcaactctaactctgagagctgtttttgacagccttcttgatgtatttctccatcctgcagatactttgaagtgcagctcatgtttttaacttttaatttaaaaacacaaaaaaaattttagctcttcccactttttttttcctatttatttgaggtcagtgtttgtttttgcacaccattttgtaaatgaaacttaagaattgaattggaaagacttctcaaagagaattgtatgtaacgatgttgtattgatttttaagaaagtaatttaatttgtaaaacttctgctcgtttacactgcacattgaatacaggtaactaattggaaggagaggggaggtcactcttttgatggtggccctgaacctcattctggttccctgctgcgctgcttggtgtgacccacggaggatccactcccaggatgacgtgctccgtagctctgctgctgatactgggtctgcgatgcagcggcgtgaggcctgggctggttggagaaggtcacaacccttctctgttggtctgccttctgctgaaagactcgagaaccaaccagggaagctgtcctggaggtccctggtcggagagggacatagaatctgtgacctctgacaactgtgaagccaccctgggctacagaaaccacagtcttcccagcaattattacaattcttgaattccttggggattttttactgccctttcaaagcacttaagtgttagatctaacgtgttccagtgtctgtctgaggtgacttaaaaaatcagaacaaaacttctattatccagagtcatgggagagtacaccctttccaggaataatgttttgggaaacactgaaatgaaatcttcccagtattataaattgtgtatttaaaaaaaagaaacttttctgaatgcctacctggcggtgtataccaggcagtgtgccagtttaaaaagatgaaaaagaataaaaacttttgaggaaaaaa

SEQ ID NO: 295750 - DNA, 1006 bp, Homo sapiens
cacgcgcccctcctccgcatctgagcgggggagcggcggcccccagctgaatgggcgcgagagcggcgctgggggcgggtgggggcgcggggtaccgggctggcggccggccggcgccccctcattagtatgcggacgaaggcggcgggctgcgcggagcggcgtcccctgcagccgcggaccgaggcagcggcggcacctgccggccgagcaatgccaagtgagtacacctatgtgaaactgagaagtgattgctcgaggccttccctgcaatggtacacccgagctcaaagcaagatgagaaggcccagcttgttattaaaagacatcctcaaatgtacattgcttgtgtttggagtgtggatcctttatatcctcaagttaaattatactactgaagaatgtgacatgaaaaaaatgcattatgtggaccctgaccatgtaaagagagctcagaaatatgctcagcaagtcttgcagaaggaatgtcgtcccaagtttgccaagacatcaatggcgctgttatttgagcacaggtatagcgtggacttactcccttttgtgcagaaggcccccaaagacagtgaagctgagtccaagtacgatcctccttttgggttccggaagttctccagtaaagtccagaccctcttggaactcttgccagagcacgacctccctgaacacttgaaagccaagacctgtcggcgctgtgtggttattggaagcggaggaatactgcacggattagaactgggccacaccctgaaccagttcgatgttgtgataaggttaaacagtgcaccagttgagggatattcagaacatgttggaaataaaactactataaggatgacttatccagagggcgcaccactgtctgaccttgaatattattccaatgacttatttgttgctgttttatttaagagtgttgatttcaactggcttcaagcaatggtaaaaaaggaaaccctgccattctgggtacgacgcaggtggtgtg

SEQ ID NO: 295751 - DNA, 1018 bp, Homo sapiens
cacgcgcccctcctccgcatctgagcgggggagcggcggcccccagctgaatgggcgcgagagcggcgctgggggcgggtgggggcgcggggtaccgggctggcggccggccggcgccccctcattagtatgcggacgaaggcggcgggctgcgcggagcggcgtcccctgcagccgcggaccgaggcagcggcggcacctgccggccgaggcactgtgaagacagtggtgtgcaaagcagagacccctgcttgcatggaatctgcattctagtgggggagacaagacaaacgtgtaattcaaaagtaaaaaacttatgaagaatcacatgtctcatgattagtgttataaagaaaaaagaaagcatgcatacaggaatatccacataagcaattttgcaatgccaagtgagtacacctatgtgaaactgagaagtgattgctcgaggccttccctgcaatggtacacccgagctcaaagcaagatgagaaggcccagcttgttattaaaagacatcctcaaatgtacattgcttgtgtttggagtgtggatcctttatatcctcaagttaaattatactactgaagaatgtgacatgaaaaaaatgcattatgtggaccctgaccatgtaaagacctacaccgtgcctttaaaggaagcagggccctccctgctgaagcattcagtgagcccaggcaccagcatcttcaaaccgagtcttttctctccttagtgctgctccccgctttccaggccttcctgggatatcttagaggtaagaaaactgaagcctcgacctagggagaaatgctttaacaaagacgacgctgctagttaaatcaatctagaactgagtccagcctccagatctcctgattatttttttttctaacagttgatgggatgaaatctacataagatttaatcctttgaagcccattgtttgatgagtattaaaaacttatgcagccacgcctctgtcaccacaatcccgctttagcacattcccatggcccaa

SEQ ID NO: 295752 - DNA, 770 bp, Homo sapiens
ttctgattatccaactgagtggacaaagatgggcaagtggcctgcggggatcgggcctgctggatgcttgatgcacgactgcttgatgcttgagtgctgtgggagacaggtgctcagatattgctggtgagagtggaaaccaaaggtggtctttttggaaggtaatttggcataaccatccaaattgaaactgtatacatactatacatatgctgacccagaaattctacttataaagaatttatggtaatcataggacagtgtctgtaataaaacactggaaacaacctcaatgtttaaagtattaaataaattagagtacattcatattcagactatatagctgttacggtagatcttggtgtggaaatgggatgatgtcaagtatttattaagtgagggagaaacgcaaattacaaaacagtacctctaattgctccatgtatatgattaatatatatatatatatatatatgtcttttcctatatgtatatatataaggaaactgccttatttttgaagttgctggttgggatttctctgttctttcagcccctgggggacacctcagttaaagcaagatcagtctgttggccgagagtggtggctcacgcctgtaatcccagcactttgggagtccgaggcgcgtggatcacctgaggtcaagttctagaccagcctggccaacatggcgaaaccccatctctactaaaaataaaaaataataataaattaaaaaaataaaaaaaattagccgggcatggtggcg

SEQ ID NO: 295753 - DNA, 1606 bp, Homo sapiens
cttgacagtctgaaggcacaggtgataagattttgttctctgtgaatatttttaaactaataggttatgtttttaaatcttcaatttggtaaaaaactgaaacgtcttggaatattggttctattagagttaaatatggtaaaacaggaaagcgtgtttattttcagataaggggaatttatacttttcattaaagtcttggagtcttaggaaaatgttgagggtttgtcttcccccagtgtcattaatactaatgaactattagatcaaattcacttatacatttaatatcatagttattcaaaatcaggactttaaatatttttttctcccagttcatatttctttgtgcgaaaattgaatttgtatgaaaagttagataattaagctaatcaagtatgaagtatacactcttcctaagtgaatttaaataatgtaatgcttttaaataaaagcagtggtcccaccacatttttttcagcatagtagctggcattttgttatcattagccagagtagcttcagcatataagttattgatgttttccaacttcaaaagtgcattttatgcctcccagtaaatttgataatgatttgtcacagctttgtcatcttttgacttttgcttatgggcctcacttcgtacaactataacatgaaaaaggattgtcctaaagtaagggaatcagttaatggtaggatgaagaaactgtaaaaactcctagaaaaaaaacctgtgtgcatttttctggaaagttttcaaactgtgtaattcagttttcattcaattatataatttggttatatgctttaaaaaacatttgtctaaatgttcccggttttcttctggtcttagagtcagctgagtgctggctatgcagccactcgtatttttgcatccagaaaggagtaactccctttatatgaagatttttttttttaagcttagatgctatgtaagagaaaactatttgtaatcacatagtacccagggaggagtgatgaatgcttttttaaaaaaggatatttaagtatattatgtaatttaaatataaattatcaaactaaaaaacttcagcttttaaaactttctaaacaaaatgaagcaaagtacattaattccttctatcttaaatctgagactttttattttcccttgggtatatatttctctcagtgttaggtagatgttaattcaaccatcctacattctctatataaaattacactcattttacatgaaagcaaaataatgtcgttactttcatggaactgtgttctaacaggcttataatctcattctgtgcttctggtaatggcgtataccagtctgatgattcttaccatccttattcttacattactcttccaattgttttgattttaactggtggtcatgtaagttcctcggtggcagggatttatctggttcatttactgttatatatccttgtggaataggacagtgcctggcatataataggcacttttggaatgaatgtaaaatactagttgaaatatgtattcatctggcatccatggtacccatcatctgtattaaagggcttaaaaaagcatcattgcaataaaccatactaacccacca

SEQ ID NO: 295754 - DNA, 2534 bp, Homo sapiens
cttgacagtctgaaggcacaggtgataagattttgttctctgtgaatatttttaaactaataggttatgtttttaaatcttcaatttggtaaaaaactgaaacgtcttggaatattggttctattagagttaaatatggtaaaacaggaaagcgtgtttattttcagataaggggaatttatacttttcattaaagtcttggagtcttaggaaaatgttgagggtttgtcttcccccagtgtcattaatactaatgaactattagatcaaattcacttatacatttaatatcatagttattcaaaatcaggactttaaatatttttttctcccagttcatatttctttgtgcgaaaattgaatttgtatgaaaagttagataattaagctaatcaagtatgaagtatacactcttcctaagtgaatttaaataatgtaatgcttttaaataaaagcagtggtcccaccacatttttttcagcatagtagctggcattttgttatcattagccagagtagcttcagcatataagttattgatgttttccaacttcaaaagtgcattttatgcctcccagtaaatttgataatgatttgtcacagctttgtcatcttttgacttttgcttatgggcctcacttcgtacaactataacatgaaaaaggattgtcctaaagtaagggaatcagttaatggtaggatgaagaaactgtaaaaactcctagaaaaaaaacctgtgtgcatttttctggaaagttttcaaactgtgtaattcagttttcattcaattatataatttggttatatgctttaaaaaacatttgtctaaatgttcccggttttcttctggtcttagagtcagctgagtgctggctatgcagccactcgtatttttgcatccagaaaggagtaactccctttatatgaagatttttttttttaagcttagatgctatgtaagagaaaactatttgtaatcacatagtacccagggaggagtgatgaatgcttttttaaaaaaggatatttaagtatattatgtaatttaaatataaattatcaaactaaaaaacttcagcttttaaaactttctaaacaaaatgaagcaaagtacattaattccttctatcttaaatctgagactttttattttcccttgggtatatatttctctcagtgttaggtagatgttaattcaaccatcctacattctctatataaaattacactcattttacatgaaagcaaaataatgtcgttactttcatggaactgtgttctaacaggcttataatctcattctgtgcttctggtaatggcgtataccagtctgatgattcttaccatccttattcttacattactcttccaattgttttgattttaactggtggtcatgtaagttcctcggtggcagggatttatctggttcatttactgttatatatccttgtggaataggacagtgcctggcatataataggcacttttggaatgaatgtaaaatactagttgaaatatgtattcatctggcatccatggtacccatcatctgtattaaagggcttaaaaaagcatcattgcaataaaccatactaacccaccactaaagtcacagtcataattgaagtgcacccaaaataaggtccagtgactgtaccttagcttttacttcagacatgtccaaaacttgtgagaacatacaatttaaagttgaaaactcatcattttgggctatttttgaatagggctgaaatatggtgacatgtcaggcactcagttttttggagctgtcttaaaggtgaggtggaaagtgagagatgattttgctctaattacccacacattctccctaaccctccattttaagacacttagctataatagcttaagactatcaaaactgcttttgtgattctcagtaggatctagttcaaagccatctcagtgctagtgattggtaattgttaatttgatggtaattaccctacttgtaaagttgacattcatactggctaatcctccctgcccctagtcgtggacaatgaaacagtgagtggctggtgaattagatcagattcaaactaagccattccttgatgctattcttcactgctgttccttagggtatctaaatgtgttatttataaacatttttgggggctcctgcctgcaaacttcggtaggtgttggtcttccccacctctacaactgagccaaggacttgttctgaaaggtgagtaataaataagggaacaaggtttctattttctgtgtttgtaattaccagattttcacctctgtttatatattattctgatgtaaaagaacctcatagttatataaaattagaccttttgtaaataaatataatttattagaaaaaatggtatcttttactaaattggatttgtgtcagttttttcctttaagcaccactcaggcagcaagctctatgctgtgagagttgctggaggcccacgttatgttttctcagtgtaattcctctttttcttgataaaaagacttaaaaa

SEQ ID NO: 295755 - DNA, 2480 bp, Homo sapiens
cttgacagtctgaaggcacaggtgataagattttgttctctgtgaatatttttaaactaataggttatgtttttaaatcttcaatttggtaaaaaactgaaacgtcttggaatattggttctattagagttaaatatggtaaaacaggaaagcgtgtttattttcagataaggggaatttatacttttcattaaagtcttggagtcttaggaaaatgttgagggtttgtcttcccccagtgtcattaatactaatgaactattagatcaaattcacttatacatttaatatcatagttattcaaaatcaggactttaaatatttttttctcccagttcatatttctttgtgcgaaaattgaatttgtatgaaaagttagataattaagctaatcaagtatgaagtatacactcttcctaagtgaatttaaataatgtaatgcttttaaataaaagcagtggtcccaccacatttttttcagcatagtagctggcattttgttatcattagccagagtagcttcagcatataagttattgatgttttccaacttcaaaagtgcattttatgcctcccagtaaatttgataatgatttgtcacagctttgtcatcttttgacttttgcttatgggcctcacttcgtacaactataacatgaaaaaggattgtcctaaagtaagggaatcagttaatggtaggatgaagaaactgtaaaaactcctagaaaaaaaacctgtgtgcatttttctggaaagttttcaaactgtgtaattcagttttcattcaattatataatttggttatatgctttaaaaaacatttgtctaaatgttcccggttttcttctggtcttagagtcagctgagtgctggctatgcagccactcgtatttttgcatccagaaaggagtaactccctttatatgaagatttttttttttaagcttagatgctatgtaagagaaaactatttgtaatcacatagtacccagggaggagtgatgaatgcttttttaaaaaaggatatttaagtatattatgtaatttaaatataaattatcaaactaaaaaacttcagcttttaaaactttctaaacaaaatgaagcaaagtacattaattccttctatcttaaatctgagactttttattttcccttgggtatatatttctctcagtgttaggtagatgttaattcaaccatcctacattctctatataaaattacactcattttacatgaaagcaaaataatgtcgttactttcatggaactgtgttctaacaggcttataatctcattctgtgcttctggtaatggcgtataccagtctgatgattcttaccatccttattcttacattactcttccaattgttttgattttaactggtggtcatgtaagttcctcggtggcagggatttatctggttcatttactgttatatatccttgtggaataggacagtgcctggcatataataggcacttttggaatgaatgtaaaatactagttgaaatatgtattcatctggcatccatggtacccatcatctgtattaaagggcttaaaaaagcatcattgcaataaaccatactaacccaccactaaagtcacagtcataattgaagtgcacccaaaataaggtccagtgactgtaccttagcttttacttcagacatgtccaaaacttgtgagaacatacaatttaaagttgaaaactcatcattttgggctatttttgaatagggctgaaatatggtgacatgtcaggcactcagttttttggagctgtcttaaaggtgaggtggaaagtgagagatgattttgctctaattacccacacattctccctaaccctccattttaagacacttagctataatagcttaagactatcatgattggtaattgttaatttgatggtaattaccctacttgtaaagttgacattcatactggctaatcctccctgcccctagtcgtggacaatgaaacagtgagtggctggtgaattagatcagattcaaactaagccattccttgatgctattcttcactgctgttccttagggtatctaaatgtgttatttataaacatttttgggggctcctgcctgcaaacttcggtaggtgttggtcttccccacctctacaactgagccaaggacttgttctgaaaggtgagtaataaataagggaacaaggtttctattttctgtgtttgtaattaccagattttcacctctgtttatatattattctgatgtaaaagaacctcatagttatataaaattagaccttttgtaaataaatataatttattagaaaaaatggtatcttttactaaattggatttgtgtcagttttttcctttaagcaccactcaggcagcaagctctatgctgtgagagttgctggaggcccacgttatgttttctcagtgtaattcctctttttcttgataaaaagacttaaaaa

SEQ ID NO: 295756 - DNA, 2382 bp, Homo sapiens
cttgacagtctgaaggcacaggtgataagattttgttctctgtgaatatttttaaactaataggttatgtttttaaatcttcaatttggtaaaaaactgaaacgtcttggaatattggttctattagagttaaatatggtaaaacaggaaagcgtgtttattttcagataaggggaatttatacttttcattaaagtcttggagtcttaggaaaatgttgagggtttgtcttcccccagtgtcattaatactaatgaactattagatcaaattcacttatacatttaatatcatagttattcaaaatcaggactttaaatatttttttctcccagttcatatttctttgtgcgaaaattgaatttgtatgaaaagttagataattaagctaatcaagtatgaagtatacactcttcctaagtgaatttaaataatgtaatgcttttaaataaaagcagtggtcccaccacatttttttcagcatagtagctggcattttgttatcattagccagagtagcttcagcatataagttattgatgttttccaacttcaaaagtgcattttatgcctcccagtaaatttgataatgatttgtcacagctttgtcatcttttgacttttgcttatgggcctcacttcgtacaactataacatgaaaaaggattgtcctaaagtaagggaatcagttaatggtaggatgaagaaactgtaaaaactcctagaaaaaaaacctgtgtgcatttttctggaaagttttcaaactgtgtaattcagttttcattcaattatataatttggttatatgctttaaaaaacatttgtctaaatgttcccggttttcttctggtcttagagtcagctgagtgctggctatgcagccactcgtatttttgcatccagaaaggagtaactccctttatatgaagatttttttttttaagcttagatgctatgtaagagaaaactatttgtaatcacatagtacccagggaggagtgatgaatgcttttttaaaaaaggatatttaagtatattatgtaatttaaatataaattatcaaactaaaaaacttcagcttttaaaactttctaaacaaaatgaagcaaagtacattaattccttctatcttaaatctgagactttttattttcccttgggtatatatttctctcagtgttaggtagatgttaattcaaccatcctacattctctatataaaattacactcattttacatgaaagcaaaataatgtcgttactttcatggaactgtgttctaacaggcttataatctcattctgtgcttctggtaatggcgtataccagtctgatgattcttaccatccttattcttacattactcttccaattgttttgattttaactggtggtcatgtaagttcctcggtggcagggatttatctggttcatttactgttatatatccttgtggaataggacagtgcctggcatataataggcacttttggaatgaatgtaaaatactagttgaaatatgtattcatctggcatccatggtacccatcatctgtattaaagggcttaaaaaagcatcattgcaataaaccatactaacccaccactaaagtcacagtcataattgaagtgcacccaaaataaggtccagtgactgtaccttagcttttacttcagacatgtccaaaacttgtgagaacatacaatttaaagttgaaaactcatcattttgggctatttttgaatagggctgaaatatggtgacatgtcaggcactcagttttttggagctgtcttaaaggtgaggtggaaagtgagagatgattttgctctaattacccacacattctccctaaccctccattttaagacacttagctataatagcttaagactatcaaaactgcttttgtgattctcagtaggatctagttcaaagccatctcagtgctagtgattggtaattgttaatttgatggtaattaccctacttgtaaagttgacattcatactggctaatcctccctgcccctagtcgtggacaatgaaacagtgagtggctggtgaattagatcagattcaaactaagccattccttgatgctattcttcactgctgttccttagggtatctaaatgtgttatttataaacatttttgggggctcctgcctgcaaacttcggtaggtgttggtcttccccacctctacaactgagccaaggacttgttctgaaaggtgagtaataaataagggaacaaggtttctattttctgtgtttgtaattaccagattttcacctctgtttatatattattctgatgtaaaagaacctcatagttatataaaattagaccttttgtaaataaatataatttattaga

SEQ ID NO: 295757 - DNA, 2328 bp, Homo sapiens
cttgacagtctgaaggcacaggtgataagattttgttctctgtgaatatttttaaactaataggttatgtttttaaatcttcaatttggtaaaaaactgaaacgtcttggaatattggttctattagagttaaatatggtaaaacaggaaagcgtgtttattttcagataaggggaatttatacttttcattaaagtcttggagtcttaggaaaatgttgagggtttgtcttcccccagtgtcattaatactaatgaactattagatcaaattcacttatacatttaatatcatagttattcaaaatcaggactttaaatatttttttctcccagttcatatttctttgtgcgaaaattgaatttgtatgaaaagttagataattaagctaatcaagtatgaagtatacactcttcctaagtgaatttaaataatgtaatgcttttaaataaaagcagtggtcccaccacatttttttcagcatagtagctggcattttgttatcattagccagagtagcttcagcatataagttattgatgttttccaacttcaaaagtgcattttatgcctcccagtaaatttgataatgatttgtcacagctttgtcatcttttgacttttgcttatgggcctcacttcgtacaactataacatgaaaaaggattgtcctaaagtaagggaatcagttaatggtaggatgaagaaactgtaaaaactcctagaaaaaaaacctgtgtgcatttttctggaaagttttcaaactgtgtaattcagttttcattcaattatataatttggttatatgctttaaaaaacatttgtctaaatgttcccggttttcttctggtcttagagtcagctgagtgctggctatgcagccactcgtatttttgcatccagaaaggagtaactccctttatatgaagatttttttttttaagcttagatgctatgtaagagaaaactatttgtaatcacatagtacccagggaggagtgatgaatgcttttttaaaaaaggatatttaagtatattatgtaatttaaatataaattatcaaactaaaaaacttcagcttttaaaactttctaaacaaaatgaagcaaagtacattaattccttctatcttaaatctgagactttttattttcccttgggtatatatttctctcagtgttaggtagatgttaattcaaccatcctacattctctatataaaattacactcattttacatgaaagcaaaataatgtcgttactttcatggaactgtgttctaacaggcttataatctcattctgtgcttctggtaatggcgtataccagtctgatgattcttaccatccttattcttacattactcttccaattgttttgattttaactggtggtcatgtaagttcctcggtggcagggatttatctggttcatttactgttatatatccttgtggaataggacagtgcctggcatataataggcacttttggaatgaatgtaaaatactagttgaaatatgtattcatctggcatccatggtacccatcatctgtattaaagggcttaaaaaagcatcattgcaataaaccatactaacccaccactaaagtcacagtcataattgaagtgcacccaaaataaggtccagtgactgtaccttagcttttacttcagacatgtccaaaacttgtgagaacatacaatttaaagttgaaaactcatcattttgggctatttttgaatagggctgaaatatggtgacatgtcaggcactcagttttttggagctgtcttaaaggtgaggtggaaagtgagagatgattttgctctaattacccacacattctccctaaccctccattttaagacacttagctataatagcttaagactatcatgattggtaattgttaatttgatggtaattaccctacttgtaaagttgacattcatactggctaatcctccctgcccctagtcgtggacaatgaaacagtgagtggctggtgaattagatcagattcaaactaagccattccttgatgctattcttcactgctgttccttagggtatctaaatgtgttatttataaacatttttgggggctcctgcctgcaaacttcggtaggtgttggtcttccccacctctacaactgagccaaggacttgttctgaaaggtgagtaataaataagggaacaaggtttctattttctgtgtttgtaattaccagattttcacctctgtttatatattattctgatgtaaaagaacctcatagttatataaaattagaccttttgtaaataaatataatttattaga

SEQ ID NO: 295758 - DNA, 996 bp, Homo sapiens
aggtgcatagtggacctagaactcccagaggccctgtgtcctccattcccccacacctggctggcaggaagctccggcagaccacgtgcatgtgcctgcacctgctttatgggagaattgagccctggtgacatttgtttcccccgggtcaccctggcggagtagcccttgggcacccctcacctcgagttggaggtctcggctcctcatgaccgccatgttcttctcctcactgagctgtgcgtagcgcatggctaagttgtagttgtcgtccttcaccttgaccagctcgtcattgtagctgtcccgctcttccttcatcttgtagtaccgctcctggaaggttagcagctccacgcgcgtcagcgtcatctgcttcttctcatcctccagctgccgcaacctggccagcagctcgcagcgttgcaggtccttggccttcatctgctgctgcagcttgatgacctcgttcatcaggaagacggacagaagaaataaatttgatggtatgtcaaccccgattgtttggtgaagccgcctgcagtactgtttcgagaaacattccaaagttacatccaagctcagtgggaaagcatgctgattactgatgtctgccatggatgccagagagtcgcagctgatgagccacttaccaccagccacgctgggggacagtgattatcaaaccttctaaactgatccatagaaagaaaaacatttaacattgtggtctagtgaccatagacaaagataactctacaagtacatgtgtatacacatgtacataatgtaaaattaaaacaagcttcacaaaccatatttattacctttactgaatatgataaaccccccctccagaagtcaggctagaaaagcttgtggaacccttctcggaatatttttaaacagataaagtacatcagattacaaaagaaaccaattataataaaatccagttatcaaatattaaataaatttgtgtttcagtaacataaa

SEQ ID NO: 295759 - DNA, 848 bp, Homo sapiens
atttggttcctgttttaatgccctgtgaaataagatttcgccgcctatcatctgctaactgctacggactcaggctcaccgaaaggcctgcgcttcacccaggtgccagcctccacaggttccaacccaggagcccaagttccctttggccctgactcagacactattaggactggcaagtgataagcagagtcccatactctcctattgactcggactaccatatcttgatcatccttttctgtaggaatcggatataacatcatccgggtacccatggccagctgtgacttctccatccgcacctacacctatgcagacacccctgatgatttccagttgcacaacttcagcctcccagaggaagataccaagctcaagatacccctgattcaccgagccctgcagttggcccagcgtcccgtttcactccttgccagcccctggacatcacccacttggctcaagaccaatggagcggtgaatgggaaggggtcactcaagggacagcccggagacatctaccaccagacctgggccagatactttgtgaagttcctggatgcctatgctgagcacaagttacagttctgggcagtgacagctgaaaatgagccttctgctgggctgttgagtggataccccttccagtgcctgggcttcacccctgaacatcagcgagacttcattgcccgtgacctaggtcctaccctcgccaacagtactcaccacaatgtccgcctactcatgctggatgaccaacgcttgctgctgccccactgggcaaaggtggtatgacagacccagaagcagcaaagaccccaaagggagatcctctagatcaccag

SEQ ID NO: 295760 - DNA, 756 bp, Homo sapiens
atttggttcctgttttaatgccctgtgaaataagatttcgccgcctatcatctgctaactgctacggactcaggctcaccgaaaggcctgcgcttcacccaggtgccagcctccacaggttccaacccaggagcccaagttccctttggccctgactcagacactattaggactggcaagtgataagcagagtcccatactctcctattgactcggactaccatatcttgatcatccttttctgtaggaatcggatataacatcatccgggtacccatggccagctgtgacttctccatccgcacctacacctatgcagacacccctgatgatttccagttgcacaacttcagcctcccagaggaagataccaagctcaagatacccctgattcaccgagccctgcagttggcccagcgtcccgtttcactccttgccagcccctggacatcacccacttggctcaagaccaatggagcggtgaatgggaaggggtcactcaagggacagcccggagacatctaccaccagacctgggccagatactttgtgaagtaagggatcagcaaggatgtgggatcaggactggcctcccatttagccatgctgatctgtgtcccaaccctcaacctagttccacttccagatctgcctgtcctcagctcacctttctaccttctgggcctttcagccttgggcctgtcaatcttgcccactccatcaggcttcctgttctctcggtctggcccactttct

SEQ ID NO: 295761 - DNA, 471 bp, Homo sapiens
ttggcaggatcacactctcagcttctcctccctgctccctagctcctctaaggatgtgcctcttaccatcaaggatcctgctgtgggcttcctggagacaatctcacctggctactccattcacacctacctgtggcgtcgccagtgatggagcagatactcaaggaggcactgggctcagcctgggcattaaagggacagagtcagctcacacgctgtctgtgactaaagagggcacagcagggccagtgtgagcttacagcgacgtaagcccaggggcaatggtttgggtgactcactttcccctctaggtggtgccaggggctggaggcccctagaaaaagatcagtaagccccagtgtccccccagcccccatgcttatgtgaacatgcgctgtgtgctgcttgctttggaaactgggcctgggtccaggacaacggtggcctaatgagagggcgccacggtgatcc

SEQ ID NO: 295762 - DNA, 2572 bp, Homo sapiens
ccacatcgggaagccggaattacttgcagggctaacctagtgcctatagctaaggcaggtacctgcatccttgtttttgtttagtggatcctctatccttcagagactctggaacccctgtggtcttctcttcatctaatgaccctgaggggatggagttttcaagtccttccagagaggaatgtcccaagcctttgagtagggtaagcatcatggctggcagcctcacaggattgcttctacttcaggcagtgtcgtgggcatcaggtgcccgcccctgcatccctaaaagcttcggctacagctcggtggtgtgtgtctgcaatgccacatactgtgactcctttgaccccccgacctttcctgcccttggtaccttcagccgctatgagagtacacgcagtgggcgacggatggagctgagtatggggcccatccaggctaatcacacgggcacaggcctgctactgaccctgcagccagaacagaagttccagaaagtgaagggatttggaggggccatgacagatgctgctgctctcaacatccttgccctgtcaccccctgcccaaaatttgctacttaaatcgtacttctctgaagaaggaatcggatataacatcatccgggtacccatggccagctgtgacttctccatccgcacctacacctatgcagacacccctgatgatttccagttgcacaacttcagcctcccagaggaagataccaagctcaagatacccctgattcaccgagccctgcagttggcccagcgtcccgtttcactccttgccagcccctggacatcacccacttggctcaagaccaatggagcggtgaatgggaaggggtcactcaagggacagcccggagacatctaccaccagacctgggccagatactttgtgaagttcctggatgcctatgctgagcacaagttacagttctgggcagtgacagctgaaaatgagccttctgctgggctgttgagtggataccccttccagtgcctgggcttcacccctgaacatcagcgagacttcattgcccgtgacctaggtcctaccctcgccaacagtactcaccacaatgtccgcctactcatgctggatgaccaacgcttgctgctgccccactgggcaaaggtggtactgacagacccagaagcagctaaatatgttcatggcattgctgtacattggtacctggactttctggctccagccaaagccaccctaggggagacacaccgcctgttccccaacaccatgctctttgcctcagaggcctgtgtgggctccaagttctgggagcagagtgtgcggctaggctcctgggatcgagggatgcagtacagccacagcatcatcacgaacctcctgtaccatgtggtcggctggaccgactggaaccttgccctgaaccccgaaggaggacccaattgggtgcgtaactttgtcgacagtcccatcattgtagacatcaccaaggacacgttttacaaacagcccatgttctaccaccttggccacttcagcaagttcattcctgagggctcccagagagtggggctggttgccagtcagaagaacgacctggacgcagtggcactgatgcatcccgatggctctgctgttgtggtcgtgctaaaccgctcctctaaggatgtgcctcttaccatcaaggatcctgctgtgggcttcctggagacaatctcacctggctactccattcacacctacctgtggcgtcgccagtgatggagcagatactcaaggaggcactgggctcagcctgggcattaaagggacagagtcagctcacacgctgtctgtgactaaagagggcacagcagggccagtgtgagcttacagcgacgtaagcccaggggcaatggtttgggtgactcactttcccctctaggtggtgccaggggctggaggcccctagaaaaagatcagtaagccccagtgtccccccagcccccatgcttatgtgaacatgcgctgtgtgctgcttgctttggaaactgggcctgggtccaggcctagggtgagctcactgtccgtacaaacacaagatcagggctgagggtaaggaaaagaagagactaggaaagctgggcccaaaactggagactgtttgtctttcctggagatgcagaactgggcccgtggagcagcagtgtcagcatcagggcggaagccttaaagcagcagcgggtgtgcccaggcacccagatgattcctatggcaccagccaggaaaaatggcagctcttaaaggagaaaatgtttgagcccaaaaaaaaataaaaagtcacgacgacgagcacgcacacaaggaggcatctacaaactacacagagacaaaggcggggggcgcgataatccggggcgaccaccccacctttgtagcgcgccaaagagagtttaataagcgggcgacaacgggcgcacagctcgcttgtgggcacctcgggggcagggcccacaactccggataactggtcggcgcccgcggctagtctatcataggcctgacggcgctacgggtatcgtcctacaacc

SEQ ID NO: 295763 - DNA, 2564 bp, Homo sapiens
caggctgtaccggcccgaagcttaagatctagtgcctatagctaaggcaggtacctgcatccttgtttttgtttagtggatcctctatccttcagagactctggaacccctgtggtcttctcttcatctaatgaccctgaggggatggagttttcaagtccttccagagaggaatgtcccaagcctttgagtagggtaagcatcatggctggcagcctcacaggattgcttctacttcaggcagtgtcgtgggcatcaggtgcccgcccctgcatccctaaaagcttcggctacagctcggtggtgtgtgtctgcaatgccacatactgtgactcctttgaccccccgacctttcctgcccttggtaccttcagccgctatgagagtacacgcagtgggcgacggatggagctgagtatggggcccatccaggctaatcacacgggcacaggcctgctactgaccctgcagccagaacagaagttccagaaagtgaagggatttggaggggccatgacagatgctgctgctctcaacatccttgccctgtcaccccctgcccaaaatttgctacttaaatcgtacttctctgaagaaggaatcggatataacatcatccgggtacccatggccagctgtgacttctccatccgcacctacacctatgcagacacccctgatgatttccagttgcacaacttcagcctcccagaggaagataccaagctcaagatacccctgattcaccgagccctgcagttggcccagcgtcccgtttcactccttgccagcccctggacatcacccacttggctcaagaccaatggagcggtgaatgggaaggggtcactcaagggacagcccggagacatctaccaccagacctgggccagatactttgtgaagttcctggatgcctatgctgagcacaagttacagttctgggcagtgacagctgaaaatgagccttctgctgggctgttgagtggataccccttccagtgcctgggcttcacccctgaacatcagcgagacttcattgcccgtgacctaggtcctaccctcgccaacagtactcaccacaatgtccgcctactcatgctggatgaccaacgcttgctgctgccccactgggcaaaggtggtactgacagacccagaagcagctaaatatgttcatggcattgctgtacattggtacctggactttctggctccagccaaagccaccctaggggagacacaccgcctgttccccaacaccatgctctttgcctcagaggcctgtgtgggctccaagttctgggagcagagtgtgcggctaggctcctgggatcgagggatgcagtacagccacagcatcatcacgaacctcctgtaccatgtggtcggctggaccgactggaaccttgccctgaaccccgaaggaggacccaattgggtgcgtaactttgtcgacagtcccatcattgtagacatcaccaaggacacgttttacaaacagcccatgttctaccaccttggccacttcagcaagttcattcctgagggctcccagagagtggggctggttgccagtcagaagaacgacctggacgcagtggcactgatgcatcccgatggctctgctgttgtggtcgtgctaaaccgctcctctaaggatgtgcctcttaccatcaaggatcctgctgtgggcttcctggagacaatctcacctggctactccattcacacctacctgtggcgtcgccagtgatggagcagatactcaaggaggcactgggctcagcctgggcattaaagggacagagtcagctcacacgctgtctgtgactaaagagggcacagcagggccagtgtgagcttacagcgacgtaagcccaggggcaatggtttgggtgactcactttcccctctaggtggtgccaggggctggaggcccctagaaaaagatcagtaagccccagtgtccccccagcccccatgcttatgtgaacatgcgctgtgtgctgcttgctttggaaactgggcctgggtccaggcctagggtgagctcactgtccgtacaaacacaagatcagggctgagggtaaggaaaagaagagactaggaaagctgggcccaaaactggagactgtttgtctttcctggagatgcagaactgggcccgtggagcagcagtgtcagcatcagggcggaagccttaaagcagcagcgggtgtgcccaggcacccagatgattcctatggcaccagccaggaaaaatggcagctcttaaaggagaaaatgtttgagcccaaaaaaaaataaaaagtcacgacgacgagcacgcacacaaggaggcatctacaaactacacagagacaaaggcggggggcgcgataatccggggcgaccaccccacctttgtagcgcgccaaagagagtttaataagcgggcgacaacgggcgcacagctcgcttgtgggcacctcgggggcagggcccacaactccggataactggtcggcgcccgcggctagtctatcataggcctgacggcgctacgggtatcgtcctacaacc

SEQ ID NO: 295764 - DNA, 2856 bp, Homo sapiens
ccattaggcctatgaattataagatacagtcactttaaaatccactggaaggctgaagagtgagttaaacctcttataatgaatatacagtgaaaccagtagaggcattttatttagggttcctacaagaaagtgcttaaatagcatcgacgcctacatgctacatcctgttcagtctctgcctctgtgatgcagttggccagcaaatatcctccaagtcatcatttgcatagtgctagggataaaatgaggagcaataccaaatgctatacctgcccttatgggtcttatagtccaacgggagaaaaagatattatacaaataatcacggaaaataaatagaaaactgcatccttgtttttgtttagtggatcctctatccttcagagactctggaacccctgtggtcttctcttcatctaatgaccctgaggggatggagttttcaagtccttccagagaggaatgtcccaagcctttgagtagggtaagcatcatggctggcagcctcacaggattgcttctacttcaggcagtgtcgtgggcatcaggtgcccgcccctgcatccctaaaagcttcggctacagctcggtggtgtgtgtctgcaatgccacatactgtgactcctttgaccccccgacctttcctgcccttggtaccttcagccgctatgagagtacacgcagtgggcgacggatggagctgagtatggggcccatccaggctaatcacacgggcacaggcctgctactgaccctgcagccagaacagaagttccagaaagtgaagggatttggaggggccatgacagatgctgctgctctcaacatccttgccctgtcaccccctgcccaaaatttgctacttaaatcgtacttctctgaagaaggaatcggatataacatcatccgggtacccatggccagctgtgacttctccatccgcacctacacctatgcagacacccctgatgatttccagttgcacaacttcagcctcccagaggaagataccaagctcaagatacccctgattcaccgagccctgcagttggcccagcgtcccgtttcactccttgccagcccctggacatcacccacttggctcaagaccaatggagcggtgaatgggaaggggtcactcaagggacagcccggagacatctaccaccagacctgggccagatactttgtgaagttcctggatgcctatgctgagcacaagttacagttctgggcagtgacagctgaaaatgagccttctgctgggctgttgagtggataccccttccagtgcctgggcttcacccctgaacatcagcgagacttcattgcccgtgacctaggtcctaccctcgccaacagtactcaccacaatgtccgcctactcatgctggatgaccaacgcttgctgctgccccactgggcaaaggtggtactgacagacccagaagcagctaaatatgttcatggcattgctgtacattggtacctggactttctggctccagccaaagccaccctaggggagacacaccgcctgttccccaacaccatgctctttgcctcagaggcctgtgtgggctccaagttctgggagcagagtgtgcggctaggctcctgggatcgagggatgcagtacagccacagcatcatcacgaacctcctgtaccatgtggtcggctggaccgactggaaccttgccctgaaccccgaaggaggacccaattgggtgcgtaactttgtcgacagtcccatcattgtagacatcaccaaggacacgttttacaaacagcccatgttctaccaccttggccacttcagcaagttcattcctgagggctcccagagagtggggctggttgccagtcagaagaacgacctggacgcagtggcactgatgcatcccgatggctctgctgttgtggtcgtgctaaaccgctcctctaaggatgtgcctcttaccatcaaggatcctgctgtgggcttcctggagacaatctcacctggctactccattcacacctacctgtggcgtcgccagtgatggagcagatactcaaggaggcactgggctcagcctgggcattaaagggacagagtcagctcacacgctgtctgtgactaaagagggcacagcagggccagtgtgagcttacagcgacgtaagcccaggggcaatggtttgggtgactcactttcccctctaggtggtgccaggggctggaggcccctagaaaaagatcagtaagccccagtgtccccccagcccccatgcttatgtgaacatgcgctgtgtgctgcttgctttggaaactgggcctgggtccaggcctagggtgagctcactgtccgtacaaacacaagatcagggctgagggtaaggaaaagaagagactaggaaagctgggcccaaaactggagactgtttgtctttcctggagatgcagaactgggcccgtggagcagcagtgtcagcatcagggcggaagccttaaagcagcagcgggtgtgcccaggcacccagatgattcctatggcaccagccaggaaaaatggcagctcttaaaggagaaaatgtttgagcccaaaaaaaaataaaaagtcacgacgacgagcacgcacacaaggaggcatctacaaactacacagagacaaaggcggggggcgcgataatccggggcgaccaccccacctttgtagcgcgccaaagagagtttaataagcgggcgacaacgggcgcacagctcgcttgtgggcacctcgggggcagggcccacaactccggataactggtcggcgcccgcggctagtctatcataggcctgacggcgctacgggtatcgtcctacaacc

SEQ ID NO: 295765 - DNA, 2628 bp, Homo sapiens
tgcgggtggtcgggctgcatcctgccttcagagtcttactgcgcggggccccagtctccagtcccgcccaggcgcctttgcaggctgcggtgggatttcgttttgcctccggttggggctgctgtttctcttcgccgacgtggatcctctatccttcagagactctggaacccctgtggtcttctcttcatctaatgaccctgaggggatggagttttcaagtccttccagagaggaatgtcccaagcctttgagtagggtaagcatcatggctggcagcctcacaggattgcttctacttcaggcagtgtcgtgggcatcaggtgcccgcccctgcatccctaaaagcttcggctacagctcggtggtgtgtgtctgcaatgccacatactgtgactcctttgaccccccgacctttcctgcccttggtaccttcagccgctatgagagtacacgcagtgggcgacggatggagctgagtatggggcccatccaggctaatcacacgggcacaggcctgctactgaccctgcagccagaacagaagttccagaaagtgaagggatttggaggggccatgacagatgctgctgctctcaacatccttgccctgtcaccccctgcccaaaatttgctacttaaatcgtacttctctgaagaaggaatcggatataacatcatccgggtacccatggccagctgtgacttctccatccgcacctacacctatgcagacacccctgatgatttccagttgcacaacttcagcctcccagaggaagataccaagctcaagatacccctgattcaccgagccctgcagttggcccagcgtcccgtttcactccttgccagcccctggacatcacccacttggctcaagaccaatggagcggtgaatgggaaggggtcactcaagggacagcccggagacatctaccaccagacctgggccagatactttgtgaagttcctggatgcctatgctgagcacaagttacagttctgggcagtgacagctgaaaatgagccttctgctgggctgttgagtggataccccttccagtgcctgggcttcacccctgaacatcagcgagacttcattgcccgtgacctaggtcctaccctcgccaacagtactcaccacaatgtccgcctactcatgctggatgaccaacgcttgctgctgccccactgggcaaaggtggtactgacagacccagaagcagctaaatatgttcatggcattgctgtacattggtacctggactttctggctccagccaaagccaccctaggggagacacaccgcctgttccccaacaccatgctctttgcctcagaggcctgtgtgggctccaagttctgggagcagagtgtgcggctaggctcctgggatcgagggatgcagtacagccacagcatcatcacgaacctcctgtaccatgtggtcggctggaccgactggaaccttgccctgaaccccgaaggaggacccaattgggtgcgtaactttgtcgacagtcccatcattgtagacatcaccaaggacacgttttacaaacagcccatgttctaccaccttggccacttcagcaagttcattcctgagggctcccagagagtggggctggttgccagtcagaagaacgacctggacgcagtggcactgatgcatcccgatggctctgctgttgtggtcgtgctaaaccgctcctctaaggatgtgcctcttaccatcaaggatcctgctgtgggcttcctggagacaatctcacctggctactccattcacacctacctgtggcgtcgccagtgatggagcagatactcaaggaggcactgggctcagcctgggcattaaagggacagagtcagctcacacgctgtctgtgactaaagagggcacagcagggccagtgtgagcttacagcgacgtaagcccaggggcaatggtttgggtgactcactttcccctctaggtggtgccaggggctggaggcccctagaaaaagatcagtaagccccagtgtccccccagcccccatgcttatgtgaacatgcgctgtgtgctgcttgctttggaaactgggcctgggtccaggcctagggtgagctcactgtccgtacaaacacaagatcagggctgagggtaaggaaaagaagagactaggaaagctgggcccaaaactggagactgtttgtctttcctggagatgcagaactgggcccgtggagcagcagtgtcagcatcagggcggaagccttaaagcagcagcgggtgtgcccaggcacccagatgattcctatggcaccagccaggaaaaatggcagctcttaaaggagaaaatgtttgagcccaaaaaaaaataaaaagtcacgacgacgagcacgcacacaaggaggcatctacaaactacacagagacaaaggcggggggcgcgataatccggggcgaccaccccacctttgtagcgcgccaaagagagtttaataagcgggcgacaacgggcgcacagctcgcttgtgggcacctcgggggcagggcccacaactccggataactggtcggcgcccgcggctagtctatcataggcctgacggcgctacgggtatcgtcctacaacc

SEQ ID NO: 295766 - DNA, 2767 bp, Homo sapiens
tgcgggtggtcgggctgcatcctgccttcagagtcttactgcgcggggccccagtctccagtcccgcccaggcgcctttgcaggctgcggtgggatttcgttttgcctccggttggggctgctgtttctcttcgccgacgtagagacggggtttcaccatgttggtcaggctggtctccaattcctgacctcgtgatccgcccgcctcggcctgccaaacagctgtgattataggcgtgagccaccgcgcccggccaaccatcattattatttttaacgtggatcctctatccttcagagactctggaacccctgtggtcttctcttcatctaatgaccctgaggggatggagttttcaagtccttccagagaggaatgtcccaagcctttgagtagggtaagcatcatggctggcagcctcacaggattgcttctacttcaggcagtgtcgtgggcatcaggtgcccgcccctgcatccctaaaagcttcggctacagctcggtggtgtgtgtctgcaatgccacatactgtgactcctttgaccccccgacctttcctgcccttggtaccttcagccgctatgagagtacacgcagtgggcgacggatggagctgagtatggggcccatccaggctaatcacacgggcacaggcctgctactgaccctgcagccagaacagaagttccagaaagtgaagggatttggaggggccatgacagatgctgctgctctcaacatccttgccctgtcaccccctgcccaaaatttgctacttaaatcgtacttctctgaagaaggaatcggatataacatcatccgggtacccatggccagctgtgacttctccatccgcacctacacctatgcagacacccctgatgatttccagttgcacaacttcagcctcccagaggaagataccaagctcaagatacccctgattcaccgagccctgcagttggcccagcgtcccgtttcactccttgccagcccctggacatcacccacttggctcaagaccaatggagcggtgaatgggaaggggtcactcaagggacagcccggagacatctaccaccagacctgggccagatactttgtgaagttcctggatgcctatgctgagcacaagttacagttctgggcagtgacagctgaaaatgagccttctgctgggctgttgagtggataccccttccagtgcctgggcttcacccctgaacatcagcgagacttcattgcccgtgacctaggtcctaccctcgccaacagtactcaccacaatgtccgcctactcatgctggatgaccaacgcttgctgctgccccactgggcaaaggtggtactgacagacccagaagcagctaaatatgttcatggcattgctgtacattggtacctggactttctggctccagccaaagccaccctaggggagacacaccgcctgttccccaacaccatgctctttgcctcagaggcctgtgtgggctccaagttctgggagcagagtgtgcggctaggctcctgggatcgagggatgcagtacagccacagcatcatcacgaacctcctgtaccatgtggtcggctggaccgactggaaccttgccctgaaccccgaaggaggacccaattgggtgcgtaactttgtcgacagtcccatcattgtagacatcaccaaggacacgttttacaaacagcccatgttctaccaccttggccacttcagcaagttcattcctgagggctcccagagagtggggctggttgccagtcagaagaacgacctggacgcagtggcactgatgcatcccgatggctctgctgttgtggtcgtgctaaaccgctcctctaaggatgtgcctcttaccatcaaggatcctgctgtgggcttcctggagacaatctcacctggctactccattcacacctacctgtggcgtcgccagtgatggagcagatactcaaggaggcactgggctcagcctgggcattaaagggacagagtcagctcacacgctgtctgtgactaaagagggcacagcagggccagtgtgagcttacagcgacgtaagcccaggggcaatggtttgggtgactcactttcccctctaggtggtgccaggggctggaggcccctagaaaaagatcagtaagccccagtgtccccccagcccccatgcttatgtgaacatgcgctgtgtgctgcttgctttggaaactgggcctgggtccaggcctagggtgagctcactgtccgtacaaacacaagatcagggctgagggtaaggaaaagaagagactaggaaagctgggcccaaaactggagactgtttgtctttcctggagatgcagaactgggcccgtggagcagcagtgtcagcatcagggcggaagccttaaagcagcagcgggtgtgcccaggcacccagatgattcctatggcaccagccaggaaaaatggcagctcttaaaggagaaaatgtttgagcccaaaaaaaaataaaaagtcacgacgacgagcacgcacacaaggaggcatctacaaactacacagagacaaaggcggggggcgcgataatccggggcgaccaccccacctttgtagcgcgccaaagagagtttaataagcgggcgacaacgggcgcacagctcgcttgtgggcacctcgggggcagggcccacaactccggataactggtcggcgcccgcggctagtctatcataggcctgacggcgctacgggtatcgtcctacaacc

SEQ ID NO: 295767 - DNA, 2134 bp, Homo sapiens
ccacatcgggaagccggaattacttgcagggctaacctagtgcctatagctaaggcaggtacctgcatccttgtttttgtttagtggatcctctatccttcagagactctggaacccctgtggtcttctcttcatctaatgaccctgaggggatggagttttcaagtccttccagagaggaatgtcccaagcctttgagtagggtaagcatcatggctggcagcctcacaggattgcttctacttcaggcagtgtcgtgggcatcaggtgcccgcccctgcatccctaaaagcttcggctacagctcggtggtgtgtgtctgcaatgccacatactgtgactcctttgaccccccgacctttcctgcccttggtaccttcagccgctatgagagtacacgcagtgggcgacggatggagctgagtatggggcccatccaggctaatcacacgggcacaggcctgctactgaccctgcagccagaacagaagttccagaaagtgaagggatttggaggggccatgacagatgctgctgctctcaacatccttgccctgtcaccccctgcccaaaatttgctacttaaatcgtacttctctgaagaaggaatcggatataacatcatccgggtacccatggccagctgtgacttctccatccgcacctacacctatgcagacacccctgatgatttccagttgcacaacttcagcctcccagaggaagataccaagctcaagatacccctgattcaccgagccctgcagttggcccagcgtcccgtttcactccttgccagcccctggacatcacccacttggctcaagaccaatggagcggtgaatgggaaggggtcactcaagggacagcccggagacatctaccaccagacctgggccagatactttgtgaagttcctggatgcctatgctgagcacaagttacagttctgggcagtgacagctgaaaatgagccttctgctgggctgttgagtggataccccttccagtgcctgggcttcacccctgaacatcagcgagacttcattgcccgtgacctaggtcctaccctcgccaacagtactcaccacaatgtccgcctactcatgctggatgaccaacgcttgctgctgccccactgggcaaaggtggtactgacagacccagaagcagctaaatatgttcatggcattgctgtacattggtacctggactttctggctccagccaaagccaccctaggggagacacaccgcctgttccccaacaccatgctctttgcctcagaggcctgtgtgggctccaagttctgggagcagagtgtgcggctaggctcctgggatcgagggatgcagtacagccacagcatcatcacgaacctcctgtaccatgtggtcggctggaccgactggaaccttgccctgaaccccgaaggaggacccaattgggtgcgtaactttgtcgacagtcccatcattgtagacatcaccaaggacacgttttacaaacagcccatgttctaccaccttggccacttcagcaagttcattcctgagggctcccagagagtggggctggttgccagtcagaagaacgacctggacgcagtggcactgatgcatcccgatggctctgctgttgtggtcgtgctaaaccgctcctctaaggatgtgcctcttaccatcaaggatcctgctgtgggcttcctggagacaatctcacctggctactccattcacacctacctgtggcgtcgccagtgatggagcagatactcaaggaggcactgggctcagcctgggcattaaagggacagagtcagctcacacgctgtctgtgactaaagagggcacagcagggccagtgtgagcttacagcgacgtaagcccaggggcaatggtttgggtgactcactttcccctctaggtggtgccaggggctggaggcccctagaaaaagatcagtaagccccagtgtccccccagcccccatgcttatgtgaacatgcgctgtgtgctgcttgctttggaaactgggcctgggtccaggcctagggtgagctcactgtccgtacaaacacaagatcagggctgagggtaaggaaaagaagggtacagatactgctaggggggga

SEQ ID NO: 295768 - DNA, 2319 bp, Homo sapiens
ccacatcgggaagccggaattacttgcagggctaacctagtgcctatagctaaggcaggtacctgcatccttgtttttgtttagtggatcctctatccttcagagactctggaacccctgtggtcttctcttcatctaatgaccctgaggggatggagttttcaagtccttccagagaggaatgtcccaagcctttgagtagggtaagcatcatggctggcagcctcacaggattgcttctacttcaggcagtgtcgtgggcatcaggtgcccgcccctgcatccctaaaagcttcggctacagctcggtggtgtgtgtctgcaatgccacatactgtgactcctttgaccccccgacctttcctgcccttggtaccttcagccgctatgagagtacacgcagtgggcgacggatggagctgagtatggggcccatccaggctaatcacacgggcacaggcctgctactgaccctgcagccagaacagaagttccagaaagtgaagggatttggaggggccatgacagatgctgctgctctcaacatccttgccctgtcaccccctgcccaaaatttgctacttaaatcgtacttctctgaagaaggaatcggatataacatcatccgggtacccatggccagctgtgacttctccatccgcacctacacctatgcagacacccctgatgatttccagttgcacaacttcagcctcccagaggaagataccaagctcaagatacccctgattcaccgagccctgcagttggcccagcgtcccgtttcaacttcattgcccgtgacctaggtcctaccctcgccaacagtactcaccacaatgtccgcctactcatgctggatgaccaacgcttgctgctgccccactgggcaaaggtggtactgacagacccagaagcagctaaatatgttcatggcattgctgtacattggtacctggactttctggctccagccaaagccaccctaggggagacacaccgcctgttccccaacaccatgctctttgcctcagaggcctgtgtgggctccaagttctgggagcagagtgtgcggctaggctcctgggatcgagggatgcagtacagccacagcatcatcacgaacctcctgtaccatgtggtcggctggaccgactggaaccttgccctgaaccccgaaggaggacccaattgggtgcgtaactttgtcgacagtcccatcattgtagacatcaccaaggacacgttttacaaacagcccatgttctaccaccttggccacttcagcaagttcattcctgagggctcccagagagtggggctggttgccagtcagaagaacgacctggacgcagtggcactgatgcatcccgatggctctgctgttgtggtcgtgctaaaccgctcctctaaggatgtgcctcttaccatcaaggatcctgctgtgggcttcctggagacaatctcacctggctactccattcacacctacctgtggcgtcgccagtgatggagcagatactcaaggaggcactgggctcagcctgggcattaaagggacagagtcagctcacacgctgtctgtgactaaagagggcacagcagggccagtgtgagcttacagcgacgtaagcccaggggcaatggtttgggtgactcactttcccctctaggtggtgccaggggctggaggcccctagaaaaagatcagtaagccccagtgtccccccagcccccatgcttatgtgaacatgcgctgtgtgctgcttgctttggaaactgggcctgggtccaggcctagggtgagctcactgtccgtacaaacacaagatcagggctgagggtaaggaaaagaagagactaggaaagctgggcccaaaactggagactgtttgtctttcctggagatgcagaactgggcccgtggagcagcagtgtcagcatcagggcggaagccttaaagcagcagcgggtgtgcccaggcacccagatgattcctatggcaccagccaggaaaaatggcagctcttaaaggagaaaatgtttgagcccaaaaaaaaataaaaagtcacgacgacgagcacgcacacaaggaggcatctacaaactacacagagacaaaggcggggggcgcgataatccggggcgaccaccccacctttgtagcgcgccaaagagagtttaataagcgggcgacaacgggcgcacagctcgcttgtgggcacctcgggggcagggcccacaactccggataactggtcggcgcccgcggctagtctatcataggcctgacggcgctacgggtatcgtcctacaacc

SEQ ID NO: 295769 - DNA, 2213 bp, Homo sapiens
atttggttcctgttttaatgccctgtgaaataagatttcgccgcctatcatctgctaactgctacggactcaggctcaccgaaaggcctgcgcttcacccaggtgccagcctccacaggttccaacccaggagcccaagttccctttggccctgactcagacactattaggactggcaagtgataagcagagtcccatactctcctattgactcggactaccatatcttgatcatccttttctgtaggaatcggatataacatcatccgggtacccatggccagctgtgacttctccatccgcacctacacctatgcagacacccctgatgatttccagttgcacaacttcagcctcccagaggaagataccaagctcaagatacccctgattcaccgagccctgcagttggcccagcgtcccgtttcactccttgccagcccctggacatcacccacttggctcaagaccaatggagcggtgaatgggaaggggtcactcaagggacagcccggagacatctaccaccagacctgggccagatactttgtgaagttcctggatgcctatgctgagcacaagttacagttctgggcagtgacagctgaaaatgagccttctgctgggctgttgagtggataccccttccagtgcctgggcttcacccctgaacatcagcgagacttcattgcccgtgacctaggtcctaccctcgccaacagtactcaccacaatgtccgcctactcatgctggatgaccaacgcttgctgctgccccactgggcaaaggtggtactgacagacccagaagcagctaaatatgttcatggcattgctgtacattggtacctggactttctggctccagccaaagccaccctaggggagacacaccgcctgttccccaacaccatgctctttgcctcagaggcctgtgtgggctccaagttctgggagcagagtgtgcggctaggctcctgggatcgagggatgcagtacagccacagcatcatcacgaacctcctgtaccatgtggtcggctggaccgactggaaccttgccctgaaccccgaaggaggacccaattgggtgcgtaactttgtcgacagtcccatcattgtagacatcaccaaggacacgttttacaaacagcccatgttctaccaccttggccacttcagcaagttcattcctgagggctcccagagagtggggctggttgccagtcagaagaacgacctggacgcagtggcactgatgcatcccgatggctctgctgttgtggtcgtgctaaaccgctcctctaaggatgtgcctcttaccatcaaggatcctgctgtgggcttcctggagacaatctcacctggctactccattcacacctacctgtggcgtcgccagtgatggagcagatactcaaggaggcactgggctcagcctgggcattaaagggacagagtcagctcacacgctgtctgtgactaaagagggcacagcagggccagtgtgagcttacagcgacgtaagcccaggggcaatggtttgggtgactcactttcccctctaggtggtgccaggggctggaggcccctagaaaaagatcagtaagccccagtgtccccccagcccccatgcttatgtgaacatgcgctgtgtgctgcttgctttggaaactgggcctgggtccaggcctagggtgagctcactgtccgtacaaacacaagatcagggctgagggtaaggaaaagaagagactaggaaagctgggcccaaaactggagactgtttgtctttcctggagatgcagaactgggcccgtggagcagcagtgtcagcatcagggcggaagccttaaagcagcagcgggtgtgcccaggcacccagatgattcctatggcaccagccaggaaaaatggcagctcttaaaggagaaaatgtttgagcccaaaaaaaaataaaaagtcacgacgacgagcacgcacacaaggaggcatctacaaactacacagagacaaaggcggggggcgcgataatccggggcgaccaccccacctttgtagcgcgccaaagagagtttaataagcgggcgacaacgggcgcacagctcgcttgtgggcacctcgggggcagggcccacaactccggataactggtcggcgcccgcggctagtctatcataggcctgacggcgctacgggtatcgtcctacaacc

SEQ ID NO: 295770 - DNA, 2538 bp, Homo sapiens
ccattaggcctatgaattataagatacagtcactttaaaatccactggaaggctgaagagtgagttaaacctcttataatgaatatacagtgaaaccagtagaggcattttatttagggttcctacaagaaagtgcttaaatagcatcgacgcctacatgctacatcctgttcagtctctgcctctgtgatgcagttggccagcaaatatcctccaagtcatcatttgcatagtgctagggataaaatgaggagcaataccaaatgctatacctgcccttatgggtcttatagtccaacgggagaaaaagatattatacaaataatcacggaaaataaatagaaaactgcatccttgtttttgtttagtggatcctctatccttcagagactctggaacccctgtggtcttctcttcatctaatgaccctgaggggatggagttttcaagtccttccagagagaatgtcccaagccttcgggtagggtgccttcagccgctacaagagcagaagcagtgggcattggatggagctgagtacaggaccatacaggctaattgcaccggcacaggaatcggatataacatcatccgggtacccatggccagctgtgacttctccatccgcacctacacctatgcagacacccctgatgatttccagttgcacaacttcagcctcccagaggaagataccaagctcaagatacccctgattcaccgagccctgcagttggcccagcgtcccgtttcactccttgccagcccctggacatcacccacttggctcaagaccaatggagcggtgaatgggaaggggtcactcaagggacagcccggagacatctaccaccagacctgggccagatactttgtgaagttcctggatgcctatgctgagcacaagttacagttctgggcagtgacagctgaaaatgagccttctgctgggctgttgagtggataccccttccagtgcctgggcttcacccctgaacatcagcgagacttcattgcccgtgacctaggtcctaccctcgccaacagtactcaccacaatgtccgcctactcatgctggatgaccaacgcttgctgctgccccactgggcaaaggtggtactgacagacccagaagcagctaaatatgttcatggcattgctgtacattggtacctggactttctggctccagccaaagccaccctaggggagacacaccgcctgttccccaacaccatgctctttgcctcagaggcctgtgtgggctccaagttctgggagcagagtgtgcggctaggctcctgggatcgagggatgcagtacagccacagcatcatcacgaacctcctgtaccatgtggtcggctggaccgactggaaccttgccctgaaccccgaaggaggacccaattgggtgcgtaactttgtcgacagtcccatcattgtagacatcaccaaggacacgttttacaaacagcccatgttctaccaccttggccacttcagcaagttcattcctgagggctcccagagagtggggctggttgccagtcagaagaacgacctggacgcagtggcactgatgcatcccgatggctctgctgttgtggtcgtgctaaaccgctcctctaaggatgtgcctcttaccatcaaggatcctgctgtgggcttcctggagacaatctcacctggctactccattcacacctacctgtggcgtcgccagtgatggagcagatactcaaggaggcactgggctcagcctgggcattaaagggacagagtcagctcacacgctgtctgtgactaaagagggcacagcagggccagtgtgagcttacagcgacgtaagcccaggggcaatggtttgggtgactcactttcccctctaggtggtgccaggggctggaggcccctagaaaaagatcagtaagccccagtgtccccccagcccccatgcttatgtgaacatgcgctgtgtgctgcttgctttggaaactgggcctgggtccaggcctagggtgagctcactgtccgtacaaacacaagatcagggctgagggtaaggaaaagaagagactaggaaagctgggcccaaaactggagactgtttgtctttcctggagatgcagaactgggcccgtggagcagcagtgtcagcatcagggcggaagccttaaagcagcagcgggtgtgcccaggcacccagatgattcctatggcaccagccaggaaaaatggcagctcttaaaggagaaaatgtttgagcccaaaaaaaaataaaaagtcacgacgacgagcacgcacacaaggaggcatctacaaactacacagagacaaaggcggggggcgcgataatccggggcgaccaccccacctttgtagcgcgccaaagagagtttaataagcgggcgacaacgggcgcacagctcgcttgtgggcacctcgggggcagggcccacaactccggataactggtcggcgcccgcggctagtctatcataggcctgacggcgctacgggtatcgtcctacaacc

SEQ ID NO: 295771 - DNA, 1879 bp, Homo sapiens
atcagccgctatgagagtacactgcagaggaagataccaagctcaagatacccctgattcaccgagccctgcagttggcccagcgtcccgtttcactccttgccagcccctggacatcacccacttggctcaagaccaatggagcggtgaatgggaaggggtcactcaagggacagcccggagacatctaccaccagacctgggccagatactttgtgaagttcctggatgcctatgctgagcacaagttacagttctgggcagtgacagctgaaaatgagccttctgctgggctgttgagtggataccccttccagtgcctgggcttcacccctgaacatcagcgagacttcattgcccgtgacctaggtcctaccctcgccaacagtactcaccacaatgtccgcctactcatgctggatgaccaacgcttgctgctgccccactgggcaaaggtggtactgacagacccagaagcagctaaatatgttcatggcattgctgtacattggtacctggactttctggctccagccaaagccaccctaggggagacacaccgcctgttccccaacaccatgctctttgcctcagaggcctgtgtgggctccaagttctgggagcagagtgtgcggctaggctcctgggatcgagggatgcagtacagccacagcatcatcacgaacctcctgtaccatgtggtcggctggaccgactggaaccttgccctgaaccccgaaggaggacccaattgggtgcgtaactttgtcgacagtcccatcattgtagacatcaccaaggacacgttttacaaacagcccatgttctaccaccttggccacttcagcaagttcattcctgagggctcccagagagtggggctggttgccagtcagaagaacgacctggacgcagtggcactgatgcatcccgatggctctgctgttgtggtcgtgctaaaccgctcctctaaggatgtgcctcttaccatcaaggatcctgctgtgggcttcctggagacaatctcacctggctactccattcacacctacctgtggcgtcgccagtgatggagcagatactcaaggaggcactgggctcagcctgggcattaaagggacagagtcagctcacacgctgtctgtgactaaagagggcacagcagggccagtgtgagcttacagcgacgtaagcccaggggcaatggtttgggtgactcactttcccctctaggtggtgccaggggctggaggcccctagaaaaagatcagtaagccccagtgtccccccagcccccatgcttatgtgaacatgcgctgtgtgctgcttgctttggaaactgggcctgggtccaggcctagggtgagctcactgtccgtacaaacacaagatcagggctgagggtaaggaaaagaagagactaggaaagctgggcccaaaactggagactgtttgtctttcctggagatgcagaactgggcccgtggagcagcagtgtcagcatcagggcggaagccttaaagcagcagcgggtgtgcccaggcacccagatgattcctatggcaccagccaggaaaaatggcagctcttaaaggagaaaatgtttgagcccaaaaaaaaataaaaagtcacgacgacgagcacgcacacaaggaggcatctacaaactacacagagacaaaggcggggggcgcgataatccggggcgaccaccccacctttgtagcgcgccaaagagagtttaataagcgggcgacaacgggcgcacagctcgcttgtgggcacctcgggggcagggcccacaactccggataactggtcggcgcccgcggctagtctatcataggcctgacggcgctacgggtatcgtcctacaacc

SEQ ID NO: 295772 - DNA, 2285 bp, Homo sapiens
ccattaggcctatgaattataagatacagtcactttaaaatccactggaaggctgaagagtgagttaaacctcttataatgaatatacagtgaaaccagtagaggcattttatttagggttcctacaagaaagtgcttaaatagcatcgacgcctacatgctacatcctgttcagtctctgcctctgtgatgcagttggccagcaaatatcctccaagtcatcatttgcatagtgctagggataaaatgaggagcaataccaaatgctatacctgcccttatgggtcttatagtccaacgggagaaaaagatattatacaaataatcacggaaaataaatagaaaactgcatccttgtttttgtttagtggatcctctatccttcagagactctggaacccctgtggtcttctcttcatctaatgaccctgaggggatggagttttcaagtccttccagagagaatgtcccaagccttcgggtagggtgccttcagccgctacaagagcagaagcagtgggcattggatggagctgagtacaggaccatacaggctaattgcaccggcacaggaatcggatataacatcatccgggtacccatggccagctgtgacttctccatccgcacctacacctatgcagacacccctgatgatttccagttgcacaacttcagcctcccagaggaagataccaagctcaagatacccctgattcaccgagccctgcagttggcccagcgtcccgtttcaacttcattgcccgtgacctaggtcctaccctcgccaacagtactcaccacaatgtccgcctactcatgctggatgaccaacgcttgctgctgccccactgggcaaaggtggtactgacagacccagaagcagctaaatatgttcatggcattgctgtacattggtacctggactttctggctccagccaaagccaccctaggggagacacaccgcctgttccccaacaccatgctctttgcctcagaggcctgtgtgggctccaagttctgggagcagagtgtgcggctaggctcctgggatcgagggatgcagtacagccacagcatcatcacgaacctcctgtaccatgtggtcggctggaccgactggaaccttgccctgaaccccgaaggaggacccaattgggtgcgtaactttgtcgacagtcccatcattgtagacatcaccaaggacacgttttacaaacagcccatgttctaccaccttggccacttcagcaagttcattcctgagggctcccagagagtggggctggttgccagtcagaagaacgacctggacgcagtggcactgatgcatcccgatggctctgctgttgtggtcgtgctaaaccgctcctctaaggatgtgcctcttaccatcaaggatcctgctgtgggcttcctggagacaatctcacctggctactccattcacacctacctgtggcgtcgccagtgatggagcagatactcaaggaggcactgggctcagcctgggcattaaagggacagagtcagctcacacgctgtctgtgactaaagagggcacagcagggccagtgtgagcttacagcgacgtaagcccaggggcaatggtttgggtgactcactttcccctctaggtggtgccaggggctggaggcccctagaaaaagatcagtaagccccagtgtccccccagcccccatgcttatgtgaacatgcgctgtgtgctgcttgctttggaaactgggcctgggtccaggcctagggtgagctcactgtccgtacaaacacaagatcagggctgagggtaaggaaaagaagagactaggaaagctgggcccaaaactggagactgtttgtctttcctggagatgcagaactgggcccgtggagcagcagtgtcagcatcagggcggaagccttaaagcagcagcgggtgtgcccaggcacccagatgattcctatggcaccagccaggaaaaatggcagctcttaaaggagaaaatgtttgagcccaaaaaaaaataaaaagtcacgacgacgagcacgcacacaaggaggcatctacaaactacacagagacaaaggcggggggcgcgataatccggggcgaccaccccacctttgtagcgcgccaaagagagtttaataagcgggcgacaacgggcgcacagctcgcttgtgggcacctcgggggcagggcccacaactccggataactggtcggcgcccgcggctagtctatcataggcctgacggcgctacgggtatcgtcctacaacc

SEQ ID NO: 295773 - DNA, 1791 bp, Homo sapiens
catgtatgtatgtgtatatacatatatatgtgtttatatgtatatatatatacacacacacacatacatacacacacatacacacacaaattagctgggtgtggcacccgtgtagtcccagctactcaggaggctaatgtgggaggatcagttgaccctaggaagtcaaggctgcagtgagtcgtgattgcgccactgtactccagcccgagtgacagagtgacatcctgtctcaaaaacaaaaaaaaatctccccaaacctctctagttgcattcttcccgtcacccaactccaggattcctacaacaggaactagaagttccagaagcctgtgtgcaaggtccaggatcagttgctcttcctttgcaggtactgacagacccagaagcagctaaatatgttcatggcattgctgtacattggtacctggactttctggctccagccaaagccaccctaggggagacacaccgcctgttccccaacaccatgctctttgcctcagaggcctgtgtgggctccaagttctgggagcagagtgtgcggctaggctcctgggatcgagggatgcagtacagccacagcatcatcacgaacctcctgtaccatgtggtcggctggaccgactggaaccttgccctgaaccccgaaggaggacccaattgggtgcgtaactttgtcgacagtcccatcattgtagacatcaccaaggacacgttttacaaacagcccatgttctaccaccttggccacttcagcaagttcattcctgagggctcccagagagtggggctggttgccagtcagaagaacgacctggacgcagtggcactgatgcatcccgatggctctgctgttgtggtcgtgctaaaccgctcctctaaggatgtgcctcttaccatcaaggatcctgctgtgggcttcctggagacaatctcacctggctactccattcacacctacctgtggcgtcgccagtgatggagcagatactcaaggaggcactgggctcagcctgggcattaaagggacagagtcagctcacacgctgtctgtgactaaagagggcacagcagggccagtgtgagcttacagcgacgtaagcccaggggcaatggtttgggtgactcactttcccctctaggtggtgccaggggctggaggcccctagaaaaagatcagtaagccccagtgtccccccagcccccatgcttatgtgaacatgcgctgtgtgctgcttgctttggaaactgggcctgggtccaggcctagggtgagctcactgtccgtacaaacacaagatcagggctgagggtaaggaaaagaagagactaggaaagctgggcccaaaactggagactgtttgtctttcctggagatgcagaactgggcccgtggagcagcagtgtcagcatcagggcggaagccttaaagcagcagcgggtgtgcccaggcacccagatgattcctatggcaccagccaggaaaaatggcagctcttaaaggagaaaatgtttgagcccaaaaaaaaataaaaagtcacgacgacgagcacgcacacaaggaggcatctacaaactacacagagacaaaggcggggggcgcgataatccggggcgaccaccccacctttgtagcgcgccaaagagagtttaataagcgggcgacaacgggcgcacagctcgcttgtgggcacctcgggggcagggcccacaactccggataactggtcggcgcccgcggctagtctatcataggcctgacggcgctacgggtatcgtcctacaacc

SEQ ID NO: 295774 - DNA, 2211 bp, Homo sapiens
ccacatcgggaagccggaattacttgcagggctaacctagtgcctatagctaaggcaggtacctgcatccttgtttttgtttagtggatcctctatccttcagagactctggaacccctgtggtcttctcttcatctaatgaccctgaggggatggagttttcaagtccttccagagaggaatgtcccaagcctttgagtagggtaagcatcatggctggcagcctcacaggattgcttctacttcaggcagtgtcgtgggcatcaggtgcccgcccctgcatccctaaaagcttcggctacagctcggtggtgtgtgtctgcaatgccacatactgtgactcctttgaccccccgacctttcctgcccttggtaccttcagccgctatgagagtacacgcagtgggcgacggatggagctgagtatggggcccatccaggctaatcacacgggcacaggcctgctactgaccctgcagccagaacagaagttccagaaagtgaagggatttggaggggccatgacagatgctgctgctctcaacatccttgccctgtcaccccctgcccaaaatttgctacttaaatcgtacttctctgaagaaggaatcggatataacatcatccgggtacccatggccagctgtgacttctccatccgcacctacacctatgcagacacccctgatgatttccagttgcacaacttcagcctcccagaggaagataccaagctcaagatacccctgattcaccgagccctgcagttggcccagcgtcccgtttcactccttgccagcccctggacatcacccacttggctcaagaccaatggagcggtgaatgggaaggggtcactcaagggacagcccggagacatctaccaccagacctgggccagatactttgtgaagttcctggatgcctatgctgagcacaagttacagttctgggcagtgacagctgaaaatgagccttctgctgggctgttgagtggataccccttccagtgcctgggcttcacccctgaacatcagcgagacttcattgcccgtgacctaggtcctaccctcgccaacagtactcaccacaatgtccgcctactcatgctggatgaccaacgcttgctgctgccccactgggcaaaggtggtactgacagacccagaagcagctaaatatgttcatggcattgctgtacattggtacctggactttctggctccagccaaagccaccctaggggagacacaccgcctgttccccaacaccatgctctttgcctcagaggcctgtgtgggctccaagttctgggagcagagtgtgcggctaggctcctgggatcgagggatgcagtacagccacagcatcatcacgaacctcctgtaccatgtggtcggctggaccgactggaaccttgccctgaaccccgaaggaggacccaattgggtgcgtaactttgtcgacagtcccatcattgtagacatcaccaaggacacgttttacaaacagcccatgttctaccaccttggccacttcaggtgagtggagggcgggcacccccattccataccaggggctggaggcccctagaaaaagatcagtaagccccagtgtccccccagcccccatgcttatgtgaacatgcgctgtgtgctgcttgctttggaaactgggcctgggtccaggcctagggtgagctcactgtccgtacaaacacaagatcagggctgagggtaaggaaaagaagagactaggaaagctgggcccaaaactggagactgtttgtctttcctggagatgcagaactgggcccgtggagcagcagtgtcagcatcagggcggaagccttaaagcagcagcgggtgtgcccaggcacccagatgattcctatggcaccagccaggaaaaatggcagctcttaaaggagaaaatgtttgagcccaaaaaaaaataaaaagtcacgacgacgagcacgcacacaaggaggcatctacaaactacacagagacaaaggcggggggcgcgataatccggggcgaccaccccacctttgtagcgcgccaaagagagtttaataagcgggcgacaacgggcgcacagctcgcttgtgggcacctcgggggcagggcccacaactccggataactggtcggcgcccgcggctagtctatcataggcctgacggcgctacgggtatcgtcctacaacc

SEQ ID NO: 295775 - DNA, 1308 bp, Homo sapiens
  misc_feature (1)..(1): n is a, c, g, or t
ntctagaggatcccgtctacggttggatactagatccagggtggctggagagcagagtgtgcggctaggctcctgggatcgagggatgcagtacagccacagcatcatcacgaacctcctgtaccatgtggtcggctggaccgactggaaccttgccctgaaccccgaaggaggacccaattgggtgcgtaactttgtcgacagtcccatcattgtagacatcaccaaggacacgttttacaaacagcccatgttctaccaccttggccacttcagcaagttcattcctgagggctcccagagagtggggctggttgccagtcagaagaacgacctggacgcagtggcactgatgcatcccgatggctctgctgttgtggtcgtgctaaaccgctcctctaaggatgtgcctcttaccatcaaggatcctgctgtgggcttcctggagacaatctcacctggctactccattcacacctacctgtggcgtcgccagtgatggagcagatactcaaggaggcactgggctcagcctgggcattaaagggacagagtcagctcacacgctgtctgtgactaaagagggcacagcagggccagtgtgagcttacagcgacgtaagcccaggggcaatggtttgggtgactcactttcccctctaggtggtgccaggggctggaggcccctagaaaaagatcagtaagccccagtgtccccccagcccccatgcttatgtgaacatgcgctgtgtgctgcttgctttggaaactgggcctgggtccaggcctagggtgagctcactgtccgtacaaacacaagatcagggctgagggtaaggaaaagaagagactaggaaagctgggcccaaaactggagactgtttgtctttcctggagatgcagaactgggcccgtggagcagcagtgtcagcatcagggcggaagccttaaagcagcagcgggtgtgcccaggcacccagatgattcctatggcaccagccaggaaaaatggcagctcttaaaggagaaaatgtttgagcccaaaaaaaaataaaaagtcacgacgacgagcacgcacacaaggaggcatctacaaactacacagagacaaaggcggggggcgcgataatccggggcgaccaccccacctttgtagcgcgccaaagagagtttaataagcgggcgacaacgggcgcacagctcgcttgtgggcacctcgggggcagggcccacaactccggataactggtcggcgcccgcggctagtctatcataggcctgacggcgctacgggtatcgtcctacaacc

SEQ ID NO: 295776 - DNA, 1233 bp, Homo sapiens
tacctggaccctgtcagcagacaacagcatcatcacgaacctcctgtaccatgtggtcggctggaccgactggaaccttgccctgaaccccgaaggaggacccaattgggtgcgtaactttgtcgacagtcccatcattgtagacatcaccaaggacacgttttacaaacagcccatgttctaccaccttggccacttcagcaagttcattcctgagggctcccagagagtggggctggttgccagtcagaagaacgacctggacgcagtggcactgatgcatcccgatggctctgctgttgtggtcgtgctaaaccgctcctctaaggatgtgcctcttaccatcaaggatcctgctgtgggcttcctggagacaatctcacctggctactccattcacacctacctgtggcgtcgccagtgatggagcagatactcaaggaggcactgggctcagcctgggcattaaagggacagagtcagctcacacgctgtctgtgactaaagagggcacagcagggccagtgtgagcttacagcgacgtaagcccaggggcaatggtttgggtgactcactttcccctctaggtggtgccaggggctggaggcccctagaaaaagatcagtaagccccagtgtccccccagcccccatgcttatgtgaacatgcgctgtgtgctgcttgctttggaaactgggcctgggtccaggcctagggtgagctcactgtccgtacaaacacaagatcagggctgagggtaaggaaaagaagagactaggaaagctgggcccaaaactggagactgtttgtctttcctggagatgcagaactgggcccgtggagcagcagtgtcagcatcagggcggaagccttaaagcagcagcgggtgtgcccaggcacccagatgattcctatggcaccagccaggaaaaatggcagctcttaaaggagaaaatgtttgagcccaaaaaaaaataaaaagtcacgacgacgagcacgcacacaaggaggcatctacaaactacacagagacaaaggcggggggcgcgataatccggggcgaccaccccacctttgtagcgcgccaaagagagtttaataagcgggcgacaacgggcgcacagctcgcttgtgggcacctcgggggcagggcccacaactccggataactggtcggcgcccgcggctagtctatcataggcctgacggcgctacgggtatcgtcctacaacc

SEQ ID NO: 295777 - DNA, 1207 bp, Homo sapiens
ccacatcgggaagccggaattacttgcagggctaacctagtgcctatagctaaggcaggtacctgcatccttgtttttgtttagtggatcctctatccttcagagactctggaacccctgtggtcttctcttcatctaatgaccctgaggggatggagttttcaagtccttccagagaggaatgtcccaagcctttgagtagggtaagcatcatggctggcagcctcacaggattgcttctacttcaggcagtgtcgtgggcatcaggtgcccgcccctgcatccctaaaagcttcggctacagctcggtggtgtgtgtctgcaatgccacatactgtgactcctttgaccccccgacctttcctgcccttggtaccttcagccgctatgagagtacacgcagtgggcgacggatggagctgagtatggggcccatccaggctaatcacacgggcacaggcctgctactgaccctgcagccagaacagaagttccagaaagtgaagggatttggaggggccatgacagatgctgctgctctcaacatccttgccctgtcaccccctgcccaaaatttgctacttaaatcgtacttctctgaagaaggaatcggatataacatcatccgggtacccatggccagctgtgacttctccatccgcacctacacctatgcagacacccctgatgatttccagttgcacaacttcagcctcccagaggaagataccaagctcaagatacccctgattcaccgagccctgcagttggcccagcgtcccgtttcactccttgccagcccctggacatcacccacttggctcaagaccaatggagcggtgaatgggaaggggtcactcaagggacagcccggagacatctaccaccagacctgggccagatactttgtgaagttcctggatgcctatgctgagcacaagttacagttctgggcagtgacagctgaaaatgagccttctgctgggctgttgagtggataccccttccagtgcctgggcttcacccctgaacatcagcgagacttcattgcccgtgacctaggtcctaccctcgccaacagtactcaccacaatgtccgcctactcatgctggatgaccaacgcttgctgctgccccactgggcaaaggtggtatgacagacccagaagcagcaaagaccccaaagggagatcctctagatcaccag

SEQ ID NO: 295778 - DNA, 1683 bp, Homo sapiens
ccacatcgggaagccggaattacttgcagggctaacctagtgcctatagctaaggcaggtacctgcatccttgtttttgtttagtggatcctctatccttcagagactctggaacccctgtggtcttctcttcatctaatgaccctgaggggatggagttttcaagtccttccagagaggaatgtcccaagcctttgagtagggtaagcatcatggctggcagcctcacaggattgcttctacttcaggcagtgtcgtgggcatcaggtgcccgcccctgcatccctaaaagcttcggctacagctcggtggtgtgtgtctgcaatgccacatactgtgactcctttgaccccccgacctttcctgcccttggtaccttcagccgctatgagagtacacgcagtgggcgacggatggagctgagtatggggcccatccaggctaatcacacgggcacaggcctgctactgaccctgcagccagaacagaagttccagaaagtgaagggatttggaggggccatgacagatgctgctgctctcaacatccttgccctgtcaccccctgcccaaaatttgctacttaaatcgtacttctctgaagaaggtgaggaggaaggggacaagatgacatagagccattgaaacttttcgtttttcttttctttttttaaaatttttttgaggcagaatctcactctgcccattctgtcggcgagacaggagtgcagtggtgtgatctcccctcacagcaacctctgcctcccaggctatagtgattctcctgcctcagcctcctgagtagctggaattataggcgtgcgccactaccacctggctactccattcacacctacctgtggcgtcgccagtgatggagcagatactcaaggaggcactgggctcagcctgggcattaaagggacagagtcagctcacacgctgtctgtgactaaagagggcacagcagggccagtgtgagcttacagcgacgtaagcccaggggcaatggtttgggtgactcactttcccctctaggtggtgccaggggctggaggcccctagaaaaagatcagtaagccccagtgtccccccagcccccatgcttatgtgaacatgcgctgtgtgctgcttgctttggaaactgggcctgggtccaggcctagggtgagctcactgtccgtacaaacacaagatcagggctgagggtaaggaaaagaagagactaggaaagctgggcccaaaactggagactgtttgtctttcctggagatgcagaactgggcccgtggagcagcagtgtcagcatcagggcggaagccttaaagcagcagcgggtgtgcccaggcacccagatgattcctatggcaccagccaggaaaaatggcagctcttaaaggagaaaatgtttgagcccaaaaaaaaataaaaagtcacgacgacgagcacgcacacaaggaggcatctacaaactacacagagacaaaggcggggggcgcgataatccggggcgaccaccccacctttgtagcgcgccaaagagagtttaataagcgggcgacaacgggcgcacagctcgcttgtgggcacctcgggggcagggcccacaactccggataactggtcggcgcccgcggctagtctatcataggcctgacggcgctacgggtatcgtcctacaacc

SEQ ID NO: 295779 - DNA, 169 bp, Homo sapiens
acaaacagcccatgttctaccaccttggccacttcaggtgagtggagggcgggcacccccattccataccaggcctatcatctcctacatcggatggcttacatcactctacaccacgagggagcaggaaggtgttcagggtggaacctcggaagaggcacacccatcc

SEQ ID NO: 295780 - DNA, 3946 bp, Homo sapiens
gcgggggagggggcattgatcttcgatcgcgaagatggctgctggctgcctgctggccttgactctgacacttttccaatctttgctcatcggcccctcgtcggaggagccgttcccttcggccgtcactatcaaatcatgggtggataagatgcaagaagaccttgtcacactggcaaaaacagcaagtggagtcaatcagcttgttgatatttatgagaaatatcaagatttgtatactgtggaaccaaataatgcacgccagctggtagaaattgcagccagggatattgagaaacttctgagcaacagatctaaagccctggtgagcctggcattggaagcggagaaagttcaagcagctcaccagtggagagaagattttgcaagcaatgaagttgtctactacaatgcaaaggatgatctcgatcctgagaaaaatgacagtgagccaggcagccagaggataaaacctgttttcattgaagatgctaattttggacgacaaatatcttatcagcacgcagcagtccatattcctactgacatctatgagggctcaacaattgtgttaaatgaactcaactggacaagtgccttagatgaagttttcaaaaagaatcgcgaggaagacccttcattattgtggcaggtttttggcagtgccactggcctagctcgatattatccagcttcaccatgggttgataatagtagaactccaaataagattgacctttatgatgtacgcagaagaccatggtacatccaaggagctgcatctcctaaagacatgcttattctggtggatgtgagtggaagtgttagtggattgacacttaaactgatccgaacatctgtctccgaaatgttagaaaccctctcagatgatgatttcgtgaatgtagcttcatttaacagcaatgctcaggatgtaagctgttttcagcaccttgtccaagcaaatgtaagaaataaaaaagtgttgaaagacgcggtgaataatatcacagccaaaggaattacagattataagaagggctttagttttgcttttgaacagctgcttaattataatgtttccagagcaaactgcaataagattattatgctattcacggatggaggagaagagagagcccaggagatatttaacaaatacaataaagataaaaaagtacgtgtattcaggttttcagttggtcaacacaattatgagagaggacctattcagtggatggcctgtgaaaacaaaggttattattatgaaattccttccattggtgcaataagaatcaatactcaggaatatttggatgttttgggaagaccaatggttttagcaggagacaaagctaagcaagtccaatggacaaatgtgtacctggatgcattggaactgggacttgtcattactggaactcttccggtcttcaacataaccggccaatttgaaaataagacaaacttaaagaaccagctgattcttggtgtgatgggagtagatgtgtctttggaagatattaaaagactgacaccacgttttacactgtgccccaatgggtattactttgcaatcgatcctaatggttatgttttattacatccaaatcttcagccaaagaaccccaaatctcaggagccagtaacattggatttccttgatgcagagttagagaatgatattaaagtggagattcgaaataagatgattgatggggaaagtggagaaaaaacattcagaactctggttaaatctcaagatgagagatatattgacaaaggaaacaggacatacacatggacacctgtcaatggcacagattacagtttggccttggtattaccaacctacagtttttactatataaaagccaaactagaagagacaataactcaggccagatcaaaaaagggcaaaatgaaggattcggaaaccctgaagccagataattttgaagaatctggctatacattcatagcaccaagagattactgcaatgacctgaaaatatcggataataacactgaatttcttttaaatttcaacgagtttattgatagaaaaactccaaacaacccatcatgtaacgcggatttgattaatagagtcttgcttgatgcaggctttacaaatgaacttgtccaaaattactggagtaagcagaaaaatatcaagggagtgaaagcacgatttgttgtgactgatggtgggattaccagagtttatcccaaagaggctggagaaaattggcaagaaaacccagagacatatgaggacagcttctataaaaggagcctagataatgataactatgttttcactgctccctactttaacaaaagtggacctggtgcctatgaatcgggcattatggtaagcaaagctgtagaaatatatattcaagggaaacttcttaaacctgcagttgttggaattaaaattgatgtaaattcctggatagagaatttcaccaaaacctcaatcagagatccgtgtgctggtccagtttgtgactgcaaaagaaacagtgacgtaatggattgtgtgattctggatgatggtgggtttcttctgatggcaaatcatgatgattatactaatcagattggaagattttttggagagattgatcccagcttgatgagacacctggttaatatatcagtttatgcttttaacaaatcttatgattatcagtcagtatgtgagcccggtgctgcaccaaaacaaggagcaggacatcgctcagcatatgtgccatcagtagcagacatattacaaattggctggtgggccactgctgctgcctggtctattctacagcagtttctcttgagtttgacctttccacgactccttgaggcagttgagatggaggatgatgacttcacggcctccctgtccaagcagagctgcattactgaacaaacccagtatttcttcgataacgacagtaaatcattcagtggtgtattagactgtggaaactgttccagaatctttcatggagaaaagcttatgaacaccaacttaatattcataatggttgagagcaaagggacatgtccatgtgacacacgactgctcatacaagcggagcagacttctgacggtccaaatccttgtgacatggttaagcaacctagataccgaaaagggcctgatgtctgctttgataacaatgtcttggaggattatactgactgtggtggtgtttctggattaaatccctccctgtggtatatcattggaatccagtttctactactttggctggtatctggcagcacacaccggctgttatgaccttctaaaaaccaaatctgcatagttaaactccagaccctgccaaaacatgagccctgccctcaattacagtaacgtagggtcagctataaaatcagacaaacattagctgggcctgttccatggcataacactaaggcgcagactcctaaggcacccactggctgcatgtcagggtgtcagatccttaaacgtgtgtgaatgctgcatcatctatgtgtaacatcaaagcaaaatcctatacgtgtcctctattggaaaatttgggagtttgttgttgcattgttggtgattacatgtgaaagggttccccatacaattgttaatgaaccataagaaatgtcttgatattgacctggaattttgacttgctgcaattttactaagaaaatctctaaggggaaagaaattatttttgccttcactttttcttctgtgaaaagttaattcctgctttaagtagcaattattgaaatatatagagaaagagagaattaacattggtctaaattgttgaaatataaataatggctaattttctatgaaaaatttgccatgaataaaatgccttatgaagaacggcttctttgccaaaaataaaacacaattgatgaccaattcaattttgatggggta

SEQ ID NO: 295781 - DNA, 1357 bp, Homo sapiens
cattctccatttcctacatcgccgaacgactagaacacaaaacccccttccgaccatcctgggaccacagtatcaaatcatgggtggataagatgcaagaagaccttgtcacactggcaaaaacagcaagtggagtcaatcagcttgttgatatttatgagaaatatcaagatttgtatactgtggaaccaaataatgcacgccagctggtagaaattgcagccagggatattgagaaacttctgagcaacagatctaaagccctggtgcgcctggcattggaagcggagaaagttcaagcagctcaccagtggagagaagattttgcaagcaatgaagttgtctactacaatgcaaaggatgatctcgatcctgagaaaaatgacagtgagccaggcagccagaggataaaacctgttttcattgaagatgctaattttggacgacaaatatcttatcagcacgcagcagtccatattcctactgacatctatgagggctcaacaattgtgttaaatgaactcaactggacaagtgccttagatgaagttttcaaaaagaatcgcgaggaagacccttcattattgtggcaggtttttggcagtgccactggcctagctcgatattatccagcttcaccatgggttgataatagtagaactccaaataagattgacctttatgatgtacgcagaagaccatggtacatccaaggagctgcatctcctaaagacatgcttattctggtggatgtgagtggaagtgttagtggattgacacttaaactgatccgaacatctgtctccgaaatgttagaaaccctctcagatgatgatttcgtgaatgtagcttcatttaacagcaatgctcaggatgtaagctgttttcagcaccttgtccaagcaaatgtaagaaataaaaaagtgttgaaagacgcggtgaataatatcacagccaaaggaattacagattataagaagggctttagttttgcttttgaacagctgcttaattataatgtttccagagcaaactgcaataagattattatgctattcacggatggaggagaagagagagcccaggagatatttaacaaatacaataaagataaaaaagtgagtgtaattttataatatttaaattttaataatgatctaggtggtttttaaagagatagtgggtagtggtagtgaggggagaatttttgatttaaaacctgattgtgccaattataaagccatatgaatcatagattataaactaataggtgtattagagagctgttaagtataatatttatatcatattcacaagcaactcatgcctaatatgttaataaagtatatgtatgggt

SEQ ID NO: 295782 - DNA, 1448 bp, Homo sapiens
cattctccatttcctacatcgccgaacgactagaacacaaaacccccttccgaccatcctgggaccacagtatcaaatcatgggtggataagatgcaagaagaccttgtcacactggcaaaaacagcaagtggagtcaatcagcttgttgatatttatgagaaatatcaagatttgtatactgtggaaccaaataatgcacgccagctggtagaaattgcagccagggatattgagaaacttctgagcaacagatctaaagccctggtgcgcctggcattggaagcggagaaagttcaagcagctcaccagtggagagaagattttgcaagcaatgaagttgtctactacaatgcaaaggatgatctcgatcctgagaaaaatgacagtgagccaggcagccagaggataaaacctgttttcattgaagatgctaattttggacgacaaatatcttatcagcacgcagcagtccatattcctactgacatctatgagggctcaacaattgtgttaaatgaactcaactggacaagtgccttagatgaagttttcaaaaagaatcgcgaggaagacccttcattattgtggcaggtttttggcagtgccactggcctagctcgatattatccagcttcaccatgggttgataatagtagaactccaaataagattgacctttatgatgtacgcagaagaccatggtacatccaaggagctgcatctcctaaagacatgcttattctggtggatgtgagtggaagtgttagtggattgacacttaaactgatccgaacatctgtctccgaaatgttagaaaccctctcagatgatgatttcgtgaatgtagcttcatttaacagcaatgctcaggatgtaagctgttttcagcaccttgtccaagcaaatgtaagaaataaaaaagtgttgaaagacgcggtgaataatatcacagccaaaggaattacagattataagaagggctttagttttgcttttgaacagctgcttaattataatgtttccagagcaaactgcaataagattattatgctattcacggatggaggagaagagagagcccaggagatatttaacaaatacaataaagataaaaaagtacgtgtattcacgttttcagttggtcaacacaattatgacagaggacctattcagtggatggcctgtgaaaacaaaggttattattatgaaattccttccattggtgcaataagaatcaatactcaggaatatttggatgttttgggaagaccaatggttttagcaggagacaaagctaagcaagtccaatggacaaatgtgtacctggatgcattggtaagaggttgagctattcagtcaaagactgtcataacaaaagcacacagatgatttctacttctttctagatgatgtctctgttttccttttcattaaaccctccccaaa

SEQ ID NO: 295783 - DNA, 1069 bp, Homo sapiens
gaacgacaaaagtcaccacattcccagtgaaagaagatttggaaacgaggagttgtttcgcccaatccaagggatatctcgatcctgagaaaaatgacagtgagccaggcagccagaggataaaacctgttttcattgaagatgctaattttggacgacaaatatcttatcagcacgcagcagtccatattcctactgacatctatgagggctcaacaattgtgttaaatgaactcaactggacaagtgccttagatgaagttttcaaaaagaatcgcgaggaagacccttcattattgtggcaggtttttggcagtgccactggcctagctcgatattatccagcttcaccatgggttgataatagtagaactccaaataagattgacctttatgatgtacgcagaagaccatggtacatccaaggagctgcatctcctaaagacatgcttattctggtggatgtgagtggaagtgttagtggattgacacttaaactgatccgaacatctgtctccgaaatgttagaaaccctctcagatgatgatttcgtgaatgtagcttcatttaacagcaatgctcaggatgtaagctgttttcagcaccttgtccaagcaaatgtaagaaataaaaaagtgttgaaagacgcggtgaataatatcacagccaaaggaattacagattataagaagggctttagttttgcttttgaacagctgcttaattataatgtttccagagcaaactgcaataagattattatgctattcacggatggaggagaagagagagcccaggagatatttaacaaatacaataaagataaaaaagtgagtgtaattttataatatttaaattttaataatgatctaggtggtttttaaagagatagtgggtagtggtagtgaggggagaatttttgatttaaaacctgattgtgccaattataaagccatatgaatcatagattataaactaataggtgtattagagagctgttaagtataatatttatatcatattcacaagcaactcatgcctaatatgttaataaagtatatgtatgggt

SEQ ID NO: 295784 - DNA, 3866 bp, Homo sapiens
cattctccatttcctacatcgccgaacgactagaacacaaaacccccttccgaccatcctgggaccacagtatcaaatcatgggtggataagatgcaagaagaccttgtcacactggcaaaaacagcaagtggagtcaatcagcttgttgatatttatgagaaatatcaagatttgtatactgtggaaccaaataatgcacgccagctggtagaaattgcagccagggatattgagaaacttctgagcaacagatctaaagccctggtgagcctggcattggaagcggagaaagttcaagcagctcaccagtggagagaagattttgcaagcaatgaagttgtctactacaatgcaaaggatgatctcgatcctgagaaaaatgacagtgagccaggcagccagaggataaaacctgttttcattgaagatgctaattttggacgacaaatatcttatcagcacgcagcagtccatattcctactgacatctatgagggctcaacaattgtgttaaatgaactcaactggacaagtgccttagatgaagttttcaaaaagaatcgcgaggaagacccttcattattgtggcaggtttttggcagtgccactggcctagctcgatattatccagcttcaccatgggttgataatagtagaactccaaataagattgacctttatgatgtacgcagaagaccatggtacatccaaggagctgcatctcctaaagacatgcttattctggtggatgtgagtggaagtgttagtggattgacacttaaactgatccgaacatctgtctccgaaatgttagaaaccctctcagatgatgatttcgtgaatgtagcttcatttaacagcaatgctcaggatgtaagctgttttcagcaccttgtccaagcaaatgtaagaaataaaaaagtgttgaaagacgcggtgaataatatcacagccaaaggaattacagattataagaagggctttagttttgcttttgaacagctgcttaattataatgtttccagagcaaactgcaataagattattatgctattcacggatggaggagaagagagagcccaggagatatttaacaaatacaataaagataaaaaagtacgtgtattcaggttttcagttggtcaacacaattatgagagaggacctattcagtggatggcctgtgaaaacaaaggttattattatgaaattccttccattggtgcaataagaatcaatactcaggaatatttggatgttttgggaagaccaatggttttagcaggagacaaagctaagcaagtccaatggacaaatgtgtacctggatgcattggaactgggacttgtcattactggaactcttccggtcttcaacataaccggccaatttgaaaataagacaaacttaaagaaccagctgattcttggtgtgatgggagtagatgtgtctttggaagatattaaaagactgacaccacgttttacactgtgccccaatgggtattactttgcaatcgatcctaatggttatgttttattacatccaaatcttcagccaaagaaccccaaatctcaggagccagtaacattggatttccttgatgcagagttagagaatgatattaaagtggagattcgaaataagatgattgatggggaaagtggagaaaaaacattcagaactctggttaaatctcaagatgagagatatattgacaaaggaaacaggacatacacatggacacctgtcaatggcacagattacagtttggccttggtattaccaacctacagtttttactatataaaagccaaactagaagagacaataactcaggccagatattcggaaaccctgaagccagataattttgaagaatctggctatacattcatagcaccaagagattactgcaatgacctgaaaatatcggataataacactgaatttcttttaaatttcaacgagtttattgatagaaaaactccaaacaacccatcatgtaacgcggatttgattaatagagtcttgcttgatgcaggctttacaaatgaacttgtccaaaattactggagtaagcagaaaaatatcaagggagtgaaagcacgatttgttgtgactgatggtgggattaccagagtttatcccaaagaggctggagaaaattggcaagaaaacccagagacatatgaggacagcttctataaaaggagcctagataatgataactatgttttcactgctccctactttaacaaaagtggacctggtgcctatgaatcgggcattatggtaagcaaagctgtagaaatatatattcaagggaaacttcttaaacctgcagttgttggaattaaaattgatgtaaattcctggatagagaatttcaccaaaacctcaatcagagatccgtgtgctggtccagtttgtgactgcaaaagaaacagtgacgtaatggattgtgtgattctggatgatggtgggtttcttctgatggcaaatcatgatgattatactaatcagattggaagattttttggagagattgatcccagcttgatgagacacctggttaatatatcagtttatgcttttaacaaatcttatgattatcagtcagtatgtgagcccggtgctgcaccaaaacaaggagcaggacatcgctcagcatatgtgccatcagtagcagacatattacaaattggctggtgggccactgctgctgcctggtctattctacagcagtttctcttgagtttgacctttccacgactccttgaggcagttgagatggaggatgatgacttcacggcctccctgtccaagcagagctgcattactgaacaaacccagtatttcttcgataacgacagtaaatcattcagtggtgtattagactgtggaaactgttccagaatctttcatggagaaaagcttatgaacaccaacttaatattcataatggttgagagcaaagggacatgtccatgtgacacacgactgctcatacaagcggagcagacttctgacggtccaaatccttgtgacatggttaagcaacctagataccgaaaagggcctgatgtctgctttgataacaatgtcttggaggattatactgactgtggtggtgtttctggattaaatccctccctgtggtatatcattggaatccagtttctactactttggctggtatctggcagcacacaccggctgttatgaccttctaaaaaccaaatctgcatagttaaactccagaccctgccaaaacatgagccctgccctcaattacagtaacgtagggtcagctataaaatcagacaaacattagctgggcctgttccatggcataacactaaggcgcagactcctaaggcacccactggctgcatgtcagggtgtcagatccttaaacgtgtgtgaatgctgcatcatctatgtgtaacatcaaagcaaaatcctatacgtgtcctctattggaaaatttgggagtttgttgttgcattgttggtgattacatgtgaaagggttccccatacaattgttaatgaaccataagaaatgtcttgatattgacctggaattttgacttgctgcaattttactaagaaaatctctaaggggaaagaaattatttttgccttcactttttcttctgtgaaaagttaattcctgctttaagtagcaattattgaaatatatagagaaagagagaattaacattggtctaaattgttgaaatataaataatggctaattttctatgaaaaatttgccatgaataaaatgccttatgaagaacggcttctttgccaaaaataaaacacaattgatgaccaattcaattttgatggggta

SEQ ID NO: 295785 - DNA, 1275 bp, Homo sapiens
ggttaaaaccgaaaataaaaatgggctagacacaaaggactcggtgcttgtcccagccaggcgccctcggcgacgcgggcagctgggaggggaatgggcgcccggacccagctgggacccccgggtgcgactccacctacctagtccggcgccaggccgggtcgacagctccggcagcgccagcgccgcgccgtgtccagatgtcgcgtcagaggcgtgcagcggtttagtttaatttcgcttgttttccaaatctagaagaggagcggagcggcttttagttcaaaactgacattcagcctcctgattggcggatagagcaatgagatgacctcgctttcctttcttcctttttcatttttaaataatctagtttgaagaatggaagactttcgacgaggggagccaggaataaaataaggggaataggggagcggggacgcgagcagcaccagaatccgcgggagcgcggctgttcctggtcatgatgatgggcagcgcccgagtggcggagctgctgctgctccacggcgcggagcccaactgcgccgaccccgccactctcacccgacccgtgcacgacgctgcccgggagggcttcctggacacgctggtggtgctgcaccgggccggggcgcggctggacgtgcgcgatgcctggggccgtctgcccgtggacctggctgaggagctgggccatcgcgatgtcgcacggtacctgcgcgcggctgcggggggcaccagaggcagtaaccatgcccgcatagatgccgcggaaggtccctcagacatccccgattgaaagaaccagagaggctctgagaaacctccggaaacttagatcatcagtcaccgaaggtcctacagggccacaactgcccccgccacaacccaccccgctttcgtagttttcatttagaaaatagagcttttaaaaatgtcctgccttttaacgtagatatatgccttcccccactaccgtaaatgtccatttatatcattttttatatattcttataaaaatgtaaaaaagaaaaacaccgcttctgccttttcactgtgttggagttttctggagtgagcactcacgccctaagcgcacattcatgtgggcatttcttgcgagcctcgcagcctccggaagctgtcgacttcatgacaagcattttgtgaactagggaagctcaggggggttactggcttctcttgagtcacactgctagcaaatggcagaaccaaagctcaaataaaaataaaataattttcattcattca

SEQ ID NO: 295786 - DNA, 1272 bp, Homo sapiens
cctccctacgggcgcctccggcagcccttcccgcgtgcgcagggctcagagccgttccgagatcttggaggtccgggtgggagtgggggtggggtgggggtgggggtgaaggtggggggcgggcgcgctcagggaaggcgggtgcgcgcctgcggggcggagatgggcagggggcggtgcgtgggtcccagtctgcagttaagggggcaggagtggcgctgctcacctctggtgccaaagggcggcgcagcggctgccgagctcggccctggaggcggcgagaacatggtgcgcaggttcttggtgaccctccggattcggcgcgcgtgcggcccgccgcgagtgagggttttcgtggttcacatcccgcggctcacgggggagtgggcagcgccaggggcgcccgccgctgtggccctcgtgctgatgctactgaggagccagcgtctagggcagcagccgcttcctagaagaccaggtcatgatgatgggcagcgcccgagtggcggagctgctgctgctccacggcgcggagcccaactgcgccgaccccgccactctcacccgacccgtgcacgacgctgcccgggagggcttcctggacacgctggtggtgctgcaccgggccggggcgcggctggacgtgcgcgatgcctggggccgtctgcccgtggacctggctgaggagctgggccatcgcgatgtcgcacggtacctgcgcgcggctgcggggggcaccagaggcagtaaccatgcccgcatagatgccgcggaaggtccctcagacatccccgattgaaagaaccagagaggctctgagaaacctccggaaacttagatcatcagtcaccgaaggtcctacagggccacaactgcccccgccacaacccaccccgctttcgtagttttcatttagaaaatagagcttttaaaaatgtcctgccttttaacgtagatatatgccttcccccactaccgtaaatgtccatttatatcattttttatatattcttataaaaatgtaaaaaagaaaaacaccgcttctgccttttcactgtgttggagttttctggagtgagcactcacgccctaagcgcacattcatgtgggcatttcttgcgagcctcgcagcctccggaagctgtcgacttcatgacaagcattttgtgaactagggaagctcaggggggttactggcttctcttgagtcacactgctagcaaatggcagaaccaaagctcaaataaaaataaaataattttcattcattca

SEQ ID NO: 295787 - DNA, 1215 bp, Homo sapiens
cccaacctggggcgacttcaggggtgccacattcgctaagtgctcggagttaatagcacctcctccgagcactcgctcacggcgtccccttgcctggaaagataccgcggtccctccagaggatttgagggacagggtcggagggggctcttccgccagcaccggaggaagaaagaggaggggctggctggtcaccagagggtggggcggaccgcgtgcgctcggcggctgcggagagggggagagcaggcagcgggcggcggggagcagcatggagccggcggcggggagcagcatggagccttcggctgactggctggccacggccgcggcccggggtcgggtagaggaggtgcgggcgctgctggaggcgggggcgctgcccaacgcaccgaatagttacggtcggaggccgatccaggtcatgatgatgggcagcgcccgagtggcggagctgctgctgctccacggcgcggagcccaactgcgccgaccccgccactctcacccgacccgtgcacgacgctgcccgggagggcttcctggacacgctggtggtgctgcaccgggccggggcgcggctggacgtgcgcgatgcctggggccgtctgcccgtggacctggctgaggagctgggccatcgcgatgtcgcacggtacctgcgcgcggctgcggggggcaccagaggcagtaaccatgcccgcatagatgccgcggaaggtccctcagacatccccgattgaaagaaccagagaggctctgagaaacctccggaaacttagatcatcagtcaccgaaggtcctacagggccacaactgcccccgccacaacccaccccgctttcgtagttttcatttagaaaatagagcttttaaaaatgtcctgccttttaacgtagatatatgccttcccccactaccgtaaatgtccatttatatcattttttatatattcttataaaaatgtaaaaaagaaaaacaccgcttctgccttttcactgtgttggagttttctggagtgagcactcacgccctaagcgcacattcatgtgggcatttcttgcgagcctcgcagcctccggaagctgtcgacttcatgacaagcattttgtgaactagggaagctcaggggggttactggcttctcttgagtcacactgctagcaaatggcagaaccaaagctcaaataaaaataaaataattttcattcattca

SEQ ID NO: 295788 - DNA, 1170 bp, Homo sapiens
cctccctacgggcgcctccggcagcccttcccgcgtgcgcagggctcagagccgttccgagatcttggaggtccgggtgggagtgggggtggggtgggggtgggggtgaaggtggggggcgggcgcgctcagggaaggcgggtgcgcgcctgcggggcggagatgggcagggggcggtgcgtgggtcccagtctgcagttaagggggcaggagtggcgctgctcacctctggtgccaaagggcggcgcagcggctgccgagctcggccctggaggcggcgagaacatggtgcgcaggttcttggtgaccctccggattcggcgcgcgtgcggcccgccgcgagtgagggttttcgtggttcacatcccgcggctcacgggggagtgggcagcgccaggggcgcccgccgctgtggccctcgtgctgatgctactgaggagccagcgtctagggcagcagccgcttcctagaagaccaggtcatgatgatgggcagcgcccgagtggcggagctgctgctgctccacggcgcggagcccaactgcgccgaccccgccactctcacccgacccgtgcacgacgctgcccgggagggcttcctggacacgctggtggtgctgcaccgggccggggcgcggctggacgtgcgcgatgcctggggccgtctgcccgtggacctggctgaggagctgggccatcgcgatgtcgcacggtacctgcgcgcggctgcggggggcaccagaggcagtaaccatgcccgcatagatgccgcggaaggtccctcagacatccccgattgaaagaaccagagaggctctgagaaacctccggaaacttagatcatcagtcaccgaaggtcctacagggccacaactgcccccgccacaacccaccccgctttcgtagttttcatttagaaaatagagcttttaaaaatgtcctgccttttaacgtagatatatgccttcccccactaccgtaaatgtccatttatatcattttttatatattcttataaaaatgtaaaacaagaggttacaaggacacagcgacaaaaaaaaacagcaacatcaacacagaagcaaaacgaaggagcgcgcaccaggaaataccgcagaggcacacaacaaacagacagacgcacgaacttgtataaacgagagcagacaag

SEQ ID NO: 295789 - DNA, 1192 bp, Homo sapiens
cccaacctggggcgacttcaggggtgccacattcgctaagtgctcggagttaatagcacctcctccgagcactcgctcacggcgtccccttgcctggaaagataccgcggtccctccagaggatttgagggacagggtcggagggggctcttccgccagcaccggaggaagaaagaggaggggctggctggtcaccagagggtggggcggaccgcgtgcgctcggcggctgcggagagggggagcagcatggagccggcggcggggagcagcatggagccttcggctgactggctggccacggccgcggcccggggtcgggtagaggaggtgcgggcgctgctggaggcgggggcgctgcccaacgcaccgaatagttacggtcggaggccgatccaggtcatgatgatgggcagcgcccgagtggcggagctgctgctgctccacggcgcggagcccaactgcgccgaccccgccactctcacccgacccgtgcacgacgctgcccgggagggcttcctggacacgctggtggtgctgcaccgggccggggcgcggctggacgtgcgcgatgcctggggccgtctgcccgtggacctggctgaggagctgggccatcgcgatgtcgcacggtacctgcgcgcggctgcggggggcaccagaggcagtaaccatgcccgcatagatgccgcggaaggtccctcagacatccccgattgaaagaaccagagaggctctgagaaacctccggaaacttagatcatcagtcaccgaaggtcctacagggccacaactgcccccgccacaacccaccccgctttcgtagttttcatttagaaaatagagcttttaaaaatgtcctgccttttaacgtagatatatgccttcccccactaccgtaaatgtccatttatatcattttttatatattcttataaaaatgtaaaaaagaaaaacaccgcttctgccttttcactgtgttggagttttctggagtgagcactcacgccctaagcgcacattcatgtgggcatttcttgcgagcctcgcagcctccggaagctgtcgacttcatgacaagcattttgtgaactagggaagctcaggggggttactggcttctcttgagtcacactgctagcaaatggcagaaccaaagctcaaataaaaataaaataattttcattcattca

SEQ ID NO: 295790 - DNA, 1489 bp, Homo sapiens
  misc_feature (431)..(431): n is a, c, g, or t
  misc_feature (605)..(605): n is a, c, g, or t
cccaacctggggcgacttcaggggtgccacattcgctaagtgctcggagttaatagcacctcctccgagcactcgctcacggcgtccccttgcctggaaagataccgcggtccctccagaggatttgagggacagggtcggagggggctcttccgccagcaccggaggaagaaagaggaggggctggctggtcaccagagggtggggcggaccgcgtgcgctcggcggctgcggagagggggagagcaggcagcgggcggcggggagcagcatggagccggcggcggggagcagcatggagccttcggctgactggctggccacggccgcggcccggggtcgggtagaggaggtgcgggcgctgctggaggcgggggcgctgcccaacgcaccgaatagttacggtcggaggccgatccaggtgggtaganggtctgcagcgggagcaggggatggcgggcgactctggaggacgaagtttgcaggggaattggaatcaggtagcgcttcgattctccggaaaaaggggaggcttcctggggagttttcagaaggggtttgtaatcacagacctcctcctggcgacgccctgggggcttgggaanccaaggaagaggaatgaggagccacgcgcgtacagatctctcgaatgctgagaagatctgaaggggggaacatatttgtattagatggaagtcatgatgatgggcagcgcccgagtggcggagctgctgctgctccacggcgcggagcccaactgcgccgaccccgccactctcacccgacccgtgcacgacgctgcccgggagggcttcctggacacgctggtggtgctgcaccgggccggggcgcggctggacgtgcgcgatgcctggggccgtctgcccgtggacctggctgaggagctgggccatcgcgatgtcgcacggtacctgcgcgcggctgcggggggcaccagaggcagtaaccatgcccgcatagatgccgcggaaggtccctcagacatccccgattgaaagaaccagagaggctctgagaaacctccggaaacttagatcatcagtcaccgaaggtcctacagggccacaactgcccccgccacaacccaccccgctttcgtagttttcatttagaaaatagagcttttaaaaatgtcctgccttttaacgtagatatatgccttcccccactaccgtaaatgtccatttatatcattttttatatattcttataaaaatgtaaaaaagaaaaacaccgcttctgccttttcactgtgttggagttttctggagtgagcactcacgccctaagcgcacattcatgtgggcatttcttgcgagcctcgcagcctccggaagctgtcgacttcatgacaagcattttgtgaactagggaagctcaggggggttactggcttctcttgagtcacactgctagcaaatggcagaaccaaagctcaaataaaaataaaataattttcattcattca

SEQ ID NO: 295791 - DNA, 1447 bp, Homo sapiens
ggttaaaaccgaaaataaaaatgggctagacacaaaggactcggtgcttgtcccagccaggcgccctcggcgacgcgggcagctgggaggggaatgggcgcccggacccagctgggacccccgggtgcgactccacctacctagtccggcgccaggccgggtcgacagctccggcagcgccagcgccgcgccgtgtccagatgtcgcgtcagaggcgtgcagcggtttagtttaatttcgcttgttttccaaatctagaagaggagcggagcggcttttagttcaaaactgacattcagcctcctgattggcggatagagcaatgagatgacctcgctttcctttcttcctttttcatttttaaataatctagtttgaagaatggaagactttcgacgaggggagccaggaataaaataaggggaataggggagcggggacgcgagcagcaccagaatccgcgggagcgcggctgttcctgcccaggctaggaggaggaggagataaccgccggtggaggcttccccattcgggttacaacgacttagacatgtggttctcgcagtaccattgaacctggacctcccttcacacagcccctcaatcgtgggaaactgaggcgaacagagcttctaaacccacctcagaagtcagtcatgatgatgggcagcgcccgagtggcggagctgctgctgctccacggcgcggagcccaactgcgccgaccccgccactctcacccgacccgtgcacgacgctgcccgggagggcttcctggacacgctggtggtgctgcaccgggccggggcgcggctggacgtgcgcgatgcctggggccgtctgcccgtggacctggctgaggagctgggccatcgcgatgtcgcacggtacctgcgcgcggctgcggggggcaccagaggcagtaaccatgcccgcatagatgccgcggaaggtccctcagacatccccgattgaaagaaccagagaggctctgagaaacctccggaaacttagatcatcagtcaccgaaggtcctacagggccacaactgcccccgccacaacccaccccgctttcgtagttttcatttagaaaatagagcttttaaaaatgtcctgccttttaacgtagatatatgccttcccccactaccgtaaatgtccatttatatcattttttatatattcttataaaaatgtaaaaaagaaaaacaccgcttctgccttttcactgtgttggagttttctggagtgagcactcacgccctaagcgcacattcatgtgggcatttcttgcgagcctcgcagcctccggaagctgtcgacttcatgacaagcattttgtgaactagggaagctcaggggggttactggcttctcttgagtcacactgctagcaaatggcagaaccaaagctcaaataaaaataaaataattttcattcattca

SEQ ID NO: 295792 - DNA, 918 bp, Homo sapiens
aggggtaattagacacctggggcttgtgtgggggtctgcttggcggtgagggggctctacacaagcttcctttccgtcatgccggcccccaccctggctctgaccattctgttctctctggcaggtcatgatgatgggcagcgcccgagtggcggagctgctgctgctccacggcgcggagcccaactgcgccgaccccgccactctcacccgacccgtgcacgacgctgcccgggagggcttcctggacacgctggtggtgctgcaccgggccggggcgcggctggacgtgcgcgatgcctggggccgtctgcccgtggacctggctgaggagctgggccatcgcgatgtcgcacggtacctgcgcgcggctgcggggggcaccagaggcagtaaccatgcccgcatagatgccgcggaaggtccctcagacatccccgattgaaagaaccagagaggctctgagaaacctccggaaacttagatcatcagtcaccgaaggtcctacagggccacaactgcccccgccacaacccaccccgctttcgtagttttcatttagaaaatagagcttttaaaaatgtcctgccttttaacgtagatatatgccttcccccactaccgtaaatgtccatttatatcattttttatatattcttataaaaatgtaaaaaagaaaaacaccgcttctgccttttcactgtgttggagttttctggagtgagcactcacgccctaagcgcacattcatgtgggcatttcttgcgagcctcgcagcctccggaagctgtcgacttcatgacaagcattttgtgaactagggaagctcaggggggttactggcttctcttgagtcacactgctagcaaatggcagaaccaaagctcaaataaaaataaaataattttcattcattca

SEQ ID NO: 295793 - DNA, 1428 bp, Homo sapiens
catcccccctcctcctcctaaagtactgggattacagtcccaagctatcttgcccgacctgggaaacagacgttaaggaagataacaatctattttcagagagcgagtttataaaaccaatgcaatgggtaaatatgaagtgtgaataggaggagaagctaaagagtggtcggagaatctaatgcaagctacgggagaaagaaactcaagtgcaaatgctgcctcaggaataaacgtaaaaagagactttcaagtgcaaatgctccctcaggaataaaataatcttgagactctcaagtgtaaatgctgcctcgggagaaccgaacggcgagctggagcccatacgcaacgagattagagaggaaggcagaagccagagcacatgaataaatgagcatccattttgtttcagaaatgatcggaaaccatttgtgggtttgtagaagcaggcatgcgtagggaagctacgggattccgccgaggagcgccagagcctgaggcgccctttggttatcgcaagctggctggctcactccgcaccaggtgcaaaagatgcctggggatgcgggaagggaaaggccacatcttcacgccttcgcgcctggcattgtgagcaaccactgagactcattatataacactcgttttcttcttgcaaccctgcgggccgcgcggtcgcgctttctctgccctccgccgggtggacctggagcgcttgagcggtcggcgcgcctggagcagccaggcgggcagtggactagctgctggaccagggaggtgtgggagagcggtggcggcgggtacatgcacgtgaagccattgcgagaactttatccataagtatttcaatgccggtagggacggcaagagaggagggcgggatgtgccacacatctttgacctcaggtttctaacgcctgttttctttctgccctctgcagacatccccgattgaaagaaccagagaggctctgagaaacctccggaaacttagatcatcagtcaccgaaggtcctacagggccacaactgcccccgccacaacccaccccgctttcgtagttttcatttagaaaatagagcttttaaaaatgtcctgccttttaacgtagatatatgccttcccccactaccgtaaatgtccatttatatcattttttatatattcttataaaaatgtaaaaaagaaaaacaccgcttctgccttttcactgtgttggagttttctggagtgagcactcacgccctaagcgcacattcatgtgggcatttcttgcgagcctcgcagcctccggaagctgtcgacttcatgacaagcattttgtgaactagggaagctcaggggggttactggcttctcttgagtcacactgctagcaaatggcagaaccaaagctcaaataaaaataaaataattttcattcattca

SEQ ID NO: 295794 - DNA, 1141 bp, Homo sapiens
cccaacctggggcgacttcaggggtgccacattcgctaagtgctcggagttaatagcacctcctccgagcactcgctcacggcgtccccttgcctggaaagataccgcggtccctccagaggatttgagggacagggtcggagggggctcttccgccagcaccggaggaagaaagaggaggggctggctggtcaccagagggtggggcggaccgcgtgcgctcggcggctgcggagagggggagagcaggcagcgggcggcggggagcagcatggagccggcggcggggagcagcatggagccttcggctgactggctggccacggccgcggcccggggtcgggtagaggaggtgcgggcgctgctggaggcgggggcgctgcccaacgcaccgaatagttacggtcggaggccgatccaggtcatgatgatgggcagcgcccgagtggcggagctgctgctgctccacggcgcggagcccaactgcgccgaccccgccactctcacccgacccgtgcacgacgctgcccgggagggcttcctggacacgctggtggtgctgcaccgggccggggcgcggctggacgtgcgcgatgcctggggccgtctgcccgtggacctggctgaggagctgggccatcgcgatgtcgcacgacatccccgattgaaagaaccagagaggctctgagaaacctccggaaacttagatcatcagtcaccgaaggtcctacagggccacaactgcccccgccacaacccaccccgctttcgtagttttcatttagaaaatagagcttttaaaaatgtcctgccttttaacgtagatatatgccttcccccactaccgtaaatgtccatttatatcattttttatatattcttataaaaatgtaaaaaagaaaaacaccgcttctgccttttcactgtgttggagttttctggagtgagcactcacgccctaagcgcacattcatgtgggcatttcttgcgagcctcgcagcctccggaagctgtcgacttcatgacaagcattttgtgaactagggaagctcaggggggttactggcttctcttgagtcacactgctagcaaatggcagaaccaaagctcaaataaaaataaaataattttcattcattca

SEQ ID NO: 295795 - DNA, 1010 bp, Homo sapiens
cctccctacgggcgcctccggcagcccttcccgcgtgcgcagggctcagagccgttccgagatcttggaggtccgggtgggagtgggggtggggtgggggtgggggtgaaggtggggggcgggcgcgctcagggaaggcgggtgcgcgcctgcggggcggagatgggcagggggcggtgcgtgggtcccagtctgcagttaagggggcaggagtggcgctgctcacctctggtgccaaagggcggcgcagcggctgccgagctcggccctggaggcggcgagaacatggtgcgcaggttcttggtgaccctccggattcggcgcgcgtgcggcccgccgcgagtgagggttttcgtggttcacatcccgcggctcacgggggagtgggcagcgccaggggcgcccgccgctgtggccctcgtgctgatgctactgaggagccagcgtctagggcagcagccgcttcctagaagaccaggtcatgatgatgggcagcgcccgagtggcggagctgctgctgctccacggcgcggagcccaactgcgccgaccccgccactctcacccgacccgtgcacgacgctgcccgggagggcttcctggacacgctggtggtgctgcaccgggccggggcgcggctggacgtgcgcgatgcctggggccgtctgcccgtggacctggctgaggagctgggccatcgcgatgtcgcacggtacctgcgcgcggctgcggggggcaccagaggcagtaaccatgcccgcatagatgccgcggaaggtccctcagttacagctagcatccaggtcccgggaggtgaagaaggagacttcggctccagttacagctagcatccgggtcccgatttagaaggagctgccaattacagcgcggttccagggctgagcaaaaagcctgaggagccaagtgggagagggagtaaaactactgaattgggccacaagcaaatgaataaactgaacgactcttaaccaaacctaatatatttaatca

SEQ ID NO: 295796 - DNA, 3760 bp, Homo sapiens
tatttctatagtgagcatatatcacttttgtaatcctcaaaaacacaaaatggaacatccttttgttcatggatggaacaatggaaccattatttaaaacataaaagtggaatccctgaatgacaaggacagcagctggcaggcatctgggggaaggaagatgacagctgagaaattaagttagaatgaggatatggaaagcatccacactaaggcgccgtcagccagacccgcaccaggcacatgtgaggccccatcctccaccgagtgttcactgtctcagtgagtctcttggcagtagggccccgtccctgtccgccaccgcacagtgacatactttctcccgccctctcccctaggtcagctggaactgggtccgcctggaaacccgggggccgggcccccagagggctttcgcagcctggccgcccgaagctcacctgccctttcactgaactccacccggaaggtgcccggggcttcgtgttcctgggtgctgaccgtgcactccccgccgcccgaggacttagagctctggaagtagctctccagcttccttcgtactcgggggccggacttgtacacccgcacgaggagcggggacggcgggcgcagaagtgggccaccatatctggaaactacagtctatgctttgaagcgcaaaagggaataaacatttaaagactcccccggggacctggaggatggacttttccatggtggccggagcagcagcttacaatgaaaaatcaggtaggattacctcgctctcactcttgtttcagaaagtctttgctcagatctttcctcagtggagaaaggggaatacagaagaatgtctcccctacaagtgctcagagactggtgctcttggagaaaactatagttggcaaattcccattaaccacaatgacttcaaaattttaaaaaataatgagcgtcagctgtgtgaagtcctccagaataagtttggctgtatctctaccctggtctctccagttcaggaaggcaacagcaaatctctgcaagtgttcagaaaaatgctgactcctaggatagagttatcagtctggaaagatgacctcaccacacatgctgttgatgctgtggtgaatgcagccaatgaagatcttctgcatgggggaggcctggccctggccctggtaaaagctggtggatttgaaatccaagaagagagcaaacagtttgttgccagatatggtaaagtgtcagctggtgagatagctgtcacgggagcagggaggcttccctgcaaacagatcatccatgctgttgggcctcggtggatggaatgggataaacagggatgtactggaaagctgcagagggccattgtaagtattctgaattatgtcatctataaaaatactcacattaagacagtagcaattccagccttgagctctgggatttttcagttccctctgaatttgtgtacaaagactattgtagagactatccgggttagtttgcaagggaagccaatgatgagtaatttgaaagaaattcacctggtgagcaatgaggaccctactgttgctgcctttaaagctgcttcagaattcatcctagggaagagtgagctgggacaagaaaccaccccttctttcaatgcaatggtcgtgaacaacctgaccctccagattgtccagggccacattgaatggcagacggcagatgtaattgttaattctgtaaacccacatgatattacagttggacctgtggcaaagtcaattctacaacaagcaggagttgaaatgaaatcggaatttcttgccacaaaggctaaacagtttcaacggtcccagttggtactggtcacaaaaggatttaacttgttctgtaaatatatataccatgtactgtggcattcagaatttcctaaacctcagatattaaaacatgcaatgaaggagtgtttggaaaaatgcattgagcaaaatataacttccatttcctttcctgcccttgggactggaaacatggaaataaagaaggaaacagcagcagagattttgtttgatgaagttttaacatttgccaaagaccatgtaaaacaccagttaactgtaaaatttgtgatctttccaacagatttggagatatataaggctttcagttctgaaatggcaaagaggtccaagatgctgagtttgaacaattacagtgtcccccagtcaaccagagaggagaaaagagaaaatgggcttgaagctagatctcctgccatcaatctgatgggattcaacgtggaagagatgtgtgaggcccacgcatggatccaaagaatcctgagtctccagaaccaccacatcattgagaataatcatattctgtaccttgggagaaaggaacatgacattttgtctcagcttcagaaaacttcaagtgtctccatcacagaaattatcagcccaggaaggacagagttagagattgaaggagcccgggctgacctcattgaggtggttatgaacattgaagatatgctttgtaaagtacaggaggaaatggcaaggaaaaaggagcgaggcctttggcgctcgttaggacagtggactattcagcaacaaaaaacccaagacgaaatgaaagaaaatatcatatttctgaaatgtcctgtgcctccaactcaagagcttctagatcaaaagaaacagtttgaaaaatgtggtttgcaggttctaaaggtggagaagatagacaatgaggtccttatggctgcctttcaaagaaagaagaaaatgatggaagaaaaactgcacaggcaacctgtgagccataggctgtttcagcaagtcccataccagttctgcaatgtggtatgcagagttggctttcaaagaatgtactcgacaccttgcgatccaaaatacggagctggcatatacttcaccaagaacctcaaaaacctggcagagaaggccaagaaaatctctgctgcagataagctgatctatgtgtttgaggctgaagtactcacaggcttcttctgccagggacatccgttaaatattgttcccccaccactgagtcctggagctatagatggtcatgacagtgtggttgacaatgtctccagccctgaaacctttgttatttttagtggcatgcaggctatacctcagtatttgtggacatgcacccaggaatatgtacagtcacaagattactcatcaggaccaatgagaccctttgcacagcatccttggaggggattcgcaagtggcagccctgttgattaatctctacatcattttaacagctggtatggccttaccttgggtgaactaaccaaataatgaccatcgatggctcaaagagtggcttgaatatatcccatgggttatctgtatggactgactgggttattgaaaggactagccacatactagcatcttagtgcctttatctgtctttatgtcttggggttggggtaggtagataccaaatgaaacactttcaggaccttccttcctcttgcagttgttctttaatctcctttactagaggagataaatattttgcatataatgaagaaatttttctagtatataacgcaggccttttattttctaaaatgatgatagtataaaaatgttaggataacagaatgattttagattttccagagaatattataaagtgctttaggtatgaaaataaatcatctttgtctgattaaaaaaaaaaaaaattatgtgtaaaatgaaacaatttgaagtggaaggacata

SEQ ID NO: 295797 - DNA, 3655 bp, Homo sapiens
tatttctatagtgagcatatatcacttttgtaatcctcaaaaacacaaaatggaacatccttttgttcatggatggaacaatggaaccattatttaaaacataaaagtggaatccctgaatgacaaggacagcagctggcaggcatctgggggaaggaagatgacagctgagaaattaagttagaatgaggatatggaaagcatccacactaaggcgccgtcagccagacccgcaccaggcacatgtgaggccccatcctccaccgagtgttcactgtctcagtgagtctcttggcagtagggccccgtccctgtccgccaccgcacagtgacatactttctcccgccctctcccctaggtcagctggaactgggtccgcctggaaacccgggggccgggcccccagagggctttcgcagcctggccgcccgaagctcacctgccctttcactgaactccacccggaaggtgcccggggcttcgtgttcctgggtgctgaccgtgcactccccgccgcccgaggacttagagctctggaagtagctctccagcttccttcgtactcgggggccggacttgtacacccgcacgaggagcggggacggcgggcgcagaagtgggccaccatatctggaaactacagtctatgctttgaagcgcaaaagggaataaacatttaaagactcccccggggacctggaggatggacttttccatggtggccggagcagcagcttacaatgaaaaatcagagactggtgctcttggagaaaactatagttggcaaattcccattaaccacaatgacttcaaaattttaaaaaataatgagcgtcagctgtgtgaagtcctccagaataagtttggctgtatctctaccctggtctctccagttcaggaaggcaacagcaaatctctgcaagtgttcagaaaaatgctgactcctaggatagagttatcagtctggaaagatgacctcaccacacatgctgttgatgctgtggtgaatgcagccaatgaagatcttctgcatgggggaggcctggccctggccctggtaaaagctggtggatttgaaatccaagaagagagcaaacagtttgttgccagatatggtaaagtgtcagctggtgagatagctgtcacgggagcagggaggcttccctgcaaacagatcatccatgctgttgggcctcggtggatggaatgggataaacagggatgtactggaaagctgcagagggccattgtaagtattctgaattatgtcatctataaaaatactcacattaagacagtagcaattccagccttgagctctgggatttttcagttccctctgaatttgtgtacaaagactattgtagagactatccgggttagtttgcaagggaagccaatgatgagtaatttgaaagaaattcacctggtgagcaatgaggaccctactgttgctgcctttaaagctgcttcagaattcatcctagggaagagtgagctgggacaagaaaccaccccttctttcaatgcaatggtcgtgaacaacctgaccctccagattgtccagggccacattgaatggcagacggcagatgtaattgttaattctgtaaacccacatgatattacagttggacctgtggcaaagtcaattctacaacaagcaggagttgaaatgaaatcggaatttcttgccacaaaggctaaacagtttcaacggtcccagttggtactggtcacaaaaggatttaacttgttctgtaaatatatataccatgtactgtggcattcagaatttcctaaacctcagatattaaaacatgcaatgaaggagtgtttggaaaaatgcattgagcaaaatataacttccatttcctttcctgcccttgggactggaaacatggaaataaagaaggaaacagcagcagagattttgtttgatgaagttttaacatttgccaaagaccatgtaaaacaccagttaactgtaaaatttgtgatctttccaacagatttggagatatataaggctttcagttctgaaatggcaaagaggtccaagatgctgagtttgaacaattacagtgtcccccagtcaaccagagaggagaaaagagaaaatgggcttgaagctagatctcctgccatcaatctgatgggattcaacgtggaagagatgtgtgaggcccacgcatggatccaaagaatcctgagtctccagaaccaccacatcattgagaataatcatattctgtaccttgggagaaaggaacatgacattttgtctcagcttcagaaaacttcaagtgtctccatcacagaaattatcagcccaggaaggacagagttagagattgaaggagcccgggctgacctcattgaggtggttatgaacattgaagatatgctttgtaaagtacaggaggaaatggcaaggaaaaaggagcgaggcctttggcgctcgttaggacagtggactattcagcaacaaaaaacccaagacgaaatgaaagaaaatatcatatttctgaaatgtcctgtgcctccaactcaagagcttctagatcaaaagaaacagtttgaaaaatgtggtttgcaggttctaaaggtggagaagatagacaatgaggtccttatggctgcctttcaaagaaagaagaaaatgatggaagaaaaactgcacaggcaacctgtgagccataggctgtttcagcaagtcccataccagttctgcaatgtggtatgcagagttggctttcaaagaatgtactcgacaccttgcgatccaaaatacggagctggcatatacttcaccaagaacctcaaaaacctggcagagaaggccaagaaaatctctgctgcagataagctgatctatgtgtttgaggctgaagtactcacaggcttcttctgccagggacatccgttaaatattgttcccccaccactgagtcctggagctatagatggtcatgacagtgtggttgacaatgtctccagccctgaaacctttgttatttttagtggcatgcaggctatacctcagtatttgtggacatgcacccaggaatatgtacagtcacaagattactcatcaggaccaatgagaccctttgcacagcatccttggaggggattcgcaagtggcagccctgttgattaatctctacatcattttaacagctggtatggccttaccttgggtgaactaaccaaataatgaccatcgatggctcaaagagtggcttgaatatatcccatgggttatctgtatggactgactgggttattgaaaggactagccacatactagcatcttagtgcctttatctgtctttatgtcttggggttggggtaggtagataccaaatgaaacactttcaggaccttccttcctcttgcagttgttctttaatctcctttactagaggagataaatattttgcatataatgaagaaatttttctagtatataacgcaggccttttattttctaaaatgatgatagtataaaaatgttaggataacagaatgattttagattttccagagaatattataaagtgctttaggtatgaaaataaatcatctttgtctgattaaaaaaaaaaaaaattatgtgtaaaatgaaacaatttgaagtggaaggacata

SEQ ID NO: 295798 - DNA, 629 bp, Homo sapiens
gccaatgtttgctggcacatttagtattttaagtgtttcgggcatgcagatttaaaaaaacacatgcttcctgccctcccaaacacagtgctttgagcaggatttccattgcattgtgtttactagggtgtattggttatcagtaagctgtagtcattccacttccattttttaagaaagccattctcatttttcacaggtggccggagcagcagcttacaatgaaaaatcaggtaggattacctcgctctcactcttgtttcagaaagtctttgctcagatctttcctcagtggagaaaggggaatacagaagaatgtctcccctacaagtgctcaggtgcgtgactgcagacccttgtggggacccccgcacatgcttcagagttggtgtggcaccgaccagcaggcatattctctcaaggcctacaccattcctctcctttgcccgtaaatgtgagactcttttaacgacagcctatggctgaattgaccagtttagttggcatttttttccctttctcagaggcattgtaacaacaatatcttagacaccatgaaatacagtgtcccaagctgggtcctccaggaagcagaatttgagatggaattaggagtgcaaaaaattcac

SEQ ID NO: 295799 - DNA, 3708 bp, Homo sapiens
tatttctatagtgagcatatatcacttttgtaatcctcaaaaacacaaaatggaacatccttttgttcatggatggaacaatggaaccattatttaaaacataaaagtggaatccctgaatgacaaggacagcagctggcaggcatctgggggaaggaagatgacagctgagaaattaagttagaatgaggatatggaaagcatccacactaaggcgccgtcagccagacccgcaccaggcacatgtgaggccccatcctccaccgagtgttcactgtctcagtgagtctcttggcagtagggccccgtccctgtccgccaccgcacagtgacatactttctcccgccctctcccctaggtcagctggaactgggtccgcctggaaacccgggggccgggcccccagagggctttcgcagcctggccgcccgaagctcacctgccctttcactgaactccacccggaaggtgcccggggcttcgtgttcctgggtgctgaccgtgcactccccgccgcccgaggacttagagctctggaagtagctctccagcttccttcgtactcgggggccggacttgtacacccgcacgaggagcggggacggcgggcgcagaagtgggccaccatatctggaaactacagtctatgctttgaagcgcaaaagggaataaacatttaaagactcccccggggacctggaggatggacttttccatggtggccggagcagcagcttacaatgaaaaatcaggtaggattacctcgctctcactcttgtttcagaaagtctttgctcagatctttcctcagtggagaaaggggaatacagaagaatgtctcccctacaagtgctcagagactggtgctcttggagaaaactatagttggcaaattcccattaaccacaatgacttcaaaattttaaaaaataatgagcgtcagctgtgtgaagtcctccagaataagtttggctgtatctctaccctggtctctccagttcaggaaggcaacagcaaatctctgcaagtgttcagaaaaatgctgactcctaggatagagttatcagtctggaaagatgacctcaccacacatgctgttgatgctgtggtgaatgcagccaatgaagatcttctgcatgggggaggcctggccctggccctggtaaaagctggtggatttgaaatccaagaagagagcaaacagtttgttgccagatatggtaaagtgtcagctggtgagatagctgtcacgggagcagggaggcttccctgcaaacagatcatccatgctgttgggcctcggtggatggaatgggataaacagggatgtactggaaagctgcagagggccattgtaagtattctgaattatgtcatctataaaaatactcacattaagacagtagcaattccagccttgagctctgggatttttcagttccctctgaatttgtgtacaaagactattgtagagactatccgggttagtttgcaagggaagccaatgatgagtaatttgaaagaaattcacctggtgagcaatgaggaccctactgttgctgcctttaaagctgcttcagaattcatcctagggaagagtgagctgggacaagaaaccaccccttctttcaatgcaatggtcgtgaacaacctgaccctccagattgtccagggccacattgaatggcagacggcagatgtaattgttaattctgtaaacccacatgatattacagttggacctgtggcaaagtcaattctacaacaagcaggagttgaaatgaaatcggaatttcttgccacaaaggctaaacagtttcaacggtcccagttggtactggtcacaaaaggatttaacttgttctgtaaatatatataccatgtactgtggcattcagaatttcctaaacctcagatattaaaacatgcaatgaaggagtgtttggaaaaatgcattgagcaaaatataacttccatttcctttcctgcccttgggactggaaacatggaaataaagaaggaaacagcagcagagattttgtttgatgaagttttaacatttgccaaagaccatgtaaaacaccagttaactgtaaaatttgtgatctttccaacagatttggagatatataaggctttcagttctgaaatggcaaagaggtccaagatgctgagtttgaacaattacagtgtcccccagtcaaccagagaggagaaaagagaaaatgggcttgaagctagatctcctgccatcaatctgatgggattcaacgtggaagagatgtgtgaggcccacgcatggatccaaagaatcctgagtctccagaaccaccacatcattgagaataatcatattctgtaccttgggagaaaggaacatgacattttgtctcagcttcagaaaacttcaagtgtctccatcacagaaattatcagcccaggaaggacagagttagagattgaaggagcccgggctgacctcattgaggtggttatgaacattgaagatatgctttgtaaagtacaggaggaaatggcaaggaaaaaggagcgaggcctttggcgctcgttaggacagtggactattcagcaacaaaaaacccaagacgaaatgaaagaaaatatcatatttctgaaatgtcctgtgcctccaactcaagagcttctagatcaaaagaaacagtttgaaaaatgtggtttgcaggttctaaaggtggagaagatagacaatgaggtccttatggctgcctttcaaagaaagaagaaaatgatggaagaaaaactgcacaggcaacctgtgagccataggctgtttcagcaagtcccataccagttctgcaatgtggtatgcagagttggctttcaaagaatgtactcgacaccttgcgatccaaaatacggagctggcatatacttcaccaagaacctcaaaaacctggcagagaaggccaagaaaatctctgctgcagataagctgatctatgtgtttgaggctgaagtactcacaggcttcttctgccagggacatccgttaaatattgttcccccaccactgagtcctggagctatagatggtcatgacagtgtggttgacaatgtctccagccctgaaacctttgttatttttagtggcatgcaggctatacctcagtatttgtggacatgcacccaggaatatgtacagtcacaagattactcatcaggaccaatgagaccctttgcacagcatccttggaggggattcgcaagtggcagccctgttgattaatctctacatcattttaacagctggtatggccttaccttgggtgaactaaccaaataatgaccatcgatggctcaaagagtggcttgaatatatcccatgggttatctgtatggactgactgggttattgaaaggactagccacatactagcatcttagtgcctttatctgtctttatgtcttggggttggggtaggtagataccaaatgaaacactttcaggaccttccttcctcttgcagttgttctttaatctcctttactagaggagataaatattttgcatataatgaagaaatttttctagtatataacgcaggccttttattttctaaaatgatgatagtataaaaatgttaggataacagaatgattttagattttccagagaatattataaagtgctttaggtatgaaaataaatcatctttgtctgatta

SEQ ID NO: 295800 - DNA, 3194 bp, Homo sapiens
gctccctgttcccggcagagccgcttccccctcctccctgtgctgtctgcaccgaggagagcggcctgccgggtgagtaggtccggtgcctctgggccctcggggtcccctctcctgcaggctcgaggtgggcggggagaagggggacgggcgcggacccgggtcccagggccaggcctcccttgtgagtagactatgcaaagaaaaagtgggccaccatatctggaaactacagtctatgctttgaagcgcaaaagggaataaacatttaaagactcccccggggacctggaggatggacttttccatggtggccggagcagcagcttacaatgaaaaatcagagactggtgctcttggagaaaactatagttggcaaattcccattaaccacaatgacttcaaaattttaaaaaataatgagcgtcagctgtgtgaagtcctccagaataagtttggctgtatctctaccctggtctctccagttcaggaaggcaacagcaaatctctgcaagtgttcagaaaaatgctgactcctaggatagagttatcagtctggaaagatgacctcaccacacatgctgttgatgctgtggtgaatgcagccaatgaagatcttctgcatgggggaggcctggccctggccctggtaaaagctggtggatttgaaatccaagaagagagcaaacagtttgttgccagatatggtaaagtgtcagctggtgagatagctgtcacgggagcagggaggcttccctgcaaacagatcatccatgctgttgggcctcggtggatggaatgggataaacagggatgtactggaaagctgcagagggccattgtaagtattctgaattatgtcatctataaaaatactcacattaagacagtagcaattccagccttgagctctgggatttttcagttccctctgaatttgtgtacaaagactattgtagagactatccgggttagtttgcaagggaagccaatgatgagtaatttgaaagaaattcacctggtgagcaatgaggaccctactgttgctgcctttaaagctgcttcagaattcatcctagggaagagtgagctgggacaagaaaccaccccttctttcaatgcaatggtcgtgaacaacctgaccctccagattgtccagggccacattgaatggcagacggcagatgtaattgttaattctgtaaacccacatgatattacagttggacctgtggcaaagtcaattctacaacaagcaggagttgaaatgaaatcggaatttcttgccacaaaggctaaacagtttcaacggtcccagttggtactggtcacaaaaggatttaacttgttctgtaaatatatataccatgtactgtggcattcagaatttcctaaacctcagatattaaaacatgcaatgaaggagtgtttggaaaaatgcattgagcaaaatataacttccatttcctttcctgcccttgggactggaaacatggaaataaagaaggaaacagcagcagagattttgtttgatgaagttttaacatttgccaaagaccatgtaaaacaccagttaactgtaaaatttgtgatctttccaacagatttggagatatataaggctttcagttctgaaatggcaaagaggtccaagatgctgagtttgaacaattacagtgtcccccagtcaaccagagaggagaaaagagaaaatgggcttgaagctagatctcctgccatcaatctgatgggattcaacgtggaagagatgtgtgaggcccacgcatggatccaaagaatcctgagtctccagaaccaccacatcattgagaataatcatattctgtaccttgggagaaaggaacatgacattttgtctcagcttcagaaaacttcaagtgtctccatcacagaaattatcagcccaggaaggacagagttagagattgaaggagcccgggctgacctcattgaggtggttatgaacattgaagatatgctttgtaaagtacaggaggaaatggcaaggaaaaaggagcgaggcctttggcgctcgttaggacagtggactattcagcaacaaaaaacccaagacgaaatgaaagaaaatatcatatttctgaaatgtcctgtgcctccaactcaagagcttctagatcaaaagaaacagtttgaaaaatgtggtttgcaggttctaaaggtggagaagatagacaatgaggtccttatggctgcctttcaaagaaagaagaaaatgatggaagaaaaactgcacaggcaacctgtgagccataggctgtttcagcaagtcccataccagttctgcaatgtggtatgcagagttggctttcaaagaatgtactcgacaccttgcgatccaaaatacggagctggcatatacttcaccaagaacctcaaaaacctggcagagaaggccaagaaaatctctgctgcagataagctgatctatgtgtttgaggctgaagtactcacaggcttcttctgccagggacatccgttaaatattgttcccccaccactgagtcctggagctatagatggtcatgacagtgtggttgacaatgtctccagccctgaaacctttgttatttttagtggcatgcaggctatacctcagtatttgtggacatgcacccaggaatatgtacagtcacaagattactcatcaggaccaatgagaccctttgcacagcatccttggaggggattcgcaagtggcagccctgttgattaatctctacatcattttaacagctggtatggccttaccttgggtgaactaaccaaataatgaccatcgatggctcaaagagtggcttgaatatatcccatgggttatctgtatggactgactgggttattgaaaggactagccacatactagcatcttagtgcctttatctgtctttatgtcttggggttggggtaggtagataccaaatgaaacactttcaggaccttccttcctcttgcagttgttctttaatctcctttactagaggagataaatattttgcatataatgaagaaatttttctagtatataacgcaggccttttattttctaaaatgatgatagtataaaaatgttaggataacagaatgattttagattttccagagaatattataaagtgctttaggtatgaaaataaatcatctttgtctgatta

SEQ ID NO: 295801 - DNA, 3060 bp, Homo sapiens
gctccctgttcccggcagagccgcttccccctcctccctgtgctgtctgcaccgaggagagcggcctgccggaagtgggccaccatatctggaaactacagtctatgctttgaagcgcaaaagggaataaacatttaaagactcccccggggacctggaggatggacttttccatggtggccggagcagcagcttacaatgaaaaatcagagactggtgctcttggagaaaactatagttggcaaattcccattaaccacaatgacttcaaaattttaaaaaataatgagcgtcagctgtgtgaagtcctccagaataagtttggctgtatctctaccctggtctctccagttcaggaaggcaacagcaaatctctgcaagtgttcagaaaaatgctgactcctaggatagagttatcagtctggaaagatgacctcaccacacatgctgttgatgctgtggtgaatgcagccaatgaagatcttctgcatgggggaggcctggccctggccctggtaaaagctggtggatttgaaatccaagaagagagcaaacagtttgttgccagatatggtaaagtgtcagctggtgagatagctgtcacgggagcagggaggcttccctgcaaacagatcatccatgctgttgggcctcggtggatggaatgggataaacagggatgtactggaaagctgcagagggccattgtaagtattctgaattatgtcatctataaaaatactcacattaagacagtagcaattccagccttgagctctgggatttttcagttccctctgaatttgtgtacaaagactattgtagagactatccgggttagtttgcaagggaagccaatgatgagtaatttgaaagaaattcacctggtgagcaatgaggaccctactgttgctgcctttaaagctgcttcagaattcatcctagggaagagtgagctgggacaagaaaccaccccttctttcaatgcaatggtcgtgaacaacctgaccctccagattgtccagggccacattgaatggcagacggcagatgtaattgttaattctgtaaacccacatgatattacagttggacctgtggcaaagtcaattctacaacaagcaggagttgaaatgaaatcggaatttcttgccacaaaggctaaacagtttcaacggtcccagttggtactggtcacaaaaggatttaacttgttctgtaaatatatataccatgtactgtggcattcagaatttcctaaacctcagatattaaaacatgcaatgaaggagtgtttggaaaaatgcattgagcaaaatataacttccatttcctttcctgcccttgggactggaaacatggaaataaagaaggaaacagcagcagagattttgtttgatgaagttttaacatttgccaaagaccatgtaaaacaccagttaactgtaaaatttgtgatctttccaacagatttggagatatataaggctttcagttctgaaatggcaaagaggtccaagatgctgagtttgaacaattacagtgtcccccagtcaaccagagaggagaaaagagaaaatgggcttgaagctagatctcctgccatcaatctgatgggattcaacgtggaagagatgtgtgaggcccacgcatggatccaaagaatcctgagtctccagaaccaccacatcattgagaataatcatattctgtaccttgggagaaaggaacatgacattttgtctcagcttcagaaaacttcaagtgtctccatcacagaaattatcagcccaggaaggacagagttagagattgaaggagcccgggctgacctcattgaggtggttatgaacattgaagatatgctttgtaaagtacaggaggaaatggcaaggaaaaaggagcgaggcctttggcgctcgttaggacagtggactattcagcaacaaaaaacccaagacgaaatgaaagaaaatatcatatttctgaaatgtcctgtgcctccaactcaagagcttctagatcaaaagaaacagtttgaaaaatgtggtttgcaggttctaaaggtggagaagatagacaatgaggtccttatggctgcctttcaaagaaagaagaaaatgatggaagaaaaactgcacaggcaacctgtgagccataggctgtttcagcaagtcccataccagttctgcaatgtggtatgcagagttggctttcaaagaatgtactcgacaccttgcgatccaaaatacggagctggcatatacttcaccaagaacctcaaaaacctggcagagaaggccaagaaaatctctgctgcagataagctgatctatgtgtttgaggctgaagtactcacaggcttcttctgccagggacatccgttaaatattgttcccccaccactgagtcctggagctatagatggtcatgacagtgtggttgacaatgtctccagccctgaaacctttgttatttttagtggcatgcaggctatacctcagtatttgtggacatgcacccaggaatatgtacagtcacaagattactcatcaggaccaatgagaccctttgcacagcatccttggaggggattcgcaagtggcagccctgttgattaatctctacatcattttaacagctggtatggccttaccttgggtgaactaaccaaataatgaccatcgatggctcaaagagtggcttgaatatatcccatgggttatctgtatggactgactgggttattgaaaggactagccacatactagcatcttagtgcctttatctgtctttatgtcttggggttggggtaggtagataccaaatgaaacactttcaggaccttccttcctcttgcagttgttctttaatctcctttactagaggagataaatattttgcatataatgaagaaatttttctagtatataacgcaggccttttattttctaaaatgatgatagtataaaaatgttaggataacagaatgattttagattttccagagaatattataaagtgctttaggtatgaaaataaatcatctttgtctgatta

SEQ ID NO: 295802 - DNA, 1059 bp, Homo sapiens
tagccaaaggaaaagctcacctgctgatgattctaagctggctgctcatggacttggaatcctaggtggagaagatagacaatgaggtccttatggctgcctttcaaagaaagaagaaaatgatggaagaaaaactgcacaggcaacctgtgagccataggctgtttcagcaagtcccataccagttctgcaatgtggtatgcagagttggctttcaaagaatgtactcgacaccttgcgatccaaaatacggagctggcatatacttcaccaagaacctcaaaaacctggcagagaaggccaagaaaatctctgctgcagataagctgatctatgtgtttgaggctgaagtactcacaggcttcttctgccagggacatccgttaaatattgttcccccaccactgagtcctggagctatagatggtcatgacagtgtggttgacaatgtctccagccctgaaacctttgttatttttagtggcatgcaggctatacctcagtatttgtggacatgcacccaggaatatgtacagtcacaagattactcatcaggaccaatgagaccctttgcacagcatccttggaggggattcgcaagtggcagccctgttgattaatctctacatcattttaacagctggtatggccttaccttgggtgaactaaccaaataatgaccatcgatggctcaaagagtggcttgaatatatcccatgggttatctgtatggactgactgggttattgaaaggactagccacatactagcatcttagtgcctttatctgtctttatgtcttggggttggggtaggtagataccaaatgaaacactttcaggaccttccttcctcttgcagttgttctttaatctcctttactagaggagataaatattttgcatataatgaagaaatttttctagtatataacgcaggccttttattttctaaaatgatgatagtataaaaatgttaggataacagaatgattttagattttccagagaatattataaagtgctttaggtatgaaaataaatcatctttgtctgatta

SEQ ID NO: 295803 - DNA, 3653 bp, Homo sapiens
tatttctatagtgagcatatatcacttttgtaatcctcaaaaacacaaaatggaacatccttttgttcatggatggaacaatggaaccattatttaaaacataaaagtggaatccctgaatgacaaggacagcagctggcaggcatctgggggaaggaagatgacagctgagaaattaagttagaatgaggatatggaaagcatccacactaaggcgccgtcagccagacccgcaccaggcacatgtgaggccccatcctccaccgagtgttcactgtctcagtgagtctcttggcagtagggccccgtccctgtccgccaccgcacagtgacatactttctcccgccctctcccctaggtcagctggaactgggtccgcctggaaacccgggggccgggcccccagagggctttcgcagcctggccgcccgaagctcacctgccctttcactgaactccacccggaaggtgcccggggcttcgtgttcctgggtgctgaccgtgcactccccgccgcccgaggacttagagctctggaagtagctctccagcttccttcgtactcgggggccggacttgtacacccgcacgaggagcggggacggcgggcgcagaagtgggccaccatatctggaaactacagtctatgctttgaagcgcaaaagggaataaacatttaaagactcccccggggacctggaggatggacttttccatggtggccggagcagcagcttacaatgaaaaatcaggtaggattacctcgctctcactcttgtttcagaaagtctttgctcagatctttcctcagtggagaaaggggaatacagaagaatgtctcccctacaagtgctcagagactggtgctcttggagaaaactatagttggcaaattcccattaaccacaatgacttcaaaattttaaaaaataatgagcgtcagctgtgtgaagtcctccagaataagtttggctgtatctctaccctggtctctccagttcaggaaggcaacagcaaatctctgcaagtgttcagaaaaatgctgactcctaggatagagttatcagtctggaaagatgacctcaccacacatgctgttgatgctgtggtgaatgcagccaatgaagatcttctgcatgggggaggcctggccctggccctggtaaaagctggtggatttgaaatccaagaagagagcaaacagtttgttgccagatatggtaaagtgtcagctggtgagatagctgtcacgggagcagggaggcttccctgcaaacagatcatccatgctgttgggcctcggtggatggaatgggataaacagggatgtactggaaagctgcagagggccattgtaagtattctgaattatgtcatctataaaaatactcacattaagacagtagcaattccagccttgagctctgggatttttcagttccctctgaatttgtgtacaaagactattgtagagactatccgggttagtttgcaagggaagccaatgatgagtaatttgaaagaaattcacctggtgagcaatgaggaccctactgttgctgcctttaaagctgcttcagaattcatcctagggaagagtgagctgggacaagaaaccaccccttctttcaatgcaatggtcgtgaacaacctgaccctccagattgtccagggccacattgaatggcagacggcagatgtaattgttaattctgtaaacccacatgatattacagttggacctgtggcaaagtcaattctacaacaagcaggagttgaaatgaaatcggaatttcttgccacaaaggctaaacagtttcaacggtcccagttggtactggtcacaaaaggatttaacttgttctgtaaatatatataccatgtactgtggcattcagaatttcctaaacctcagatattaaaacatgcaatgaaggagtgtttggaaaaatgcattgagcaaaatataacttccatttcctttcctgcccttgggactggaaacatggaaataaagaaggaaacagcagcagagattttgtttgatgaagttttaacatttgccaaagaccatgtaaaacaccagttaactgtaaaatttgtgatctttccaacagatttggagatatataaggctttcagttctgaaatggcaaagaggtccaagatgctgagtttgaacaattacagtgtcccccagtcaaccagagaggagaaaagagaaaatgggcttgaagctagatctcctgccatcaatctgatgggattcaacgtggaagagatgtgtgaggcccacgcatggatccaaagaatcctgagtctccagaaccaccacatcattgagaataatcatattctgtaccttgggagaaaggaacatgacattttgtctcagcttcagaaaacttcaagtgtctccatcacagaaattatcagcccaggaaggacagagttagagattgaaggagcccgggctgacctcattgaggtggttatgaacattgaagatatgctttgtaaagtacaggaggaaatggcaaggaaaaaggagcgaggcctttggcgctcgttaggacagtggactattcagcaacaaaaaacccaagacgaaatgaaagaaaatatcatatttctgaaatgtcctgtgcctccaactcaagagcttctagatcaaaagaaacagtttgaaaaatgtggtttgcaggttctaaaggtggagaagatagacaatgaggtccttatggctgcctttcaaagaaagaagaaaatgatggaagaaaaactgcacaggcaacctgtgagccataggctgtttcagcaagtcccataccagttctgcaatgtggtatgcagagttggctttcaaagaatgtactcgacaccttgcgatccaaaatacggagctggcatatacttcaccaagaacctcaaaaacctggcagagaaggccaagaaaatctctgctgcagataagctgatctatgtgtttgaggctgaagtactcacaggcttcttctgccagggacatccgttaaatattgttcccccaccactgagtcctggagctatagatggtcatgacagtgtggttgacaatgtctccagccctgaaacctttgttatttttagtggcatgcaggctatacctcagtatttgtggacatgcacccaggaatatgtacagtcacaagattactcatcaggaccaatgagaccctttgcacagcatccttggaggggattcgcaagtggcagccctgttgattaatctctacatcattttaacagctggtatggccttaccttgggtgaactaaccaaataatgaccatcgatggctcaaagagtggcttgaatatatcccatgggttatctgtatggactgactgggttattgaaaggactagccacatactagcatcttagtgcctttatctgtctttatgtcttggggttggggtaggtagataccaaatgaaacactttcaggaccttcatataatgaagaaatttttctagtatataacgcaggccttttattttctaaaatgatgatagtataaaaatgttaggataacagaatgattttagattttccagagaatattataaagtgctttaggtatgaaaataaatcatctttgtctgatta

SEQ ID NO: 295804 - DNA, 3547 bp, Homo sapiens
tatttctatagtgagcatatatcacttttgtaatcctcaaaaacacaaaatggaacatccttttgttcatggatggaacaatggaaccattatttaaaacataaaagtggaatccctgaatgacaaggacagcagctggcaggcatctgggggaaggaagatgacagctgagaaattaagttagaatgaggatatggaaagcatccacactaaggcgccgtcagccagacccgcaccaggcacatgtgaggccccatcctccaccgagtgttcactgtctcagtgagtctcttggcagtagggccccgtccctgtccgccaccgcacagtgacatactttctcccgccctctcccctaggtcagctggaactgggtccgcctggaaacccgggggccgggcccccagagggctttcgcagcctggccgcccgaagctcacctgccctttcactgaactccacccggaaggtgcccggggcttcgtgttcctgggtgctgaccgtgcactccccgccgcccgaggacttagagctctggaagtagctctccagcttccttcgtactcgggggccggacttgtacacccgcacgaggagcggggacggcgggcgcagaagtgggccaccatatctggaaactacagtctatgctttgaagcgcaaaagggaataaacatttaaagactcccccggggacctggaggatggacttttccatggtggccggagcagcagcttacaatgaaaaatcaggtaggattacctcgctctcactcttgtttcagaaagtctttgctcagatctttcctcagtggagaaaggggaatacagaagaatgtctcccctacaagtgctcagagactggtgctcttggagaaaactatagttggcaaattcccattaaccacaatgacttcaaaattttaaaaaataatgagcgtcagctgtgtgaagtcctccagaataagtttggctgtatctctaccctggtctctccagttcaggaaggcaacagcaaatctctgcaagtgttcagaaaaatgctgactcctaggatagagttatcagtctggaaagatgacctcaccacacatgctgttgatgctgtggtgaatgcagccaatgaagatcttctgcatgggggaggcctggccctggccctggtaaaagctggtggatttgaaatccaagaagagagcaaacagtttgttgccagatatggtaaagtgtcagctggtgagatagctgtcacgggagcagggaggcttccctgcaaacagatcatccatgctgttgggcctcggtggatggaatgggataaacagggatgtactggaaagctgcagagggccattgtaagtattctgaattatgtcatctataaaaatactcacattaagacagtagcaattccagccttgagctctgggatttttcagttccctctgaatttgtgtacaaagactattgtagagactatccgggttagtttgcaagggaagccaatgatgagtaatttgaaagaaattcacctggtgagcaatgaggaccctactgttgctgcctttaaagctgcttcagaattcatcctagggaagagtgagctgggacaagaaaccaccccttctttcaatgcaatggtcgtgaacaacctgaccctccagattgtccagggccacattgaatggcagacggcagatgtaattgttaattctgtaaacccacatgatattacagttggacctgtggcaaagtcaattctacaacaagcaggagttgaaatgaaatcggaatttcttgccacaaaggctaaacagtttcaacggtcccagttggtactggtcacaaaaggatttaacttgttctgtaaatatatataccatgtactgtggcattcagaatttcctaaacctcagatattaaaacatgcaatgaaggagtgtttggaaaaatgcattgagcaaaatataacttccatttcctttcctgcccttgggactggaaacatggaaataaagaaggaaacagcagcagagattttgtttgatgaagttttaacatttgccaaagaccatgtaaaacaccagttaactgtaaaatttgtgatctttccaacagatttggagatatataaggctttcagttctgaaatggcaaagaggtccaagatgctgagtttgaacaattacagtgtcccccagtcaaccagagaggagaaaagagaaaatgggcttgaagctagatctcctgccatcaatctgatgggattcaacgtggaagagatgtgtgaggcccacgcatggatccaaagaatcctgagtctccagaaccaccacatcattgagaataatcatattctgtaccttgggagaaaggaacatgacattttgtctcagcttcagaaaacttcaagtgtctccatcacagaaattatcagcccaggaaggacagagttagagattgaaggagcccgggctgacctcattgaggtggttatgaacattgaagatatgctttgtaaagtacaggaggaaatggcaaggaaaaaggagcgaggcctttggcgctcgttaggacagtggactattcagcaacaaaaaacccaagacgaaatgaaagaaaatatcatatttctgaaatgtcctgtgcctccaactcaagagcttctagatcaaaagaaacagtttgaaaaatgtggtttgcaggttctaaaggtggagaagatagacaatgaggtccttatggctgcctttcaaagaaagaagaaaatgatggaagaaaaactgcacaggcaacctgtgagccataggctgtttcagcaagtcccataccagttctgcaatgtggtatgcagagttggctttcaaagaatgtactcgacaccttgcgatccaaaatacggagctggcatatacttcaccaagaacctcaaaaacctggcagagaaggccaagaaaatctctgctgcagataagctgatctatgtgtttgaggctgaagtactcacaggcttcttctgccagggacatccgttaaatattgttcccccaccactgagtcctggagctatagatggtcatgacagtgtggttgacaatgtctccagccctgaaacctttgttatttttagtggcatgcaggctataccgtgaactaaccaaataatgaccatcgatggctcaaagagtggcttgaatatatcccatgggttatctgtatggactgactgggttattgaaaggactagccacatactagcatcttagtgcctttatctgtctttatgtcttggggttggggtaggtagataccaaatgaaacactttcaggaccttccttcctcttgcagttgttctttaatctcctttactagaggagataaatattttgcatataatgaagaaatttttctagtatataacgcaggccttttattttctaaaatgatgatagtataaaaatgttaggataacagaatgattttagattttccagagaatattataaagtgctttaggtatgaaaataaatcatctttgtctgatta

SEQ ID NO: 295805 - DNA, 3633 bp, Homo sapiens
tatttctatagtgagcatatatcacttttgtaatcctcaaaaacacaaaatggaacatccttttgttcatggatggaacaatggaaccattatttaaaacataaaagtggaatccctgaatgacaaggacagcagctggcaggcatctgggggaaggaagatgacagctgagaaattaagttagaatgaggatatggaaagcatccacactaaggcgccgtcagccagacccgcaccaggcacatgtgaggccccatcctccaccgagtgttcactgtctcagtgagtctcttggcagtagggccccgtccctgtccgccaccgcacagtgacatactttctcccgccctctcccctaggtcagctggaactgggtccgcctggaaacccgggggccgggcccccagagggctttcgcagcctggccgcccgaagctcacctgccctttcactgaactccacccggaaggtgcccggggcttcgtgttcctgggtgctgaccgtgcactccccgccgcccgaggacttagagctctggaagtagctctccagcttccttcgtactcgggggccggacttgtacacccgcacgaggagcggggacggcgggcgcagaagtgggccaccatatctggaaactacagtctatgctttgaagcgcaaaagggaataaacatttaaagactcccccggggacctggaggatggacttttccatggtggccggagcagcagcttacaatgaaaaatcaggtaggattacctcgctctcactcttgtttcagaaagtctttgctcagatctttcctcagtggagaaaggggaatacagaagaatgtctcccctacaagtgctcagagactggtgctcttggagaaaactatagttggcaaattcccattaaccacaatgacttcaaaattttaaaaaataatgagcgtcagctgtgtgaagtcctccagaataagtttggctgtatctctaccctggtctctccagttcaggaaggcaacagcaaatctctgcaagtgttcagaaaaatgctgactcctaggatagagttatcagtctggaaagatgacctcaccacacatgctgttgatgctgtggtgaatgcagccaatgaagatcttctgcatgggggaggcctggccctggccctggtaaaagctggtggatttgaaatccaagaagagagcaaacagtttgttgccagatatggtaaagtgtcagctggtgagatagctgtcacgggagcagggaggcttccctgcaaacagatcatccatgctgttgggcctcggtggatggaatgggataaacagggatgtactggaaagctgcagagggccattgtaagtattctgaattatgtcatctataaaaatactcacattaagacagtagcaattccagccttgagctctgggatttttcagttccctctgaatttgtgtacaaagactattgtagagactatccgggttagtttgcaagggaagccaatgatgagtaatttgaaagaaattcacctggtgagcaatgaggaccctactgttgctgcctttaaagctgcttcagaattcatcctagggaagagtgagctgggacaagaaaccaccccttctttcaatgcaatggtcgtgaacaacctgaccctccagattgtccagggccacattgaatggcagacggcagatgtaattgttaattctgtaaacccacatgatattacagttggacctgtggcaaagtcaattctacaacaagcaggagttgaaatgaaatcggaatttcttgccacaaaggctaaacagtttcaacggtcccagttggtactggtcacaaaaggatttaacttgttctgtaaatatatataccatgtactgtggcattcagaatttcctaaacctcagatattaaaacatgcaatgaaggagtgtttggaaaaatgcattgagcaaaatataacttccatttcctttcctgcccttgggactggaaacatggaaataaagaaggaaacagcagcagagattttgtttgatgaagttttaacatttgccaaagaccatgtaaaacaccagttaactgtaaaatttgtgatctttccaacagatttggagatatataaggctttcagttctgaaatggcaaagaggtccaagatgctgagtttgaacaattacagtgtcccccagtcaaccagagaggagaaaagagaaaatgggcttgaagctagatctcctgccatcaatctgatgggattcaacgtggaagagatgtgtgaggcccacgcatggatccaaagaatcctgagtctccagaaccaccacatcattgagaataatcatattctgtaccttgggagaaaggaacatgacattttgtctcagcttcagaaaacttcaagtgtctccatcacagaaattatcagcccaggaaggacagagttagagattgaaggagcccgggctgacctcattgaggtggttatgaacattgaagatatgctttgtaaagtacaggaggaaatggcaaggaaaaaggagcgaggcctttggcgctcgttaggacagtggactattcagcaacaaaaaacccaagacgaaatgaaagaaaatatcatatttctgaaatgtcctgtgcctccaactcaagagcttctagatcaaaagaaacagtttgaaaaatgtggtttgcaggttctaaaggtggagaagatagacaatgaggtccttatggctgcctttcaaagaaagaagaaaatgatggaagaaaaactgcacaggcaacctgtgagccataggctgtttcagcaagtcccataccagttctgcaatgtggtatgcagagttggctttcaaagaatgtactcgacaccttgcgagacgaggtttcatcatgttggccaggctgatctccagctactcgtgatccgtccacctcagcctcccaaagtgttgggcttacagatccaaaatacggagctggcatatacttcaccaagaacctcaaaaacctggcagagaaggccaagaaaatctctgctgcagataagctgatctatgtgtttgaggctgaagtactcacaggcttcttctgccagggacatccgttaaatattgttcccccaccactgagtcctggagctatagatggtcatgacagtgtggttgacaatgtctccagccctgaaacctttgttatttttagtggcatgcaggctataccgtgaactaaccaaataatgaccatcgatggctcaaagagtggcttgaatatatcccatgggttatctgtatggactgactgggttattgaaaggactagccacatactagcatcttagtgcctttatctgtctttatgtcttggggttggggtaggtagataccaaatgaaacactttcaggaccttccttcctcttgcagttgttctttaatctcctttactagaggagataaatattttgcatataatgaagaaatttttctagtatataacgcaggccttttattttctaaaatgatgatagtataaaaatgttaggataacagaatgattttagattttccagagaatattataaagtgctttaggtatgaaaataaatcatctttgtctgatta

SEQ ID NO: 295806 - DNA, 3313 bp, Homo sapiens
tatttctatagtgagcatatatcacttttgtaatcctcaaaaacacaaaatggaacatccttttgttcatggatggaacaatggaaccattatttaaaacataaaagtggaatccctgaatgacaaggacagcagctggcaggcatctgggggaaggaagatgacagctgagaaattaagttagaatgaggatatggaaagcatccacactaaggcgccgtcagccagacccgcaccaggcacatgtgaggccccatcctccaccgagtgttcactgtctcagtgagtctcttggcagtagggccccgtccctgtccgccaccgcacagtgacatactttctcccgccctctcccctaggtcagctggaactgggtccgcctggaaacccgggggccgggcccccagagggctttcgcagcctggccgcccgaagctcacctgccctttcactgaactccacccggaaggtgcccggggcttcgtgttcctgggtgctgaccgtgcactccccgccgcccgaggacttagagctctggaagtagctctccagcttccttcgtactcgggggccggacttgtacacccgcacgaggagcggggacggcgggcgcagaagtgggccaccatatctggaaactacagtctatgctttgaagcgcaaaagggaataaacatttaaagactcccccggggacctggaggatggacttttccatggtggccggagcagcagcttacaatgaaaaatcaggtaggattacctcgctctcactcttgtttcagaaagtctttgctcagatctttcctcagtggagaaaggggaatacagaagaatgtctcccctacaagtgctcagagactggtgctcttggagaaaactatagttggcaaattcccattaaccacaatgacttcaaaattttaaaaaataatgagcgtcagctgtgtgaagtcctccagaataagtttggctgtatctctaccctggtctctccagttcaggaaggcaacagcaaatctctgcaagtgttcagaaaaatgctgactcctaggatagagttatcagtctggaaagatgacctcaccacacatgctgttgatgctgtggtgaatgcagccaatgaagatcttctgcatgggggaggcctggccctggccctggtaaaagctggtggatttgaaatccaagaagagagcaaacagtttgttgccagatatggtaaagtgtcagctggtgagatagctgtcacgggagcagggaggcttccctgcaaacagatcatccatgctgttgggcctcggtggatggaatgggataaacagggatgtactggaaagctgcagagggccattgtaagtattctgaattatgtcatctataaaaatactcacattaagacagtagcaattccagccttgagctctgggatttttcagttccctctgaatttgtgtacaaagactattgtagagactatccgggttagtttgcaagggaagccaatgatgagtaatttgaaagaaattcacctggtgagcaatgaggaccctactgttgctgcctttaaagctgcttcagaattcatcctagggaagagtgagctgggacaagaaaccaccccttctttcaatgcaatggtcgtgaacaacctgaccctccagattgtccagggccacattgaatggcagacggcagatgtaattgttaattctgtaaacccacatgatattacagttggacctgtggcaaagtcaattctacaacaagcaggagttgaaatgaaatcggaatttcttgccacaaaggctaaacagtttcaacggtcccagttggtactggtcacaaaaggatttaacttgttctgtaaatatatataccatgtactgtggcattcagaatttcctaaacctcagatattaaaacatgcaatgaaggagtgtttggaaaaatgcattgagcaaaatataacttccatttcctttcctgcccttgggactggaaacatggaaataaagaaggaaacagcagcagagattttgtttgatgaagttttaacatttgccaaagaccatgtaaaacaccagttaactgtaaaatttgtgatctttccaacagatttggagatatataaggctttcagttctgaaatggcaaagaggtccaagatgctgagtttgaacaattacagtgtcccccagtcaaccagagaggagaaaagagaaaatgggcttgaagctagatctcctgccatcaatctgatgggattcaacgtggaagagatgtgtgaggcccacgcatggatccaaagaatcctgagtctccagaaccaccacatcattgagaataatcatattctgtaccttgggagaaaggaacatgacattttgtctcagcttcagaaaacttcaagtgtctccatcacagaaattatcagcccaggaaggacagagttagagattgaaggagcccgggctgacctcattgaggtggttatgaacattgaagatatgctttgtaaagtacaggaggaaatggcaaggaaaaaggagcgaggcctttggcgctcgttaggacagtggactattcagcaacaaaaaacccaagacgaaatgaaagaaaatatcatatttctgaaatgtcctgtgcctccaactcaagagcttctagatcaaaagaaacagtttgaaaaatgtggtttgcaggttctaaaggtggagaagatagacaatgaggtccttatggctgcctttcaaagaaagaagaaaatgatggaagaaaaactgcacaggcaacctgtgagccataggctgtttcagcaagtcccataccagttctgcaatgtggtatgcagagttggctttcaaagaatgtactcgacaccttgcgagattgggtctcactgtgttgccccaggctagtctcaaactcctgacctccaccaatcctcctgccttggcctcccaaagtgctgggattacagacatgagccactcagcctggaagttttaaacgacatgtgtgactcataatccaaaatacggagctggcatatacttcaccaagaacctcaaaaacctggcagagaaggccaagaaaatctctgctgcagataagctgatctatgtgtttgaggctgaagtactcacaggcttcttctgccagggacatccgttaaatattgttcccccaccactgagtcctggagctatagatggtcatgacagtgtggttgacaatgtctccagccctgaaacctttgttatttttagtggcatgcaggctatacctacatcagacagggatctcaaga

SEQ ID NO: 295807 - DNA, 3263 bp, Homo sapiens
tatttctatagtgagcatatatcacttttgtaatcctcaaaaacacaaaatggaacatccttttgttcatggatggaacaatggaaccattatttaaaacataaaagtggaatccctgaatgacaaggacagcagctggcaggcatctgggggaaggaagatgacagctgagaaattaagttagaatgaggatatggaaagcatccacactaaggcgccgtcagccagacccgcaccaggcacatgtgaggccccatcctccaccgagtgttcactgtctcagtgagtctcttggcagtagggccccgtccctgtccgccaccgcacagtgacatactttctcccgccctctcccctaggtcagctggaactgggtccgcctggaaacccgggggccgggcccccagagggctttcgcagcctggccgcccgaagctcacctgccctttcactgaactccacccggaaggtgcccggggcttcgtgttcctgggtgctgaccgtgcactccccgccgcccgaggacttagagctctggaagtagctctccagcttccttcgtactcgggggccggacttgtacacccgcacgaggagcggggacggcgggcgcagaagtgggccaccatatctggaaactacagtctatgctttgaagcgcaaaagggaataaacatttaaagactcccccggggacctggaggatggacttttccatggtggccggagcagcagcttacaatgaaaaatcaggtaggattacctcgctctcactcttgtttcagaaagtctttgctcagatctttcctcagtggagaaaggggaatacagaagaatgtctcccctacaagtgctcagagactggtgctcttggagaaaactatagttggcaaattcccattaaccacaatgacttcaaaattttaaaaaataatgagcgtcagctgtgtgaagtcctccagaataagtttggctgtatctctaccctggtctctccagttcaggaaggcaacagcaaatctctgcaagtgttcagaaaaatgctgactcctaggatagagttatcagtctggaaagatgacctcaccacacatgctgttgatgctgtggtgaatgcagccaatgaagatcttctgcatgggggaggcctggccctggccctggtaaaagctggtggatttgaaatccaagaagagagcaaacagtttgttgccagatatggtaaagtgtcagctggtgagatagctgtcacgggagcagggaggcttccctgcaaacagatcatccatgctgttgggcctcggtggatggaatgggataaacagggatgtactggaaagctgcagagggccattgtaagtattctgaattatgtcatctataaaaatactcacattaagacagtagcaattccagccttgagctctgggatttttcagttccctctgaatttgtgtacaaagactattgtagagactatccgggttagtttgcaagggaagccaatgatgagtaatttgaaagaaattcacctggtgagcaatgaggaccctactgttgctgcctttaaagctgcttcagaattcatcctagggaagagtgagctgggacaagaaaccaccccttctttcaatgcaatggtcgtgaacaacctgaccctccagattgtccagggccacattgaatggcagacggcagatgtaattgttaattctgtaaacccacatgatattacagttggacctgtggcaaagtcaattctacaacaagcaggagttgaaatgaaatcggaatttcttgccacaaaggctaaacagtttcaacggtcccagttggtactggtcacaaaaggatttaacttgttctgtaaatatatataccatgtactgtggcattcagaatttcctaaacctcagatattaaaacatgcaatgaaggagtgtttggaaaaatgcattgagcaaaatataacttccatttcctttcctgcccttgggactggaaacatggaaataaagaaggaaacagcagcagagattttgtttgatgaagttttaacatttgccaaagaccatgtaaaacaccagttaactgtaaaatttgtgatctttccaacagatttggagatatataaggctttcagttctgaaatggcaaagaggtccaagatgctgagtttgaacaattacagtgtcccccagtcaaccagagaggagaaaagagaaaatgggcttgaagctagatctcctgccatcaatctgatgggattcaacgtggaagagatgtgtgaggcccacgcatggatccaaagaatcctgagtctccagaaccaccacatcattgagaataatcatattctgtaccttgggagaaaggaacatgacattttgtctcagcttcagaaaacttcaagtgtctccatcacagaaattatcagcccaggaaggacagagttagagattgaaggagcccgggctgacctcattgaggtggttatgaacattgaagatatgctttgtaaagtacaggaggaaatggcaaggaaaaaggagcgaggcctttggcgctcgttaggacagtggactattcagcaacaaaaaacccaagacgaaatgaaagaaaatatcatatttctgaaatgtcctgtgcctccaactcaagagcttctagatcaaaagaaacagtttgaaaaatgtggtttgcaggttctaaaggtggagaagatagacaatgaggtccttatggctgcctttcaaagaaagaagaaaatgatggaagaaaaactgcacaggcaacctgtgagccataggctgtttcagcaagtcccataccagttctgcaatgtggtatgcagagttggctttcaaagaatgtactcgacaccttgcggtaggtgtcaatgcctcatcattggggctactctgtggaatttggtgagctgacatcagtagattcttccactgatagcatttgttgttgtggggaagggatcatttgtgactgtgatttagaggtcacaaatgatgacccaggtcacaaagtattttggaaagagtggtattttttacttttccttcgtatcttttgttgctgatgcattttacattgatgaaaagtgtgagcagtaagaactacggttcactgtttttctcctttatgtgtttctgtgtcctatccgcagagaacacgttgaggctttttttttcttctggtagccatcctaatgggtgtgaagtggtatctcattgcaacacggtctctca

SEQ ID NO: 295808 - DNA, 1241 bp, Homo sapiens
gctccctgttcccggcagagccgcttccccctcctccctgtgctgtctgcaccgaggagagcggcctgccgggtgagtaggtccggtgcctctgggccctcggggtcccctctcctgcaggctcgaggtgggcggggagaagggggacgggcgcggacccgggtcccagggccaggcctcccttgtgagtagactatgcaaagaaaaagtgggccaccatatctggaaactacagtctatgctttgaagcgcaaaagggaataaacatttaaagactcccccggggacctggaggatggacttttccatggtggccggagcagcagcttacaatgaaaaatcagagactggtgctcttggagaaaactatagttggcaaattcccattaaccacaatgacttcaaaattttaaaaaataatgagcgtcagctgtgtgaagtcctccagaataagtttggctgtatctctaccctggtctctccagttcaggaaggcaacagcaaatctctgcaagtgttcagaaaaatgctgactcctaggatagagttatcagtctggaaagatgacctcaccacacatgctgttgatgctgtggtgaatgcagccaatgaagatcttctgcatgggggaggcctggccctggccctggtaaaagctggtggatttgaaatccaagaagagagcaaacagtttgttgccagatatggtaaagtgtcagctggtgagatagctgtcacgggagcagggaggcttccctgcaaacagatcatccatgctgttgggcctcggtggatggaatgggataaacagggatgtactggaaagctgcagagggccattgtaagtattctgaattatgtcatctataaaaatactcacattaagacagtagttgaactacccttgatatggttcagctctgtatccccacccaaatctcatgtcaaattgtaattcccagtgttgagggagggagctggtgggaggtgattggctcatgggggccgacgtcccccttgctgttctcgtgacagtgagtgagccctcgtgggatctgcttgttgaaaagtgtgcagcacctcccgcttcactctctctgtctctcctgctccaccatggccagacgtgcctgcttcccctttgccttctgcatgattgtcagtttcctgaggcctccccagccatgcttcctgtacagcctgcagaactgtgagtcaattaaacctctttcttcataaaa

SEQ ID NO: 295809 - DNA, 1382 bp, Homo sapiens
tatttctatagtgagcatatatcacttttgtaatcctcaaaaacacaaaatggaacatccttttgttcatggatggaacaatggaaccattatttaaaacataaaagtggaatccctgaatgacaaggacagcagctggcaggcatctgggggaaggaagatgacagctgagaaattaagttagaatgaggatatggaaagcatccacactaaggcgccgtcagccagacccgcaccaggcacatgtgaggccccatcctccaccgagtgttcactgtctcagtgagtctcttggcagtagggccccgtccctgtccgccaccgcacagtgacatactttctcccgccctctcccctaggtcagctggaactgggtccgcctggaaacccgggggccgggcccccagagggctttcgcagcctggccgcccgaagctcacctgccctttcactgaactccacccggaaggtgcccggggcttcgtgttcctgggtgctgaccgtgcactccccgccgcccgaggacttagagctctggaagtagctctccagcttccttcgtactcgggggccggacttgtacacccgcacgaggagcggggacggcgggcgcagaagtgggccaccatatctggaaactacagtctatgctttgaagcgcaaaagggaataaacatttaaagactcccccggggacctggaggatggacttttccatggtggccggagcagcagcttacaatgaaaaatcaggtaggattacctcgctctcactcttgtttcagaaagtctttgctcagatctttcctcagtggagaaaggggaatacagaagaatgtctcccctacaagtgctcaggtgcgtgactgcagacccttgtggggacccccgcacatgcttcagagttggtgtggcaccgaccagcaggcatattctctcaaggcctacaccattcctctcctttgcccgtaaatgtgagactcttttaacgacagcctatggctgaattgaccagatggggtggccaactgattgtctccttgctcaacgagtactatacaagctaaatagttctggcttaattccaggggtcccccattaaagattttcaaccaaagctcaggccaatagggcctgactacccaatttcggcttcgtttgggtaattgaggccacaagaggtctttctaggagactcagattagaaatgggagttgaagcaaaataaaagtaatgatcacattttatctattttaggatgcacatttttttttcacattttaacaatataccttatttcaatcggcccaggtgggcagattgcttgaaatcaggagtttgagaccagcctaggcaatatggtgaaaccccatctctacaga

SEQ ID NO: 295810 - DNA, 336 bp, Homo sapiens
gtgctgtctgcaccgaggagagcggcctgccgggtgagtaggtccggtgcctctgggccctcggggtcccctctcctgcaggctcgaggtgggcggggagaagggggacgggcgcggacccgggtcccagggccaggcctcccttgtgagtagactatgcaaagaaagtaagtttctcctgtgtttcttattctttgtaactcttactgctgttaccactattatttgatcctaaaaagtaattcacattctgaatccatgttaaacttacccatttttgaaaatttgaatgtgttcatctggtaattgtgacctgttaccccttccctccctcca

SEQ ID NO: 295811 - DNA, 1048 bp, Homo sapiens
tggatcctgaaacctcagggagtaccaaaccctatatacactatggtttttactatatggtaatgagtgggtagcatgtatagtggataggctggacaaaggaatgattcatgtcccaggtgggatggaatgagacagcatgagatttcttagtgcaaagaatggcatgtaatttaaaacttgcgaagtctttatttctggaatttttaatttcatgttttcagactgtgattgactatgggtaacaaaccattgtggaaagcaaaaccttggataagggtataaggacttcctatacttgctaagtatttaggtcaagaattacatcctatttaattagctattaatatagataaaagtaccctacatgcagaaaaacccagagttagattcattgctgaaaacaagagcctggagtagggctcttttttgttaaaggggagctacaaaaagttgttgctgtttgttatcctgaggtatgacttaaatgaagatttacggagatgagacgatgatgcaggaaaataggaggacatcagcacagtcttacgaccaccacatctgaaccaatctgaaccattgaactgttagctgagtgtttggatttgtgatatagccagtattactgcttacaagagttatatatgagttttggggcttgcagaaatgccagacccaaaattgtaatactgagaaagaaagaaaaaaattgtattcaagatgatcctgcaaacctaaattccaaaatacatgaagacaaaatctgtgaaagatagctgataaaatcaacaattaggagatgaattcatgtcagattaaagaaaacaaaacattctgttgaagactttgaaaatcagtatgcttgcaattgtcagtgagataaaagaagcaatagcatctatagaaaagaagtgaaacaaaaacaataaatacggaaaaacaatcaaatcctgtacatgagaaacccatttcattgattctaagacaattttttgaaatcggagtgcatcttgctattcaaggcatgtcagtgtttctctctcttttt

SEQ ID NO: 295812 - DNA, 901 bp, Homo sapiens
agcggaggaagagcgctcccgcgaactgcggcggtggtggctgggccaccagagggaagcgggtgtggcccaggcagcgggggctgggacagacctggaaaggaggaagcggggaaggaaggttgtcctgtcgggctgggggctcccgggaatccggaggccagcagtggaaccgcaaggctctacagggcagatctgcctcccgggctgtctcagctacgccgagtcgttggctcagggcggaggattttcctattggccgcgttatttgaatggaatggaggataggtcgtgaagtaggtgctgctggttgatctttctaaggaactcagatgaacttgggcatgtcagaattaataaccttttaaaagtggggtctgtgtggccgagggttttaatggtaagttcttgaggtgaccacctattgacaagggttgacctgctgtaattgctgtggcttcctgccaaccccactttagaaatgtttttcttcctctctttacttgttttgtttgctttctctcacgcttgggttctcttctttcttccttcagtgctttaagcctgtctcgtactacccatgagcttagctcagcctgattactggtccttaccttttaagggatttctggttacagctccatctctttctaaggaggggtaaagacctagcttgcgtctagcatttaaaaaggggaaagtttgaagggaaggggacaatttacggtaaagacagatattttaattgggataaactaaataaatggagccagggagaaggggaaataggggctgtagagatacacctgggaagagatttggaaacttattgtgaagcaccaaagtgtgagaataaaacggagcaaaaagagagtagagagtagaatggggataaaaaaag

SEQ ID NO: 295813 - DNA, 1064 bp, Homo sapiens
agcggaggaagagcgctcccgcgaactgcggcggtggtggctgggccaccagagggaagcgggtgtggcccaggcagcgggggctgggacagacctggaaaggaggaagcggggaaggaaggttgtcctgtcgggctgggggctcccgggaatccggaggccagcagtggaaccgcaaggctctacagggcagatctgcctcccgggctgtctcagctacgccgagtcgttggctcagggcggaggattttcctattggccgcgttatttgaatggaatggaggataggtcgtgaagtaggtgctgctggttgatctttctaaggaactcagatgaacttgggcatgtcagaattaataaccttttaaaagtggggtctgtgtggccgagggttttaatgtcctacccagggagttgaccagaaccaacatggaaccaccctaacttgcttcagactccattgctagatcaatcctgatttctagatcatagcatctaatctttgccttgcctctggattacaagggtggaaccaagcagaggggttcacccaagccatctttgggtgcttccatgggaaagaaggatttcactgagaataataagtgacaccaaggctcaaaagaatgagagagaagtctgttggtctcttgaacagcagggatttgctcacagatctctggaagtagccagaatgtgacaggatctcaaaatgaatggctgcttcatggaggctggaacataagcctgggactcccagtagccaaacatagctgtgccacaaacatggctgaaatgtagcagtttggtggatccgaggtcagtcattgaaaatgtattgattggcacctattctttgtgaatcattattctgggttctggggtcacaggagcaaatgaaacaaatgaagtacctgccatcaatgagcttacattctagtaaagagggacagaaaatgaatacattttaaatgaataaattcagataccgctaaatgtagtgaagaaaaaaattgggctaaagagagcgaaaaacaatttctgaagttactagcagtgaaggg

SEQ ID NO: 295814 - DNA, 3622 bp, Homo sapiens
ggtgggaagaggctgggagctgcggccgctgtgccagggtgaccggtagagttgtagccgaggtggcggcgcggggcggggcgggcggagagagaaggaaggaggtggttgtgcaggatggcgacggcggcctacgagcagctgaagctgcatatcacacctgaaaaattttatgtggaagcttgtgatgatggagcagatgacgtacttaccattgaccgtgtgtccacagaggttacccttgcagtcaagaaagatgttcctccttcagctgtcacaagaccaatatttggtatactgggcacaatccatctggtggcaggtaattatcttatagtcattaccaaaaagataaaagtaggtgaatttttcagtcatgtagtctggaaagcaacagattttgatgtcctttcttataagaagacaatgttgcacttaactgatattcagttacaagataataaaaccttcctagcgatgctaaaccatgtcttgaatgtggatggattttacttttcaacaacatatgatttgacccatactttgcagcggctatccaacactagtcctgaattccaagaaatgagtctcttggaaagggcagatcagcggtttgtatggaatggtcatcttctaagagaactttctgcacagccagaggttcatcggtttgcccttccagtgttacatggctttattaccatgcattcatgttctattaatggaaaatactttgattggattctcatctcgaggaggagctgtttcagagctggtgtgcgctattatgtaagaggaattgattcggaaggccatgcagctaactttgtagaaacagaacaaattgtgcactacaatgggagcaaagcttcgtttgtacagactcgaggatcaatacctgttttctggtcccaaagaccaaacctcaagtacaaaccactgccacagatcagcaaagtagcaaatcacatggacggtttccaaaggcattttgattcccaagtaattatttatggaaaacaagttataatcaatctgattaaccagaagggctcggagaagccacttgagcagacatttgcaacaatggtgtcttccttgggaagtggaatgatgagatacattgcctttgacttccataaggaatgtaaaaatatgagatgggatcgactaagtattttattggatcaggtagcagaaatgcaagatgaattaagttattttctagtggactctgctggccaggtggtggcaaaccaggaaggcgtgttccgaagcaattgcatggattgtctagatagaaccaatgtgatccagagtttgttagctcgtcgttcacttcaggcccaacttcagagactaggagttttgcatgtgggacaaaagcttgaagaacaagatgaatttgagaagattttcaaaaatgcctgggctgacaacgcaaatgcttgtgccaagcaatatgcgggaactggtgccttgaagactgactttaccagaactggaaagagaactcatttgggacttataatggatggctggaactcaatgatacgatattataagaacaacttttccgatggatttagacaagattccatagacttatttcttggaaactattcagtggatgaattagaatctcatagtcctttaagtgttccaagggactggaaattcctggctttgcctattatcatggttgttgccttttcaatgtgcattatctgtttgcttatggctggtgacacttggacagaaacactggcctatgtgctcttctggggagttgcaagcattggaacattttttatcattctttacaatggcaaagattttgtcgatgctcccagactggtccagaaagaaaagatagactgaatttgtatttgtggaaagcggcttggcttggaagattccattgtgcagaactggagtctttactgacccgctttccacatcagcccaaggtctttttaatgcctttatccaaaagcacatcttgtgctccatgcaggatgatgacagaattgatctgatgttactgccttgatggtctctttactattgggacagttagatttataatttgaagctattctgtaattaaaatataacctgaattcagcttgcagaatggaagctgaatctgttcattgtattctattgattgtcaatttaattagctgttgcagaataagtaatatattttaaaaacctagctcctttcattatttaaaacagcaaaattatttttgtagctcagtttcattattgtcattgtagaagcggtcactattagcaggcatacttttccacacatctttggacttttcttaaaagttcagtaataagctaactgtgtttataaaatgtaagtctcttacagacatcaagtagtttgatgagacagtctgtgacttcatgataggaaagaggaggatgaggtctggggttctttaaagtctctggtgggctgcctcatgactttaatcagcttgaactgccagtgcaccagcagtttaggtgtgatgagagaattcagatatactttatctttttaaaaaagtgtaaataaaatcaaagaatgtaaagtctatctcttacgctagaggtccaaagctgcctctgttttaaagattatcccaatgtggaagatgcccatgactggtcagctacttcctcctatacattttggtttctttgagggtcactcattgagacacgcaggcctctgagagggtcttgttctagatttcatattgcacttggagggtaacagctgctttttcacgcatggtactcttgatgtttttcactctgtcaaggattttgttggctatcaatgaatgtgtctaaaacttagtgcttccaggtagttatagtactccaaatcaaggaccaacttaaacgttaatttttgtgcaaaaacaaacctgaaaaatatgcttcggaaactgtgcatagttctaattgtaagtcagattgtatattcaaattgtaattaagagatttaaatattagaacggtatgtaaggtagtataattaccactattttaaaacaattcagttaaacactgctgcaatatttcagtgttgtgcttgaaaatatgtacagtttttttccaatattaataccttatgttgtccttaaatatttctaaaagcgcctttatttcagcattacctttttttcatcactatcttttataaaacattaatataagtcgttacttttagaaactaaaggaaataatagctggaaaaccctctgtagtttaaaatcagtcattaaactcacaatagggtaagtaaatatagccacctgttaacatgtaaataagcataatttgttccaaagatggaatattgaaacttagttcatgtctgctgtaaaatattatttaaatgctgctgggcatttcacttaaagaacttaatgtcaacagctacaacaaagaccaaatctgaactgctaatgtggctgctttgtagggaatggactaatatcagtgtgttagatcttaaggtatcagtatttcagaatcctgcgacgattttatttctaaattcatgtactgtatgtccataagtgaaaataaaatgtcatattcttttcta

SEQ ID NO: 295815 - DNA, 671 bp, Homo sapiens
gggttaaattcgcagttctccccggttttttacttaaggatttaccccccccaaggttgaaggtgccaaaaaaccaaaaaccccccaccttggaaaaagattttgaatttgccttaatggaccttaaagaagtagctgaccatgggaatgctgacactattcaccattcaagggactgtaggtatgcagccagaggtcctggtgcaggcgaactgaccgacattaatgatggagtggctgtgacgaaagggatgacagtatcccagagaaagtgatgcctgcaacagacttcccattaaaggaaaccttggagatatttcccaacattgaaagtgcaaaggataaaatgtcagaagttggtttagacttaggaaggtgtatgacagttcaccagggatagaagaaatattctgtatcttaatctatatgacaagaaggcggcaagcactgttcaagtctcttgataaatttttttacaaagaaaatattttttattctcggtgtttctaatgttttaaattatagtgtgctaaatattagttttacaatttgttcatttatgcttataatttactatatataacttacaagttacatctacaacgtaactatataagttaatatctataactaatatctataacttacaatagagtttttaatgttttgac

SEQ ID NO: 295816 - DNA, 3822 bp, Homo sapiens
  misc_feature (3631)..(3631): n is a, c, g, or t
  misc_feature (3633)..(3633): n is a, c, g, or t
  misc_feature (3644)..(3644): n is a, c, g, or t
  misc_feature (3652)..(3652): n is a, c, g, or t
  misc_feature (3658)..(3658): n is a, c, g, or t
  misc_feature (3660)..(3660): n is a, c, g, or t
  misc_feature (3664)..(3664): n is a, c, g, or t
  misc_feature (3672)..(3672): n is a, c, g, or t
ggtgggaagaggctgggagctgcggccgctgtgccagggtgaccggtagagttgtagccgaggtggcggcgcggggcggggcgggcggagagagaaggaaggaggtggttgtgcaggatggcgacggcggcctacgagcagctgaagctgcatatcacacctgaaaaattttatgtggaagcttgtgatgatggagcagatgacgtacttaccattgaccgtgtgtccacagaggttacccttgcagtcaagaaagatgttcctccttcagctgtcacaagaccaatatttggtatactgggcacaatccatctggtggcaggtaattatcttatagtcattaccaaaaagataaaagtaggtgaatttttcagtcatgtagtctggaaagcaacagattttgatgtcctttcttataagaagacaatgttgcacttaactgatattcagttacaagataataaaaccttcctagcgatgctaaaccatgtcttgaatgtggatggattttacttttcaacaacatatgatttgacccatactttgcagcggctatccaacactagtcctgaattccaagaaatgagtctcttggaaagggcagatcagcggtttgtatggaatggtcatcttctaagagaactttctgcacagccagaggttcatcggtttgcccttccagtgttacatggctttattaccatgcattcatgttctattaatggaaaatactttgattggattctcatctcgaggaggagctgtttcagagctggtgtgcgctattatgtaagaggaattgattcggaaggccatgcagctaactttgtagaaacagaacaaattgtgcactacaatgggagcaaagcttcgtttgtacagactcgaggatcaatacctgttttctggtcccaaagaccaaacctcaagtacaaaccactgccacagatcagcaaagtagcaaatcacatggacggtttccaaaggcattttgattcccaagtaattatttatggaaaacaagttataatcaatctgattaaccagaagggctcggagaagccacttgagcagacatttgcaacaatggtgtcttccttgggaagtggaatgatgagatacattgcctttgacttccataaggaatgtaaaaatatgagatgggatcgactaagtattttattggatcaggtagcagaaatgcaagatgaattaagttattttctagtggactctgctggccaggtggtggcaaaccaggaaggcgtgttccgaagcaattgcatggattgtctagatagaaccaatgtgatccagagtttgttagctcgtcgttcacttcaggcccaacttcagagactaggagttttgcatgtgggacaaaagcttgaagaacaagatgaatttgagaagattttcaaaaatgcctgggctgacaacgcaaatgcttgtgccaagcaatatgcgggaactggtgccttgaagactgactttaccagaactggaaagagaactcatttgggacttataatggatggctggaactcaatgatacgatattataagaacaacttttccgatggatttagacaagattccatagacttatttcttggaaactattcagtggatgaattagaatctcatagtcctttaagtgttccaagggactggaaattcctggctttgcctattatcatggttgttgccttttcaatgtgcattatctgtttgcttatggctggtgacacttggacagaaacactggcctatgtgctcttctggggagttgcaagcattggaacattttttatcattctttacaatggcaaagattttgtcgatgctcccagactggtccagaaagaaaagatagactgaatttgtatttgtggaaagcggcttggcttggaagattccattgtgcagaactggagtctttactgacccgctttccacatcagcccaaggtctttttaatgcctttatccaaaagcacatcttgtgctccatgcaggatgatgacagaattgatctgatgttactgccttgatggtctctttactattgggacagttagatttataatttgaagctattctgtaattaaaatataacctgaattcagcttgcagaatggaagctgaatctgttcattgtattctattgattgtcaatttaattagctgttgcagaataagtaatatattttaaaaacctagctcctttcattatttaaaacagcaaaattatttttgtagctcagtttcattattgtcattgtagaagcggtcactattagcaggcatacttttccacacatctttggacttttcttaaaagttcagtaataagctaactgtgtttataaaatgtaagtctcttacagacatcaagtagtttgatgagacagtctgtgacttcatgataggaaagaggaggatgaggtctggggttctttaaagtctctggtgggctgcctcatgactttaatcagcttgaactgccagtgcaccagcagtttaggtgtgatgagagaattcagatatactttatctttttaaaaaagtgtaaataaaatcaaagaatgtaaagtctatctcttacgctagaggtccaaagctgcctctgttttaaagattatcccaatgtggaagatgcccatgactggtcagctacttcctcctatacattttggtttctttgagggtcactcattgagacacgcaggcctctgagagggtcttgttctagatttcatattgcacttggagggtaacagctgctttttcacgcatggtactcttgatgtttttcactctgtcaaggattttgttggctatcaatgaatgtgtctaaaacttagtgcttccaggtagttatagtactccaaatcaaggaccaacttaaacgttaatttttgtgcaaaaacaaacctgaaaaatatgcttcggaaactgtgcatagttctaattgtaagtcagattgtatattcaaattgtaattaagagatttaaatattagaacggtatgtaaggtagtataattaccactattttaaaacaattcagttaaacactgctgcaatatttcagtgttgtgcttgaaaatatgtacagtttttttccaatattaataccttatgttgtccttaaatatttctaaaagcgcctttatttcagcattacctttttttcatcactatcttttataaaacattaatataagtcgttacttttagaaactaaaggaaataatagctggaaaaccctctgtagtttaaaatcagtcattaaactcacaatagggtaagtaaatatagccacctgttaacatgtaaataagcataatttgttccaaagatggaatattgaaacttagttcatgtctgctgtaaaatattatttaaatgctgctgggcatttcacttaaagaacttaatgtcaacagctacaacaaagaccaaatctgaactgctaatgtggctgctttgtagggaatggactaatatcagtgtgttagatcttaaggtatcagtatttcagaatcctgcgacgattttatttctaaattcatgtactgtatgtccataagtgaaaataaaatgtcatattcttttctaaaaaaaacnanaaaaaaaaaanttttgggncgctgngncccngaaaaagntttttgacacaactcgtgggggcccggcccagaggttagggaagtgccacgcgttccaggaaccggcctgaatgggttggttccccaaaaaagcccggggaccggcgttgaaacccagggtgggcagggtaagggcagggcataaccggg

SEQ ID NO: 295817 - DNA, 2654 bp, Homo sapiens
agggatcagtctgtggtaaaggtttaaggtcttctcaggactcttttcagcatgcatcttgcctggttatattaaccagaagggctcggagaagccacttgagcagacatttgcaacaatggtgtcttccttgggaagtggaatgatgagatacattgcctttgacttccataaggaatgtaaaaatatgagatgggatcgactaagtattttattggatcaggtagcagaaatgcaagatgaattaagttattttctagtggactctgctggccaggtggtggcaaaccaggaaggcgtgttccgaagcaattgcatggattgtctagatagaaccaatgtgatccagagtttgttagctcgtcgttcacttcaggcccaacttcagagactaggagttttgcatgtgggacaaaagcttgaagaacaagatgaatttgagaagattttcaaaaatgcctgggctgacaacgcaaatgcttgtgccaagcaatatgcgggaactggtgccttgaagactgactttaccagaactggaaagagaactcatttgggacttataatggatggctggaactcaatgatacgatattataagaacaacttttccgatggatttagacaagattccatagacttatttcttggaaactattcagtggatgaattagaatctcatagtcctttaagtgttccaagggactggaaattcctggctttgcctattatcatggttgttgccttttcaatgtgcattatctgtttgcttatggctggtgacacttggacagaaacactggcctatgtgctcttctggggagttgcaagcattggaacattttttatcattctttacaatggcaaagattttgtcgatgctcccagactggtccagaaagaaaagatagactgaatttgtatttgtggaaagcggcttggcttggaagattccattgtgcagaactggagtctttactgacccgctttccacatcagcccaaggtctttttaatgcctttatccaaaagcacatcttgtgctccatgcaggatgatgacagaattgatctgatgttactgccttgatggtctctttactattgggacagttagatttataatttgaagctattctgtaattaaaatataacctgaattcagcttgcagaatggaagctgaatctgttcattgtattctattgattgtcaatttaattagctgttgcagaataagtaatatattttaaaaacctagctcctttcattatttaaaacagcaaaattatttttgtagctcagtttcattattgtcattgtagaagcggtcactattagcaggcatacttttccacacatctttggacttttcttaaaagttcagtaataagctaactgtgtttataaaatgtaagtctcttacagacatcaagtagtttgatgagacagtctgtgacttcatgataggaaagaggaggatgaggtctggggttctttaaagtctctggtgggctgcctcatgactttaatcagcttgaactgccagtgcaccagcagtttaggtgtgatgagagaattcagatatactttatctttttaaaaaagtgtaaataaaatcaaagaatgtaaagtctatctcttacgctagaggtccaaagctgcctctgttttaaagattatcccaatgtggaagatgcccatgactggtcagctacttcctcctatacattttggtttctttgagggtcactcattgagacacgcaggcctctgagagggtcttgttctagatttcatattgcacttggagggtaacagctgctttttcacgcatggtactcttgatgtttttcactctgtcaaggattttgttggctatcaatgaatgtgtctaaaacttagtgcttccaggtagttatagtactccaaatcaaggaccaacttaaacgttaatttttgtgcaaaaacaaacctgaaaaatatgcttcggaaactgtgcatagttctaattgtaagtcagattgtatattcaaattgtaattaagagatttaaatattagaacggtatgtaaggtagtataattaccactattttaaaacaattcagttaaacactgctgcaatatttcagtgttgtgcttgaaaatatgtacagtttttttccaatattaataccttatgttgtccttaaatatttctaaaagcgcctttatttcagcattacctttttttcatcactatcttttataaaacattaatataagtcgttacttttagaaactaaaggaaataatagctggaaaaccctctgtagtttaaaatcagtcattaaactcacaatagggtaagtaaatatagccacctgttaacatgtaaataagcataatttgttccaaagatggaatattgaaacttagttcatgtctgctgtaaaatattatttaaatgctgctgggcatttcacttaaagaacttaatgtcaacagctacaacaaagaccaaatctgaactgctaatgtggctgctttgtagggaatggactaatatcagtgtgttagatcttaaggtatcagtatttcagaatcctgcgacgattttatttctaaattcatgtactgtatgtccataagtgaaaataaaatgtcatattcttttcta

SEQ ID NO: 295818 - DNA, 2719 bp, Homo sapiens
ggtgggaagaggctgggagctgcggccgctgtgccagggtgaccggtagagttgtagccgaggtggcggcgcggggcggggcgggcggagagagaaggaaggaggtggttgtgcaggatggcgacggcggcctacgagcagctgaagctgcatatcacacctgaaaaattttatgtggaagcttgtgatgatggagcagatgacgtacttaccattgaccgtgtgtccacagaggttacccttgcagtcaagaaagatgttcctccttcagctgtcacaagaccaatatttggtatactgggcacaatccatctggtggcaggtaattatcttatagtcattaccaaaaagataaaagtaggtgaatttttcagtcatgtagtctggaaagcaacagattttgatgtcctttcttataagaagacaatgttgcacttaactgatattcagttacaagataataaaaccttcctagcgatgctaaaccatgtcttgaatgtggatggattttacttttcaacaacatatgatttgacccatactttgcagcggctatccaacactagtcctgaattccaagaaatgagtctcttggaaagggcagatcagcggtttgtatggaatggtcatcttctaagagaactttctgcacagccagaggttcatcggtttgcccttccagtgttacatggctttattaccatgcattcatgttctattaatggaaaatactttgattggattctcatctcgaggaggagctgtttcagagctggtgtgcgctattatgtaagaggaattgattcggaaggccatgcagctaactttgtagaaacagaacaaattgtgcactacaatgggagcaaagcttcgtttgtacagactcgaggatcaatacctgttttctggtcccaaagaccaaacctcaagtacaaaccactgccacagatcagcaaagtagcaaatcacatggacggtttccaaaggcattttgattcccaagtaattatttatggaaaacaagttataatcaatctgattaaccagaagggctcggagaagccacttgagcagacatttgcaacaatggtgtcttccttgggaagtggaatgatgagatacattgcctttgacttccataaggaatgtaaaaatatgagatgggatcgactaagtattttattggatcaggtagcagaaatgcaagatgaattaagttattttctagtggactctgctggccaggtggtggcaaaccaggaaggcgtgttccgaagcaattgcatggattgtctagatagaaccaatgtgatccagagtttgttagctcgtcgttcacttcaggcccaacttcagagactaggagttttgcatgtgggacaaaagcttgaagaacaagatgaatttgagaagattttcaaaaatgcctgggctgacaacgcaaatgcttgtgccaagcaatatgcgggaactggtgccttgaagactgactttaccagaactggaaagagaactcatttgggacttataatggatggctggaactcaatgatacgatattataagaacaacttttccgatggatttagacaagattccatagacttatttcttggaaactattcagtggatgaattagaatctcatagtcctttaagtgttccaagggactggaaattcctggctttgcctattatcatggttgttgccttttcaatgtgcattatctgtttgcttatggctggtgacacttggacagaaacactggcctatgtgctcttctggggagttgcaagcattggaacattttttatcattctttacaatggcaaagattttgtcgatgctcccagactggtccagaaagaaaagatagactgaatttgtatttgtggaaagcggcttggcttggaagattccattgtgcagaactggagtctttactgacccgctttccacatcagcccaaggtctttttaatgcctttatccaaaagcacatcttgtgctccatgcaggatgatgacagaattgatctgatgttactgccttgatggtctctttactattgggacagttagatttataatttgaagctattctgtaattaaaatataacctgaattcagcttgcagaatggaagctgaatctgttcattgtattctattgattgtcaatttaattagctgttgcagaataagtaatatattttaaaaacctagctcctttcattatttaaaacagcaaaattatttttgtagctcagtttcattattgtcattgtagaagcggtcactattagcaggcatacttttccacacatctttggacttttcttaaaagttcagtaataagctaatctacaagcgtggttatggccaaaatccaataagaagcgaattgcttttgacagataacgctttgatgctcgatctcttggtaataccggcatcatctgctggaggattcgcttcactgagatctattctgtggaaaacgctttgagaaggcaataacttccgttggcgttaaatgtcttccccgaggtggtattagcaacagacccccctttcgtgtcatctggcttctgccccggggcccattccggcttctcacaaatcgcacggccgccccatattctagcgcgggcccacgcccccctcgtcaacaaaaaaaaggcgggtgactgtggcgccccctcttcgccaacagtaacacg

SEQ ID NO: 295819 - DNA, 807 bp, Homo sapiens
  misc_feature (671)..(671): n is a, c, g, or t
  misc_feature (681)..(681): n is a, c, g, or t
  misc_feature (683)..(683): n is a, c, g, or t
  misc_feature (687)..(687): n is a, c, g, or t
  misc_feature (692)..(692): n is a, c, g, or t
  misc_feature (696)..(696): n is a, c, g, or t
  misc_feature (700)..(700): n is a, c, g, or t
  misc_feature (705)..(705): n is a, c, g, or t
  misc_feature (723)..(724): n is a, c, g, or t
ggtgggaagaggctgggagctgcggccgctgtgccagggtgaccggtagagttgtagccgaggtggcggcgcggggcggggcgggcggagagagaaggaaggaggtggttgtgcaggatggcgacggcggcctacgagcagctgaagctgcatatcacacctgaaaaattttatgtggaagcttgtgatgatggagcagatgacgtacttaccattgaccgtgtgtccacagaggttacccttgcagtcaagaaagatgttcctccttcagctgtcacaagaccaatatttggtatactgggcacaatccatctggtggcaggtaattatcttatagtcattaccaaaaagataaaagtaggtgaatttttcagtcatgtagtctggaaagcaacagattttgatgtcctttcttataagaagacaatgttgcacttaactgatattcagttacaagataataaaaccttcctagcgatgctaaaccatgtcttgaatgtggatggattttacttttcaacaacatatgatttgacccatactttgcagcggctatccaacactagtcctgaattccaagaaatgagtctcttggaaagggcagatcagcggtttgtatggaatggtcatcttctaagagaactttctgcacagccagaggttcatcggtntgccctcccngngtancatgncttnattnccatncattcatgttctattaanngaaaatactttgactggtttctcatctaaagaataacgctgcagcgtgttgtaactggagcaatagcaactggagctgctgta

SEQ ID NO: 295820 - DNA, 877 bp, Homo sapiens
ggtgggaagaggctgggagctgcggccgctgtgccagggtgaccggtagagttgtagccgaggtggcggcgcggggcggggcgggcggagagagaaggaaggaggtggttgtgcaggatggcgacggcggcctacgagcagctgaagctgcatatcacacctgaaaaattttatgtggaagcttgtgatgatggagcagatgacgtacttaccattgaccgtgtgtccacagaggttacccttgcagtcaagaaagatgttcctccttcagctgtcacaagaccaatatttggtatactgggcacaatccatctggtggcaggtaattatcttatagtcattaccaaaaagataaaagtaggtgaatttttcagtcatgtagtctggaaagcaacagattttgatgtcctttcttataagaagacaatgttgcacttaactgatattcagttacaagataataaaaccttcctagcgatgctaaaccatgtcttgaatgtggatggattttacttttcaacaacatatgatttgacccatactttgcagcggctatccaacactagtcctgaattccaagaaatgagtctcttggaaagggcagatcagcggtttgtatggaatggtcatcttctaagagaactttctgcacagccagaggtaatgtacacgaaataaaatctgcttaattgttacagtccaagctttaattcaatgcatactataaagtgacttcctaatcaccaagaatttcgagaaacaattctaatttaactgtttataacttacaaacttggatcaggtctaccctgtcacatcattctaggttgaagaagcctaactattttactctgatcttctatagaagccttaaata

SEQ ID NO: 295821 - DNA, 1638 bp, Homo sapiens
ggtgggaagaggctgggagctgcggccgctgtgccagggtgaccggtagagttgtagccgaggtggcggcgcggggcggggcgggcggagagagaaggaaggaggtggttgtgcaggatggcgacggcggcctacgagcagctgaagctgcatatcacacctgaaaaattttatgtggaagcttgtgatgatggagcagatgacgtacttaccattgaccgtgtgtccacagaggttacccttgcagtcaagaaagatgttcctccttcagctgtcacaagaccaatatttggtatactgggcacaatccatctggtggcaggtaattatcttatagtcattaccaaaaagataaaagtaggtgaatttttcagtcatgtagtctggaaagcaacagattttgatgtcctttcttataagaagacaatgttgcacttaactgatattcagtaagaactggaaattgttactaattgcaacgcccgaagaagtagcatgggctggggagaggagggtgagggtgttgtggaatacaaagaatgctataattattttaacaacctatagagtaagatcactctacctacttttctacctaggcataaaaaatattttttaaatcatttgttgctcttgttttttttttttaaaagattcagttcttaaattatgcaatttcatgtggagagaagggaaaacagaaatgcacgggtactcaacaccagatttaacttcatatcctctttgtaaagaaataaaatataaatacctttgaagttctactcctcttaactcattcccttctttcccagagaggttttctctatttttaccacatgtgaatgtaagtgtgtgtgtgtgtttatgaaatgtgtatatattctttcaggcagttttccttttgcactattcctgtatgcacagatttcagtaaccatagtttagttaacaccagtacccaaacagcatggcttaaatttcagttactccagtttattaactgaagaattaacccaccaaagatgaaggtgcaaaaaaacaaaaagcaacaactctggaagagaaattgaaattgaacataaatggagcatagaagaagtagctgaccatgggaatgctgacactattcaccattcaagggactgtaggtatgcagccagaggtcctggtgcaggcgaactgaccgacattaatgatggagtggctgtgacgaaagggatgacagtatcccagagaaagtgatgcctgcaacagacttcccattaaaggaaaccttggagatatttcccaacattgaaagtgcaaaggataaaatgtcagaagttggtttagacttaggaaggtgtatgacagttcaccagggatagaagaaatattctgtatcttaatctatatgacaagaaggcggcaagcactgttcaagtctcttgataaatttttttacaaagaaaatattttttattctcggtgtttctaatgttttaaattatagtgtgctaaatattagttttacaatttgttcatttatgcttataatttactatatataacttacaagttacatctacaacgtaactatataagttaatatctataactaatatctataacttacaatagagtttttaatgttttgac

SEQ ID NO: 295822 - DNA, 744 bp, Homo sapiens
  misc_feature (608)..(608): n is a, c, g, or t
  misc_feature (618)..(618): n is a, c, g, or t
  misc_feature (620)..(620): n is a, c, g, or t
  misc_feature (624)..(624): n is a, c, g, or t
  misc_feature (629)..(629): n is a, c, g, or t
  misc_feature (633)..(633): n is a, c, g, or t
  misc_feature (637)..(637): n is a, c, g, or t
  misc_feature (642)..(642): n is a, c, g, or t
  misc_feature (660)..(661): n is a, c, g, or t
ggtgggaagaggctgggagctgcggccgctgtgccagggtgaccggtagagttgtagccgaggtggcggcgcggggcggggcgggcggagagagaaggaaggaggtggttgtgcaggatggcgacggcggcctacgagcagctgaagctgcatatcacacctgaaaaattttatgtggaagcttgtgatgatggagcagatgacgtacttaccattgaccgtgtgtccacagaggttacccttgcagtcaagaaagatgttcctccttcagctgtcacaagaccaatatttggtatactgggcacaatccatctggtggcaggtaattatcttatagtcattaccaaaaagataaaagtaggtgaatttttcagtcatgtagtctggaaagcaacagattttgatgtcctttcttataagaagacaatgttgcacttaactgatattcagttttcaacaacatatgatttgacccatactttgcagcggctatccaacactagtcctgaattccaagaaatgagtctcttggaaagggcagatcagcggtttgtatggaatggtcatcttctaagagaactttctgcacagccagaggttcatcggtntgccctcccngngtancatgncttnattnccatncattcatgttctattaanngaaaatactttgactggtttctcatctaaagaataacgctgcagcgtgttgtaactggagcaatagcaactggagctgctgta

SEQ ID NO: 295823 - DNA, 570 bp, Homo sapiens
cctgggtactaggaacttgctagaatgcagattcctggggcccaacagttgatgctttatcaagccctgcagaagattctggtactagccagggtttgagaaccactggtttaaaccttaattaagaggttcttatatttttcctgtgaatgtgctagtaaactttaatgttgccaaaatgtgctaaacagctgaaaactgggtctgatatcaacaaacgacttatttagctttttgtttcttaatatcaacaggtgacacttggacagaaacactggcctatgtgctcttctggggagttgcaagcattggaacattttttatcattctttacaatggcaaagattttgtcgatgctcccagactggtccagaaagaaaagatagactgaatttgtatttgtggaaagcggcttggcttggaagattccattgtgcagaactggagtctttactgacccgctttccacatcagcccaaggtctttttaatgcctttatccaaaagcacatcttgtgctccatgcaggatgatgacagaattgatctgatgttactgccttgatggtctc

SEQ ID NO: 295824 - DNA, 637 bp, Homo sapiens
  misc_feature (34)..(34): n is a, c, g, or t
taattcgatgcaagggacggcgtcttcattgtanattcactgtgcccgtcgttttacaatttacactcctgcccggcgtctctatggcctctgtgggcatcgccatctacacctccatgatgactagcgacaactactactacacccacagcatctggcacatcctgctggccgggagcgcagccttgctgctgccgccacctgaccagcccgccgagccctgggcctgctcgcagaaattcccctgccactatcagatctgcaagaacgatcgggaggaactgtacgcagtgacgtgacactggcctggggacagctgctgctctgatgacctcttcagccaggagctgtatcgagggggaggcgcctggtccagccctggacagattgatttccagctgaataaattggcctagataccaaaaaaaaaaaaacaaaaaaacaatgaaaaacaacacaaaaccacaacgggagacatattgactgaggtggggacgaaaaaagggcgatataacaggagagcccaggtgtccacagagcacaacaccgagccacaagagatctgcagcaagaggtgagactatcgcggcacccctatgggagaagccgatcacggacagggcgagtgcccctcata

SEQ ID NO: 295825 - DNA, 3648 bp, Homo sapiens
catgggcgccgggggcagaggcggaggcggcagaggcggaggcggcagaggctgcccgggcggcggcgggggccggcggcgcgggacgcgggccgggtagcgccgggccgagcgcggagccatgggccgggctggcaccgggaccgggggcgaggcggtggccgcggtggtggcggggccgctgctgctgctgctgcttgcccggcccccgcctgcctccgccggctacagcgggaagagcgaggtggggctggtgtccgagcacttctcacaggccccgcagaggctgtccttctacagctggtatggcagtgccaggctcttccgcttccgcgtgcccccagatgctgtgcttctacgctggctcctgcaggtctcccgggagagcggcgctgcctgcaccgacgcggagatcaccgtgcacttccgttccggcgcccctccggtcatcaacccgctgggcaccagcttcccggacgacaccgcggtgcagccctccttccaggtcggggtgccgctgagcaccgcaccgagaagcaatgcctccgtcaacgtttcccacccggcccccggggactggttcgtggccgcccacctgcccccctcatcccagaagatcgagttgaagggcttggctcccacctgtgcctacgtcttccagcctgaactgctggtcacgcgggtggtcgagatttccatcatggagccggacgtgccccttcctcagaccctcctctcccatcccagctacctcaaggtctttgtccccgattacacgcgggagcttctgctggagctgcgggactgcgtgtccaatgggagcctgggctgccccgtgcgtctcaccgtgggcccggtcaccctgcctagcaacttccagaaggtgctcacctgcaccggtgccccctggccctgccgcctgctgctgccctcaccgccctgggaccggtggctgcaagtgacagctgagagcctggtggggcccctcgggacagtggctttcagtgctgtagctgccctcacagcttgcaggccacggagcgtgaccgtccagccccttctgcagagcagccaaaaccagagcttcaatgcctcctctggtctgctgtccccgagccccgaccaccaggacctgggcaggagtggcagggtggaccgcagccccttctgcctcacaaactacccagtcacgcgggaggacatggacgtggtgtcggtgcacttccagcccctggacagggtctcggtgagggtgtgttcggacacgccctccgtgatgcggctgcgcctgaacaccggcatggacagcgggggttccctcaccatctccctgcgggccaacaagacagagatgcggaacgagaccgtcgtagtggcctgcgtgaatgctgcctcgcccttccttggcttcaatacttcgctcaactgcaccacagccttcttccagggctaccctttgtctctgagcgcctggtctcgcagggccaacctcatcatcccctacccagagacagacaactggtacctctccctgcagctcatgtgccctgagaatgctgaggactgtgagcaggctgtggtccacgtggagaccaccttgtacctggtgccctgtttgaacgattgtggaccctatggccagtgcctcctgctccgcagacacagctacctgtatgccagctgcagctgcaaggcaggctggcgtgggtggagctgcacggacaacagcacagcccagacggtggcccagcagagggcggccacactgctgctcacgctcagcaacctcatgttcctggcccccatcgccgtctcagtgcggcgattcttcctggtggaggcctccgtctacgcctacaccatgttcttctccacgttctaccacgcctgcgaccagcccggggaggcggtgctgtgcatcctcagctacgacacgctgcagtactgcgacttcttgggctccggggcggccatctgggtcaccatcctgtgcatggcacggctcaagacagtcctgaaatacgtgctgtttcttctgggtacactggtcatcgccatgtccttgcagctggaccgcaggggcatgtggaacatgctggggccctgcctctttgccttcgtgatcatggcctccatgtgggcttaccgctgcgggcaccggcgccagtgctaccccacctcgtggcagcgctgggccttctacctcctgcccggcgtctctatggcctctgtgggcatcgccatctacacctccatgatgactagcgacaactactactacacccacagcatctggcacatcctgctggccgggagcgcagccttgctgctgccgccacctgaccagcccgccgagccctgggcctgctcgcagaaattcccctgccactatcagatctgcaagaacgatcgggaggaactgtacgcagtgacgtgacactggcctggggacagctgctgctctgatgacctcttcagccaggagctgtatcgagggggaggcgcctggtccagccctggacagattgatttccagctgaataaattggcctagataccctcttacttcctcctactgaggagagggccacccctccctcacacgcacctctcctcgccagctgcctgctcgctgctgagatccctctgcagatcccagctgctgtctgcagtggcccctggggcctgggcttggttacttggagaccacaggtgcctgtgcgagggtggggctgtgtgctctgctggcctgtgggtggctagagatggggagaaggactccctatggtcctgttccctggcgaggctgtggtgagacccatggcgcccaggagccctgagcccaccactggggccgggagctgtggactccgagacccctgctcctggcccctgtgtggccctgatgccagcctgcctggggcatggaggatccccctctgctgctgtggtcaccatagggacgggagacggaggtttcccccagagctgatgggcactggggatgcaggctcccgccccgcccctccctttttcctggctctggagccttgggtccctgagaagagcttccttggactggggtgctctgctgctctgggggtttggcccagaaggaacccctacccagccctgtccacccaccccagcgttcctgggcccccctctgggagcttcctcttggtcccaggagctgcggtggtgtctgccccctgcactgggctctgtgccctgtgggtgttcaggagactggactgtctctgctcctcatgcaaaccttgtgggggaagcaatgaccaggagcagcacctggcccctccctgaggcctgtgagtgtctcggatccgccctggagaagtgagtggctgagacccgggtggggccctcctacccttggctctgggggcttcccttctgggtcttgtccgggatatggccttcctgaaggtcttacctcccccagccgccctgcacttgaccaccaaagcaatctctaagcttataaaggagaaacatgtatatatggggttttttggagtaaaggaaaattctaagatattaagacatatttttatgtagatctgatctatctgtgtttggtgaatttaatattctacattgatttttcaaactaaacgagtttttaca

SEQ ID NO: 295826 - DNA, 3555 bp, Homo sapiens
catgggcgccgggggcagaggcggaggcggcagaggcggaggcggcagaggctgcccgggcggcggcgggggccggcggcgcgggacgcgggccgggtagcgccgggccgagcgcggagccatgggccgggctggcaccgggaccgggggcgaggcggtggccgcggtggtggcggggccgctgctgctgctgctgcttgcccggcccccgcctgcctccgccggctacagcgggaagagcgaggtggggctggtgtccgagcacttctcacaggccccgcagaggctgtccttctacagctggtatggcagtgccaggctcttccgcttccgcgtgcccccagatgctgtgcttctacgctggctcctgcaggtctcccgggagagcggcgctgcctgcaccgacgcggagatcaccgtgcacttccgttccggcgcccctccggtcatcaacccgctgggcaccagcttcccggacgacaccgcggtgcagccctccttccaggtcggggtgccgctgagcaccgcaccgagaagcaatgcctccgtcaacgtttcccacccggcccccggggactggttcgtggccgcccacctgcccccctcatcccagaagatcgagttgaagggcttggctcccacctgtgcctacgtcttccagcctgaactgctggtcacgcgggtggtcgagatttccatcatggagccggacgtgccccttcctcagaccctcctctcccatcccagctacctcaaggtctttgtccccgattacacgcgggagcttctgctggagctgcgggactgcgtgtccaatgggagcctgggctgccccgtgcgtctcaccgtgggcccggtcaccctgcctagcaacttccagaaggtgctcacctgcaccggtgccccctggccctgccgcctgctgctgccctcaccgccctgggaccggtggctgcaagtgacagctgagagcctggtggggcccctcgggacagtggctttcagtgctgtagctgccctcacagcttgcaggccacggagcgtgaccgtccagccccttctgcagagcagccaaaaccagagcttcaatgcctcctctggtctgctgtccccgagccccgaccaccaggacctgggcaggagtggcagggtggaccgcagccccttctgcctcacaaactacccagtcacgcgggaggacatggacgtggtgtcggtgcacttccagcccctggacagggtctcggtgagggtgtgttcggacacgccctccgtgatgcggctgcgcctgaacaccggcatggacagcgggggttccctcaccatctccctgcgggccaacaagacagagatgcggaacgagaccgtcgtagtggcctgcgtgaatgctgcctcgcccttccttggcttcaatacttcgctcaactgcaccacagccttcttccagggctaccctttgtctctgagcgcctggtctcgcagggccaacctcatcatcccctacccagagacagacaactggtacctctccctgcagctcatgtgccctgagaatgctgaggactgtgagcaggctgtggtccacgtggagaccaccttgtacctggtgccctgtttgaacgattgtggaccctatggccagtgcctcctgctccgcagacacagctacctgtatgccagctgcagctgcaaggcaggctggcgtgggtggagctgcacggacaacagcacagcccagacggtggcccagcagagggcggccacactgctgctcacgctcagcaacctcatgttcctggcccccatcgccgtctcagtgcggcgattcttcctggtggaggcctccgtctacgcctacaccatgttcttctccacgttctaccacgcctgcgaccagcccggggaggcggtgctgtgcatcctcagctacgacacgctgcagtactgcgacttcttgggctccggggcggccatctgggtcaccatcctgtgcatggcacggctcaagacagtcctgaaatacgtgctgtttcttctgggtacactggtcatcgccatgtccttgcagctggaccgcaggggcatgtggaacatgctggggccctgcctctttgccttcgtgatcatggcctccatgtgggcttaccgctgcgggcaccggcgccagtgctaccccacctcgtggcagcgctgggccttctacctcctgcccggcgtctctatggcctctgtgggcatcgccatctacacctccatgatgactagcgacaactactactacacccacagcatctggcacatcctgctggccgggagcgcagccttgctgctgccgccacctgaccagcccgccgagccctgggcctgctcgcagaaattcccctgccactatcagatctgcaagaacgatcgggaggaactgtacgcagtgacgtgacactggcctggggacagctgctgctctgatgacctcttcagccaggagctgtatcgagggggaggcgcctggtccagccctggacagattgatttccagctgaataaattggcctagataccctcttacttcctcctactgaggagagggccacccctccctcacacgcacctctcctcgccagctgcctgctcgctgctgagatccctctgcagatcccagctgctgtctgcagtggcccctggggcctgggcttggttacttggagaccacaggtgcctgtgcgagggtggggctgtgtgctctgctggcctgtgggtggctagagatggggagaaggactccctatggtcctgttccctggcgaggctgtggtgagacccatggcgcccaggagccctgagcccaccactggggccgggagctgtggactccgagacccctgctcctggcccctgtgtggccctgatgccagcctgcctggggcatggaggatccccctctgctgctgtggtcaccatagggacgggagacggaggtttcccccagagctgatgggcactggggatgcaggctcccgccccgcccctccctttttcctggctctggagccttgggtccctgagaagagcttccttggactggggtgctctgctgctctgggggtttggcccagaaggaacccctacccagccctgtccacccaccccagcgttcctgggcccccctctgggagcttcctcttggtcccaggagctgcggtggtgtctgccccctgcactgggctctgtgccctgtgggtgttcaggagactggactgtctctgctcctcatgcaaaccttgtgggggaagcaatgaccaggagcagcacctggcccctccctgaggcctgtgagtgtctcggatccgccctggagaagtgagtggctgagacccgggtggggccctcctacccttggctctgggggcttcccttctgggtcttgtccgggatatggccttcctgaaggtcttacctcccccagccgccctgcacttgaccaccaaagcaatctctaagcttataaaggagaaacatgtatatatggggttttttggagtaaaggaaaattctaag

SEQ ID NO: 295827 - DNA, 3599 bp, Homo sapiens
catgggcgccgggggcagaggcggaggcggcagaggcggaggcggcagaggctgcccgggcggcggcgggggccggcggcgcgggacgcgggccgggtagcgccgggccgagcgcggagccatgggccgggctggcaccgggaccgggggcgaggcggtggccgcggtggtggcggggccgctgctgctgctgctgcttgcccggcccccgcctgcctccgccggctacagcgggaagagcgaggtggggctggtgtccgagcacttctcacaggccccgcagaggctgtccttctacagctggtatggcagtgccaggctcttccgcttccgcgtgcccccagatgctgtgcttctacgctggctcctgcaggtctcccgggagagcggcgctgcctgcaccgacgcggagatcaccgtgcacttccgttccggcgcccctccggtcatcaacccgctgggcaccagcttcccggacgacaccgcggtgcagccctccttccaggtcggggtgccgctgagcaccgcaccgagaagcaatgcctccgtcaacgtttcccacccggcccccggggactggttcgtggccgcccacctgcccccctcatcccagaagatcgagttgaagggcttggctcccacctgtgcctacgtcttccagcctgaactgctggtcacgcgggtggtcgagatttccatcatggagccggacgtgccccttcctcagaccctcctctcccatcccagctacctcaaggtctttgtccccgattacacgcgggagcttctgctggagctgcgggactgcgtgtccaatgggagcctgggctgccccgtgcgtctcaccgtgggcccggtcaccctgcctagcaacttccagaaggtgctcacctgcaccggtgccccctggccctgccgcctgctgctgccctcaccgccctgggaccggtggctgcaagtgacagctgagagcctggtggggcccctcgggacagtggctttcagtgctgtagctgccctcacagcttgcaggccacggagcgtgaccgtccagccccttctgcagagcagccaaaaccagagcttcaatgcctcctctggtctgctgtccccgagccccgaccaccaggacctgggcaggagtggcagggtggaccgcagccccttctgcctcacaaactacccagtcacgcgggaggacatggacgtggtgtcggtgcacttccagcccctggacagggtctcggtgagggtgtgttcggacacgccctccgtgatgcggctgcgcctgaacaccggcatggacagcgggggttccctcaccatctccctgcgggccaacaagacagagatgcggaacgagaccgtcgtagtggcctgcgtgaatgctgcctcgcccttccttggcttcaatacttcgctcaactgcaccacagccttcttccagggctaccctttgtctctgagcgcctggtctcgcagggccaacctcatcatcccctacccagagacagacaactggtacctctccctgcagctcatgtgccctgagaatgctgaggactgtgagcaggctgtggtccacgtggagaccaccttgtacctggtgccctgtttgaacgattgtggaccctatggccagtgcctcctgctccgcagacacagctacctgtatgccagctgcagctgcaaggcaggctggcgtgggtggagctgcacggacaacagcacagcccagacggtggcccagcagagggcggccacactgctgctcacgctcagcaacctcatgttcctggcccccatcgccgtctcagtgcggcgattcttcctggtggaggcctccgtctacgcctacaccatgttcttctccacgttctaccacgcctgcgaccagcccggggaggcggtgctgtgcatcctcagctacgacacgctgcagtactgcgacttcttgggctccggggcggccatctgggtcaccatcctgtgcatggcacggctcaagacagtcctgaaatacgtgctgtttcttctgggtacactggtcatcgccatgtccttgcagctggaccgcaggggcatgtggaacatgctggggccctgcctctttgccttcgtgatcatggcctccatgtgggcttaccgctgcgggcaccggcgccagtgctaccccacctcgtggcagcgctgggccttctacctcctgcccggcgtctctatggcctctgtgggcatcgccatctacacctccatgatgactagcgacaactactactacacccacagcatctggcacatcctgctggccgggagcgcagccttgctgctgccgccacctgaccagcccgccgagccctgggcctgctcgcagaaattcccctgccactatcagatctgcaagaacgatcgggaggaactgtacgcagtgacgtgacactggcctggggacagctgctgctctgatgacctcttcagccaggagctgtatcgagggggaggcgcctggtccagccctggacagattgatttccagctgaataaattggcctagataccctcttacttcctcctactgaggagagggccacccctccctcacacgcacctctcctcgccagctgcctgctcgctgctgagatccctctgcagatcccagctgctgtctgcagtggcccctggggcctgggcttggttacttggagaccacaggtgcctgtgcgagggtggggctgtgtgctctgctggcctgtgggtggctagagatggggagaaggactccctatggtcctgttccctggcgaggctgtggtgagacccatggcgcccaggagccctgagccctgtgtggccctgatgccagcctgcctggggcatggaggatccccctctgctgctgtggtcaccatagggacgggagacggaggtttcccccagagctgatgggcactggggatgcaggctcccgccccgcccctccctttttcctggctctggagccttgggtccctgagaagagcttccttggactggggtgctctgctgctctgggggtttggcccagaaggaacccctacccagccctgtccacccaccccagcgttcctgggcccccctctgggagcttcctcttggtcccaggagctgcggtggtgtctgccccctgcactgggctctgtgccctgtgggtgttcaggagactggactgtctctgctcctcatgcaaaccttgtgggggaagcaatgaccaggagcagcacctggcccctccctgaggcctgtgagtgtctcggatccgccctggagaagtgagtggctgagacccgggtggggccctcctacccttggctctgggggcttcccttctgggtcttgtccgggatatggccttcctgaaggtcttacctcccccagccgccctgcacttgaccaccaaagcaatctctaagcttataaaggagaaacatgtatatatggggttttttggagtaaaggaaaattctaagatattaagacatatttttatgtagatctgatctatctgtgtttggtgaatttaatattctacattgatttttcaaactaaacgagtttttaca

SEQ ID NO: 295828 - DNA, 3330 bp, Homo sapiens
catgggcgccgggggcagaggcggaggcggcagaggcggaggcggcagaggctgcccgggcggcggcgggggccggcggcgcgggacgcgggccgggtagcgccgggccgagcgcggagccatgggccgggctggcaccgggaccgggggcgaggcggtggccgcggtggtggcggggccgctgctgctgctgctgcttgcccggcccccgcctgcctccgccggctacagcgggaagagcgaggtggggctggtgtccgagcacttctcacaggccccgcagaggctgtccttctacagctggtatggcagtgccaggctcttccgcttccgcgtgcccccagatgctgtgcttctacgctggctcctgcaggtctcccgggagagcggcgctgcctgcaccgacgcggagatcaccgtgcacttccgttccggcgcccctccggtcatcaacccgctgggcaccagcttcccggacgacaccgcggtgcagccctccttccaggtcggggtgccgctgagcaccgcaccgagaagcaatgcctccgtcaacgtttcccacccggcccccggggactggttcgtggccgcccacctgcccccctcatcccagaagatcgagttgaagggcttggctcccacctgtgcctacgtcttccagcctgaactgctggtcacgcgggtggtcgagatttccatcatggagccggacgtgccccttcctcagaccctcctctcccatcccagctacctcaaggtctttgtccccgattacacgcgggagcttctgctggagctgcgggactgcgtgtccaatgggagcctgggctgccccgtgcgtctcaccgtgggcccggtcaccctgcctagcaacttccagaaggtgctcacctgcaccggtgccccctggccctgccgcctgctgctgccctcaccgccctgggaccggtggctgcaagtgacagctgagagcctggtggggcccctcgggacagtggctttcagtgctgtagctgccctcacagcttgcaggccacggagcgtgaccgtccagccccttctgcagagcagccaaaaccagagcttcaatgcctcctctggtctgctgtccccgagccccgaccaccaggacctgggcaggagtggcagggtggaccgcagccccttctgcctcacaaactacccagtcacgcgggaggacatggacgtggtgtcggtgcacttccagcccctggacagggtctcggtgagggtgtgttcggacacgccctccgtgatgcggctgcgcctgaacaccggcatggacagcgggggttccctcaccatctccctgcgggccaacaagacagagatgcggaacgagaccgtcgtagtggcctgcgtgaatgctgcctcgcccttccttggcttcaatacttcgctcaactgcaccacagccttcttccagggctaccctttgtctctgagcgcctggtctcgcagggccaacctcatcatcccctacccagagacagacaactggtacctctccctgcagctcatgtgccctgagaatgctgaggactgtgagcaggctgtggtccacgtggagaccaccttgtacctggtgccctgtttgaacgattgtggaccctatggccagtgcctcctgctccgcagacacagctacctgtatgccagctgcagctgcaaggcaggctggcgtgggtggagctgcacggacaacagcacagcccagacggtggcccagcagagggcggccacactgctgctcacgctcagcaacctcatgttcctggcccccatcgccgtctcagtgcggcgattcttcctggtggaggcctccgtctacgcctacaccatgttcttctccacgttctaccacgcctgcgaccagcccggggaggcggtgctgtgcatcctcagctacgacacgctgcagtactgcgacttcttgggctccggggcggccatctgggtcaccatcctgtgcatggcacggctcaagacagtcctgaaatacgtgctgtttcttctgggtacactggtcatcgccatgtccttgcagctggaccgcaggggcatgtggaacatgctggggccctgcctctttgccttcgtgatcatggcctccatgtgggcttaccgctgcgggcaccggcgccagtgctaccccacctcgtggcagcgctgggccttctacctcctgcccggcgtctctatggcctctgtgggcatcgccatctacacctccatgatgactagcgacaactactactacacccacagcatctggcacatcctgctggccgggagcgcagccttgctgctgccgccacctgaccagcccgccgagccctgggcctgctcgcagaaattcccctgccactatcagatctgcaagaacgatcgggaggaactgtacgcagtgacgtgacactggcctggggacagctgctgctctgatgacctcttcagccaggagctgtatcgagggggaggcgcctggtccagccctggacagattgatttccagctgaataaattggcctagataccctcttacttcctcctactgaggagagggccacccctccctcacacgcacctctcctcgccagctgcctgctcgctgctgagatccctctgcagatcccagctgctgtctgcagtggcccctggggcctgggcttggttacttggagaccacaggtgcctgtgcgagggtggggctgtgtgctctgctggcctgtgggtggctagagatggggagaaggactccctatggtcctgttccctggcgaggctgtggtgagacccatggcgcccaggagccctgagcccaccactggggccgggagctgtggactccgagacccctgctcctggcccctgtgtggccctgatgccagcctgcctggggcatggaggatccccctctgctgctgtggtcaccatagggacgggagacggaggtttcccccagagctgatggcccctccctgaggcctgtgagtgtctcggatccgccctggagaagtgagtggctgagacccgggtggggccctcctacccttggctctgggggcttcccttctgggtcttgtccgggatatggccttcctgaaggtcttacctcccccagccgccctgcacttgaccaccaaagcaatctctaagcttataaaggagaaacatgtatatatggggttttttggagtaaaggaaaattctaagatattaagacatatttttatgtagatctgatctatctgtgtttggtgaatttaatattctacattgatttttcaaactaaacgagtttttaca

SEQ ID NO: 295829 - DNA, 3289 bp, Homo sapiens
  misc_feature (23)..(23): n is a, c, g, or t
  misc_feature (43)..(43): n is a, c, g, or t
taggctaggtacgaggctgggtnggtgtcttctacgctgctgnaccgacgcggagataccggcacttccgttccggcgcccctccggtcatcaacccgctgggcaccagcttcccggacgacaccgcggtgcagccctccttccaggtcggggtgccgctgagcaccgcaccgagaagcaatgcctccgtcaacgtttcccacccggcccccggggactggttcgtggccgcccacctgcccccctcatcccagaagatcgagttgaagggcttggctcccacctgtgcctacgtcttccagcctgaactgctggtcacgcgggtggtcgagatttccatcatggagccggacgtgccccttcctcagaccctcctctcccatcccagctacctcaaggtctttgtccccgattacacgcgggagcttctgctggagctgcgggactgcgtgtccaatgggagcctgggctgccccgtgcgtctcaccgtgggcccggtcaccctgcctagcaacttccagaaggtgctcacctgcaccggtgccccctggccctgccgcctgctgctgccctcaccgccctgggaccggtggctgcaagtgacagctgagagcctggtggggcccctcgggacagtggctttcagtgctgtagctgccctcacagcttgcaggccacggagcgtgaccgtccagccccttctgcagagcagccaaaaccagagcttcaatgcctcctctggtctgctgtccccgagccccgaccaccaggacctgggcaggagtggcagggtggaccgcagccccttctgcctcacaaactacccagtcacgcgggaggacatggacgtggtgtcggtgcacttccagcccctggacagggtctcggtgagggtgtgttcggacacgccctccgtgatgcggctgcgcctgaacaccggcatggacagcgggggttccctcaccatctccctgcgggccaacaagacagagatgcggaacgagaccgtcgtagtggcctgcgtgaatgctgcctcgcccttccttggcttcaatacttcgctcaactgcaccacagccttcttccagggctaccctttgtctctgagcgcctggtctcgcagggccaacctcatcatcccctacccagagacagacaactggtacctctccctgcagctcatgtgccctgagaatgctgaggactgtgagcaggctgtggtccacgtggagaccaccttgtacctggtgccctgtttgaacgattgtggaccctatggccagtgcctcctgctccgcagacacagctacctgtatgccagctgcagctgcaaggcaggctggcgtgggtggagctgcacggacaacagcacagcccagacggtggcccagcagagggcggccacactgctgctcacgctcagcaacctcatgttcctggcccccatcgccgtctcagtgcggcgattcttcctggtggaggcctccgtctacgcctacaccatgttcttctccacgttctaccacgcctgcgaccagcccggggaggcggtgctgtgcatcctcagctacgacacgctgcagtactgcgacttcttgggctccggggcggccatctgggtcaccatcctgtgcatggcacggctcaagacagtcctgaaatacgtgctgtttcttctgggtacactggtcatcgccatgtccttgcagctggaccgcaggggcatgtggaacatgctggggccctgcctctttgccttcgtgatcatggcctccatgtgggcttaccgctgcgggcaccggcgccagtgctaccccacctcgtggcagcgctgggccttctacctcctgcccggcgtctctatggcctctgtgggcatcgccatctacacctccatgatgactagcgacaactactactacacccacagcatctggcacatcctgctggccgggagcgcagccttgctgctgccgccacctgaccagcccgccgagccctgggcctgctcgcagaaattcccctgccactatcagatctgcaagaacgatcgggaggaactgtacgcagtgacgtgacactggcctggggacagctgctgctctgatgacctcttcagccaggagctgtatcgagggggaggcgcctggtccagccctggacagattgatttccagctgaataaattggcctagataccctcttacttcctcctactgaggagagggccacccctccctcacacgcacctctcctcgccagctgcctgctcgctgctgagatccctctgcagatcccagctgctgtctgcagtggcccctggggcctgggcttggttacttggagaccacaggtgcctgtgcgagggtggggctgtgtgctctgctggcctgtgggtggctagagatggggagaaggactccctatggtcctgttccctggcgaggctgtggtgagacccatggcgcccaggagccctgagcccaccactggggccgggagctgtggactccgagacccctgctcctggcccctgtgtggccctgatgccagcctgcctggggcatggaggatccccctctgctgctgtggtcaccatagggacgggagacggaggtttcccccagagctgatgggcactggggatgcaggctcccgccccgcccctccctttttcctggctctggagccttgggtccctgagaagagcttccttggactggggtgctctgctgctctgggggtttggcccagaaggaacccctacccagccctgtccacccaccccagcgttcctgggcccccctctgggagcttcctcttggtcccaggagctgcggtggtgtctgccccctgcactgggctctgtgccctgtgggtgttcaggagactggactgtctctgctcctcatgcaaaccttgtgggggaagcaatgaccaggagcagcacctggcccctccctgaggcctgtgagtgtctcggatccgccctggagaagtgagtggctgagacccgggtggggccctcctacccttggctctgggggcttcccttctgggtcttgtccgggatatggccttcctgaaggtcttacctcccccagccgccctgcacttgaccaccaaagcaatctctaagcttataaaggagaaacatgtatatatggggttttttggagtaaaggaaaattctaagatattaagacatatttttatgtagatctgatctatctgtgtttggtgaatttaatattctacattgatttttcaaactaaacgagtttttaca

SEQ ID NO: 295830 - DNA, 3721 bp, Homo sapiens
catgggcgccgggggcagaggcggaggcggcagaggcggaggcggcagaggctgcccgggcggcggcgggggccggcggcgcgggacgcgggccgggtagcgccgggccgagcgcggagccatgggccgggctggcaccgggaccgggggcgaggcggtggccgcggtggtggcggggccgctgctgctgctgctgcttgcccggcccccgcctgcctccgccggctacagcgggaagagcgaggtggggctggtgtccgagcacttctcacaggccccgcagaggctgtccttctacagctggtatggcagtgccaggctcttccgcttccgcgtgcccccagatgctgtgcttctacgctggctcctgcaggtctcccgggagagcggcgctgcctgcaccgacgcggagatcaccgtgcacttccgttccggcgcccctccggtcatcaacccgctgggcaccagcttcccggacgacaccgcggtgcagccctccttccaggtcggggtgccgctgagcaccgcaccgagaagcaatgcctccgtcaacgtttcccacccggcccccggggactggttcgtggccgcccacctgcccccctcatcccagaagatcgagttgaagggcttggctcccacctgtgcctacgtcttccagcctgaactgctggtcacgcgggtggtcgagatttccatcatggagccggacgtgccccttcctcagaccctcctctcccatcccagctacctcaaggtctttgtccccgattacacgcgggagcttctgctggagctgcgggactgcgtgtccaatgggagcctgggctgccccgtgcgtctcaccgtgggcccggtcaccctgcctagcaacttccagaaggtgctcacctgcaccggtgccccctggccctgccgcctgctgctgccctcaccgccctgggaccggtggctgcaagtgacagctgagagcctggtggggcccctcgggacagtggctttcagtgctgtagctgccctcacagcttgcaggccacggagcgtgaccgtccagccccttctgcagagcagccaaaaccagagcttcaatgcctcctctggtctgctgtccccgagccccgaccaccaggacctgggcaggagtggcagggtggaccgcagccccttctgcctcacaaactacccagtcacgcgggaggacatggacgtggtgtcggtgcacttccagcccctggacagggtctcggtgagggtgtgttcggacacgccctccgtgatgcggctgcgcctgaacaccggcatggacagcgggggttccctcaccatctccctgcgggccaacaagacagagatgcggaacgagaccgtcgtagtggcctgcgtgaatgctgcctcgcccttccttggcttcaatacttcgctcaactgcaccacagccttcttccagggctaccctttgtctctgagcgcctggtctcgcagggccaacctcatcatcccctacccagagacagacaactggtacctctccctgcagctcatgtgccctgagaatgctgacctgttgggagcgctggtggcagctgggctgtcagatcactgcaccagctttcctgtggccccttcctcaaagggactgtgagcaggctgtggtccacgtggagaccaccttgtacctggtgccctgtttgaacgattgtggaccctatggccagtgcctcctgctccgcagacacagctacctgtatgccagctgcagctgcaaggcaggctggcgtgggtggagctgcacggacaacagcacagcccagacggtggcccagcagagggcggccacactgctgctcacgctcagcaacctcatgttcctggcccccatcgccgtctcagtgcggcgattcttcctggtggaggcctccgtctacgcctacaccatgttcttctccacgttctaccacgcctgcgaccagcccggggaggcggtgctgtgcatcctcagctacgacacgctgcagtactgcgacttcttgggctccggggcggccatctgggtcaccatcctgtgcatggcacggctcaagacagtcctgaaatacgtgctgtttcttctgggtacactggtcatcgccatgtccttgcagctggaccgcaggggcatgtggaacatgctggggccctgcctctttgccttcgtgatcatggcctccatgtgggcttaccgctgcgggcaccggcgccagtgctaccccacctcgtggcagcgctgggccttctacctcctgcccggcgtctctatggcctctgtgggcatcgccatctacacctccatgatgactagcgacaactactactacacccacagcatctggcacatcctgctggccgggagcgcagccttgctgctgccgccacctgaccagcccgccgagccctgggcctgctcgcagaaattcccctgccactatcagatctgcaagaacgatcgggaggaactgtacgcagtgacgtgacactggcctggggacagctgctgctctgatgacctcttcagccaggagctgtatcgagggggaggcgcctggtccagccctggacagattgatttccagctgaataaattggcctagataccctcttacttcctcctactgaggagagggccacccctccctcacacgcacctctcctcgccagctgcctgctcgctgctgagatccctctgcagatcccagctgctgtctgcagtggcccctggggcctgggcttggttacttggagaccacaggtgcctgtgcgagggtggggctgtgtgctctgctggcctgtgggtggctagagatggggagaaggactccctatggtcctgttccctggcgaggctgtggtgagacccatggcgcccaggagccctgagcccaccactggggccgggagctgtggactccgagacccctgctcctggcccctgtgtggccctgatgccagcctgcctggggcatggaggatccccctctgctgctgtggtcaccatagggacgggagacggaggtttcccccagagctgatgggcactggggatgcaggctcccgccccgcccctccctttttcctggctctggagccttgggtccctgagaagagcttccttggactggggtgctctgctgctctgggggtttggcccagaaggaacccctacccagccctgtccacccaccccagcgttcctgggcccccctctgggagcttcctcttggtcccaggagctgcggtggtgtctgccccctgcactgggctctgtgccctgtgggtgttcaggagactggactgtctctgctcctcatgcaaaccttgtgggggaagcaatgaccaggagcagcacctggcccctccctgaggcctgtgagtgtctcggatccgccctggagaagtgagtggctgagacccgggtggggccctcctacccttggctctgggggcttcccttctgggtcttgtccgggatatggccttcctgaaggtcttacctcccccagccgccctgcacttgaccaccaaagcaatctctaagcttataaaggagaaacatgtatatatggggttttttggagtaaaggaaaattctaagatattaagacatatttttatgtagatctgatctatctgtgtttggtgaatttaatattctacattgatttttcaaactaaacgagtttttaca

SEQ ID NO: 295831 - DNA, 3531 bp, Homo sapiens
catgggcgccgggggcagaggcggaggcggcagaggcggaggcggcagaggctgcccgggcggcggcgggggccggcggcgcgggacgcgggccgggtagcgccgggccgagcgcggagccatgggccgggctggcaccgggaccgggggcgaggcggtggccgcggtggtggcggggccgctgctgctgctgctgcttgcccggcccccgcctgcctccgccggctacagcgggaagagcgaggtggggctggtgtccgagcacttctcacaggccccgcagaggctgtccttctacagctggtatggcagtgccaggctcttccgcttccgcgtgcccccagatgctgtgcttctacgctggctcctgcaggtctcccgggagagcggcgctgcctgcaccgacgcggagatcaccgtgcacttccgttccggcgcccctccggtcatcaacccgctgggcaccagcttcccggacgacaccgcggtgcagccctccttccaggtcggggtgccgctgagcaccgcaccgagaagcaatgcctccgtcaacgtttcccacccggcccccggggactggttcgtggccgcccacctgcccccctcatcccagaagatcgagttgaagggcttggctcccacctgtgcctacgtcttccagcctgaactgctggtcacgcgggtggtcgagatttccatcatggagccggacgtgccccttcctcagaccctcctctcccatcccagctacctcaaggtctttgtccccgattacacgcgggagcttctgctggagctgcgggactgcgtgtccaatgggagcctgggctgccccgtgcgtctcaccgtgggcccggtcaccctgcctagcaacttccagaaggtgctcacctgcaccggtgccccctggccctgccgcctgctgctgccctcaccgccctgggaccggtggctgcaagtgacagctgagagcctggtggggcccctcgggacagtggctttcagtgctgtagctgccctcacagcttgcaggccacggagcgtgaccgtccagccccttctgcagagcagccaaaaccagagcttcaatgcctcctctggtctgctgtccccgagccccgaccaccaggacctgggcaggagtggcagggtggaccgcagccccttctgcctcacaaactacccagtcacgcgggaggacatggacgtggtgtcggtgcacttccagcccctggacagggtctcggtgagggtgtgttcggacacgccctccgtgatgcggctgcgcctgaacaccggcatggacagcgggggttccctcaccatctccctgcgggccaacaagacagagatgcggaacgagaccgtcgtagtggcctgcgtgaatgctgcctcgcccttccttggcttcaatacttcgctcaactgcaccacagccttcttccagggctaccctttgtctctgagcgcctggtctcgcagggccaacctcatcatcccctacccagagacagacaactggtacctctccctgcagctcatgtgccctgagaatgctgaggactgtgagcaggctgtggtccacgtggagaccaccttgtacctggtgccctgtttgaacgattgtggaccctatggccagtgcctcctgctccgcagacacagctacctgtatgccagctgcagctgcaaggcaggctggcgtgggtggagctgcacggacaacagcacagcccagacggtggcccagcagagggcggccacactgctgctcacgctcagcaacctcatgttcctggcccccatcgccgtctcagtgcggcgattcttcctggtggaggcctccgtctacgcctacaccatgttcttctccacgttctaccacgcctgcgaccagcccggggaggcggtgctgtgcatcctcagctacgacacgctgcagtactgcgacttcttgggctccggggcggccatctgggtcaccatcctgtgcatggcacggctcaagacagtcctgaaatacgcttaccgctgcgggcaccggcgccagtgctaccccacctcgtggcagcgctgggccttctacctcctgcccggcgtctctatggcctctgtgggcatcgccatctacacctccatgatgactagcgacaactactactacacccacagcatctggcacatcctgctggccgggagcgcagccttgctgctgccgccacctgaccagcccgccgagccctgggcctgctcgcagaaattcccctgccactatcagatctgcaagaacgatcgggaggaactgtacgcagtgacgtgacactggcctggggacagctgctgctctgatgacctcttcagccaggagctgtatcgagggggaggcgcctggtccagccctggacagattgatttccagctgaataaattggcctagataccctcttacttcctcctactgaggagagggccacccctccctcacacgcacctctcctcgccagctgcctgctcgctgctgagatccctctgcagatcccagctgctgtctgcagtggcccctggggcctgggcttggttacttggagaccacaggtgcctgtgcgagggtggggctgtgtgctctgctggcctgtgggtggctagagatggggagaaggactccctatggtcctgttccctggcgaggctgtggtgagacccatggcgcccaggagccctgagcccaccactggggccgggagctgtggactccgagacccctgctcctggcccctgtgtggccctgatgccagcctgcctggggcatggaggatccccctctgctgctgtggtcaccatagggacgggagacggaggtttcccccagagctgatgggcactggggatgcaggctcccgccccgcccctccctttttcctggctctggagccttgggtccctgagaagagcttccttggactggggtgctctgctgctctgggggtttggcccagaaggaacccctacccagccctgtccacccaccccagcgttcctgggcccccctctgggagcttcctcttggtcccaggagctgcggtggtgtctgccccctgcactgggctctgtgccctgtgggtgttcaggagactggactgtctctgctcctcatgcaaaccttgtgggggaagcaatgaccaggagcagcacctggcccctccctgaggcctgtgagtgtctcggatccgccctggagaagtgagtggctgagacccgggtggggccctcctacccttggctctgggggcttcccttctgggtcttgtccgggatatggccttcctgaaggtcttacctcccccagccgccctgcacttgaccaccaaagcaatctctaagcttataaaggagaaacatgtatatatggggttttttggagtaaaggaaaattctaagatattaagacatatttttatgtagatctgatctatctgtgtttggtgaatttaatattctacattgatttttcaaactaaacgagtttttaca

SEQ ID NO: 295832 - DNA, 2317 bp, Homo sapiens
catgggcgccgggggcagaggcggaggcggcagaggcggaggcggcagaggctgcccgggcggcggcgggggccggcggcgcgggacgcgggccgggtagcgccgggccgagcgcggagccatgggccgggctggcaccgggaccgggggcgaggcggtggccgcggtggtggcggggccgctgctgctgctgctgcttgcccggcccccgcctgcctccgccggctacagcgggaagagcgaggtggggctggtgtccgagcacttctcacaggccccgcagaggctgtccttctacagctggtatggcagtgccaggctcttccgcttccgcgtgcccccagatgctgtgcttctacgctggctcctgcaggtctcccgggagagcggcgctgcctgcaccgacgcggagatcaccgtgcacttccgttccggcgcccctccggtcatcaacccgctgggcaccagcttcccggacgacaccgcggtgcagccctccttccaggtcggggtgccgctgagcaccgcaccgagaagcaatgcctccgtcaacgtttcccacccggcccccggggactggttcgtggccgcccacctgcccccctcatcccagaagatcgagttgaagggcttggctcccacctgtgcctacgtcttccagcctgaactgctggtcacgcgggtggtcgagatttccatcatggagccggacgtgccccttcctcagaccctcctctcccatcccagctacctcaaggtctttgtccccgattacacgcgggagcttctgctggagctgcgggactgcgtgtccaatgggagcctgggctgccccgtgcgtctcaccgtgggcccggtcaccctgcctagcaacttccagaaggtgctcacctgcaccggtgccccctggccctgccgcctgctgctgccctcaccgccctgggaccggtggctgcaagtgacagctgagagcctggtggggcccctcgggacagtggctttcagtgctgtagctgccctcacagcttgcaggccacggagcgtgaccgtccagccccttctgcagagcagccaaaaccagagcttcaatgcctcctctggtctgctgtccccgagccccgaccaccaggacctgggcaggagtggcagggtggaccgcagccccttctgcctcacaaactacccagtcacgcgggaggacatggacgtggtgtcggtgcacttccagcccctggacagggtctcggtgagggtgtgttcggacacgccctccgtgatgcggctgcgcctgaacaccggcatggacagcgggggttccctcaccatctccctgcgggccaacaagacagagatgcggaacgagaccgtcgtagtggcctgcgtgaatgctgcctcgcccttccttggcttcaatacttcgctcaactgcaccacagccttcttccagggctaccctttgtctctgagcgcctggtctcgcagggccaacctcatcatcccctacccagagacagacaactggtacctctccctgcagctcatgtgccctgagaatgctgaggactgtgagcaggctgtggtccacgtggagaccaccttgtacctggtgccctgtttgaacgattgtggaccctatggccagtgcctcctgctccgcagacacagctacctgtatgccagctgcagctgcaaggcaggctggcgtgggtggagctgcacggacaacagcacagcccagacggtggcccagcagagggcggccacactgctgctcacgctcagcaacctcatgttcctggcccccatcgccgtctcagtgcggcgattcttcctggtggaggcctccgtctacgcctacaccatgttcttctccacgttctaccacgcctgcgaccagcccggggaggcggtgctgtgcatcctcagctacgacacgctgcagtactgcgacttcttgggctccggggcggccatctgggtcaccatcctgtgcatggcacggctcaagacagtcctgaaatacgtgctgtttcttctgggtacactggtcatcgccatgtccttgcagctggaccgcaggggcatgtggaacatgctggggccctgcctctttgccttcgtgatcatggcctccatgtgggtaaggagccgggctggctggcactgctgcccaggtgctcggagaagagagcctggccccttgctctagccacgttcctggtcctgctccaaccagtgaatgcccatatctgctgggggttgccatggcacccacagaggcccagcatggctgtgtccctgaggcctgggcctgagg

SEQ ID NO: 295833 - DNA, 2221 bp, Homo sapiens
  misc_feature (32)..(32): n is a, c, g, or t
ctagaggatcccccgctctcatagcggggaangggtgggctttgcgaagatggcggcgctgggggtgctggagtccgacctgccaagtgccgtgacacttctgaaaaatctccaggagcaagtgatggctgtaactgcacaagtgaaatcactgacacaaaaagttcaagctggtgcctatcctacagaaaagggtctcagcttcttggaagtgaaagaccagctgctgctcatgtaccttatggatttgacccacctcattctggacaaagcctcaggaggatctcttcagggacatgatgcagttttgagactggtagagattcgaacggttttggaaaagcttcgtcccttggaccaaaagctgaagtatcaaattgacaagctgatcaagactgcagtgacaggcagccttagtgagaatgacccacttcgttttaagcctcatcccagcaatatgatgagcaagttgagctctgaggatgaggaggaagatgaagcagaagatgaccagtctgaggcttcagggaagaaatctgtgaagggagtgtctaagaaatatgttcctccacgcttggttccagtacattatgatgaaacagaagctgagcgggagaagaagcgtctagaacgagccaagagacgggcattgagcagctctgtcattcgtgaacttaaggagcagtactcagatgctccagaggaaatccgtgatgctcggcatccccatgttacccgccagagtcaggaggaccaacacaggattaactatgaggagagcatgatggtgcgtttgagcgtcagtaagcgagagaaaggacggcgaaaacgagcaaatgtcatgagctcacaacttcattcccttacacacttcagtgacatcagtgctttgacagggggaactgttcatcttgatgaggatcagaatcctattaagaagcggaagaagatacctcagaaaggtcggaagaaaaaaggtcagtgaactgctgggacttaggtgatcaggtgcaaggtggggagtacaaattgagtctctttggatttgccattctgggtctcaccaagccctgtagtatctcttccatactgggcaataatctccttaggtgggcttttattttttgctttcctgagctggaaatcagcatcattcacaaaatgaatctctggattctgcctctaaggtcccacagctcctgttcaggcttccctaaatagaactggtaaagtgtcacttgaaggaaccattatcccatttcaattttattcctacttctcgtcttttgtcctgggaagatattcagggtactgcctaggagaccccacccctgtgagcccttccctctagatgtcctgttttcctgtccctttagcttttccaactgtcctttgcctcattcttggtttcccttcctttcaggttttcggaggcggcggtgattatgggtgtacatatttgtatattttttgtcatcctgagatacttctaatttcattgtatataggtggttttccctggaattcattaattgtttgctttggacatgtggaaagagccttactaataaaattgattttacttatgaattaaagcccctttttgcacatgtattgtacgactggagtcgttgggtttgggatatttttggtgagtggttggtgaaaagggaaattttttttggaagtgcaaaacatttgtattgttttctttgataatatatttttcccaaaaactaaaaattggttacgtcacaaaaagtattgagagacgaggctggtataatcaactctttcaacccatgttgccacaacttcctgtatgatttgttataatacaatacagattgagatattaacacatgaattttaggttttattagtgttatctgggctggccaccaggtggcataagtggttcaagaaacttgagcttggctgtaatcaaaagcaagatagaacctttccacatcagcaagattattcttatctccacttctctgaatgtttttcatttctttctgaaatagcatgaacataaggctgatctttggtcagttactgagggagtttgtagaaaatagtagagtgagtaagaaggctagagtgaagagtcagtatagtcttgtgtttttcagactctgacccccacccccccgccttcaactgagggtcattttaccagagtcaataaaggccaacccttctataaagagctggc

SEQ ID NO: 295834 - DNA, 2942 bp, Homo sapiens
atttagccagttcctttattccattggccagatcagactcctcctctcgtttatcctgttgggggcggaagtgagaaagcccttattcgtattggcttagatttgcaagcggcagttgtctatcaaatctatcaagtcgcccttagcgctcaggaagtacgacaccggaaggggtgggctttgcgaagatggcggcgctgggggtgctggagtccgacctgccaagtgccgtgacacttctgaaaaatctccaggagcaagtgatggctgtaactgcacaagtgaaatcactgacacaaaaagttcaagctggtgcctatcctacagaaaagggtctcagcttcttggaagtgaaagaccagctgctgctcatgtaccttatggatttgacccacctcattctggacaaagcctcaggaggatctcttcagggacatgatgcagttttgagactggtagagattcgaacggtatgaagcatttggcttcttggagttttaggtttctaaattttgagctccaagggtatcacacagtagctctcatttaagtgagtcttctcatgtttaaggaaaccaaatgagaaaaggtatttttctattcatttgctctactttgtacatattttaggtgccttatgtggcaccttaatatagggactctggtgtgtgcttcattttgggaaggaaatataatcctgattaactaccatgttgtaggttttggaaaagcttcgtcccttggaccaaaagctgaagtatcaaattgacaagctgatcaagactgcagtgacaggcagccttagtaagtgaggagaccatcatgaagttgtggggaccatcagaaagttccaaattttgtaaaattcattgggttatttatttcaggtgagaatgacccacttcgttttaagcctcatcccagcaatatgatgagcaaggtaaggggttgtagtattctcctgatttttttctgaggcagctatacctagatgagcctcttggtgatcctggataccctgggattctcttaggacttgattttccaacttgtgtgttagaatgctgagtttgagattcccttttttccctttttatattcccaccaccccagggtactccagctttgggttttcttctcacttatctcatgaatgcttcctaaatttgcagacattgtttcttttgtagttgagctctgaggatgaggaggaagatgaagcagaagatgaccagtctgaggcttcagggaagaaatctgtgaagggagtgtctaagaaatatgttcctccacgcttggttccagtacattatgatgaaacagaagctgagcgggagaagaagcgtctagaacgagccaagagacgggcattgagcagctctgtcattcgtgaacttaaggagcagtactcagatgctccagaggaaatccgtgatgctcggcatccccatgttacccgccagagtcaggaggaccaacacaggattaactatgaggagagcatgatggtgcgtttgagcgtcagtaagcgagagaaaggacggcgaaaacgagcaaatgtcatgagctcacaacttcattcccttacacacttcagtgacatcagtgctttgacagggggaactgttcatcttgatgaggatcagaatcctattaagaagcggaagaagatacctcagaaaggtcggaagaaaaaaggtcagtgaactgctgggacttaggtgatcaggtgcaaggtggggagtacaaattgagtctctttggatttgccattctgggtctcaccaagccctgtagtatctcttccatactgggcaataatctccttaggtgggcttttattttttgctttcctgagctggaaatcagcatcattcacaaaatgaatctctggattctgcctctaaggtcccacagctcctgttcaggcttccctaaatagaactggtaaagtgtcacttgaaggaaccattatcccatttcaattttattcctacttctcgtcttttgtcctgggaagatattcagggtactgcctaggagaccccacccctgtgagcccttccctctagatgtcctgttttcctgtccctttagcttttccaactgtcctttgcctcattcttggtttcccttcctttcaggttttcggaggcggcggtgattatgggtgtacatatttgtatattttttgtcatcctgagatacttctaatttcattgtatataggtggttttccctggaattcattaattgtttgctttggacatgtggaaagagccttactaataaaattgattttacttatgaattaaagcccctttttgcacatgtattgtacgactggagtcgttgggtttgggatatttttggtgagtggttggtgaaaagggaaattttttttggaagtgcaaaacatttgtattgttttctttgataatatatttttcccaaaaactaaaaattggttacgtcacaaaaagtattgagagacgaggctggtataatcaactctttcaacccatgttgccacaacttcctgtatgatttgttataatacaatacagattgagatattaacacatgaattttaggttttattagtgttatctgggctggccaccaggtggcataagtggttcaagaaacttgagcttggctgtaatcaaaagcaagatagaacctttccacatcagcaagattattcttatctccacttctctgaatgtttttcatttctttctgaaatagcatgaacataaggctgatctttggtcagttactgagggagtttgtagaaaatagtagagtgagtaagaaggctagagtgaagagtcagtatagtcttgtgtttttcagactctgacccccacccccccgccttcaactgagggtcattttaccagagtcaataaaggccaacccttctataaagagctggc

SEQ ID NO: 295835 - DNA, 616 bp, Homo sapiens
tcctcagcatgaactgtttctcttttctctgttcttggataaccctgcttattttcatcatgtagatgaaacagaagctgagcgggagaagaagcgtctagaacgagccaagagacgggcattgagcagctctgtcattcgtgaacttaaggagcagtactcagatgctccagaggaaatccgtgatgctcggcatccccatgttacccgccagagtcaggaggaccaacacaggattaactatgaggagagcatgatggtgcgtttgagcgtcagtaagcgagagaaaggacggcgaaaacgagcaaatgtcatgagctcacaacttcattcccttacacacttcagtgacatcagtgctttgacagggggaactgttcatcttgatgaggatcagaatcctattaagaagcggaagaagatacctcagaaaggtcggaagaaaaaaggttttcggaggcggcggtgattatgggtgtacatatttgtatattttttgtcatcctgagatacttctaatttcattgtatataggtggttttccctggaattcattaattgtttgctttggacatgtggaaagagccttactaataaaattgattttacttatgaa

SEQ ID NO: 295836 - DNA, 967 bp, Homo sapiens
atttagccagttcctttattccattggccagatcagactcctcctctcgtttatcctgttgggggcggaagtgagaaagcccttattcgtattggcttagatttgcaagcggcagttgtctatcaaatctatcaagtcgcccttagcgctcaggaagtacgacaccggaaggggtgggctttgcgaagatggcggcgctgggggtgctggagtccgacctgccaagtgccgtgacacttctgaaaaatctccaggagcaagtgatggctgtaactgcacaagtgaaatcactgacacaaaaagttcaagctggtgcctatcctacagaaaaggtaagatgtactcaaacagtaagcatcccctgacttaatgttctcagtagttctttcattgtatgtttattgtgtcttatatatcctaagtgctcgagcttcaaacataaatatgatccagtttctgtgctgaagtctagagggaagacaaagcaaagcaatagatgtaagtattaatagtagcagtcacattacagagttatgagtctccagccaaagagagggattaattaactgccagaagagcagagggattcaggacaggcttcccagaggaggtgataggattttgaggaataaatgggagggacagaaagaaggaacatgtgcaaaggcacaaaggcctgaaagtatggtgataagggaaaggagtaagtcatttttgtgataggatgtactttctgtgttatgtgtgttgggggtaggaaataagactggaaaagtcactctgaagattactgtaggccaactgaggagttactttcagatttcatctaatctaagacacttattaattgggacatatcacttattgtatatattaagaaaaaatgtgacaggccggcaggggggtaatcctgatttaccacttagaggtgaggtggggacccttagctcaaaatgggcaaccggta

SEQ ID NO: 295837 - DNA, 1144 bp, Homo sapiens
  misc_feature (32)..(32): n is a, c, g, or t
ctagaggatcccccgctctcatagcggggaangggtgggctttgcgaagatggcggcgctgggggtgctggagtccgacctgccaagtgccgtgacacttctgaaaaatctccaggagcaagtgatggctgtaactgcacaagtgaaatcactgacacaaaaagttcaagctggtgcctatcctacagaaaagggtctcagcttcttggaagtgaaagaccagctgctgctcatgtaccttatggatttgacccacctcattctggacaaagcctcaggaggatctcttcagggacatgatgcagttttgagactggtagagattcgaacggttttggaaaagcttcgtcccttggaccaaaagctgaagtatcaaattgacaagctgatcaagactgcagtgacaggcagccttagtgagaatgacccacttcgttttaagcctcatcccagcaatatgatgagcaagttgagctctgaggatgaggaggaagatgaagcagaagatgaccagtctgaggcttcagggaagaaatctgtgaagggagtgtctaagaaatatgttcctccacgcttggttccagtacattatgatgaaacagaagctgagcgggagaagaagcgtctagaacgagccaagagacgggcattgagcagctctgtcattcgtgaacttaaggagcagtactcagatgctccagaggaaatccgtgatgctcggcatccccatgttacccgccagagtcaggaggaccaacacaggattaactatgaggagagcatgatggtgcgtttgagcgtcagtaagcgagagaaaggacggcgaaaacgagcaaatgtcatgagctcacaacttcattcccttacacacttcagtgacatcagtgctttgacagggggaactgttcatcttgatgaggatcagaatcctattaagaagcggaagaagatacctcagaaaggtcggaagaaaaaaggttttcggaggcggcggtgattatgggtgtacatatttgtatattttttgtcatcctgagatacttctaatttcattgtatataggtggttttccctggaattcattaattgtttgctttggacatgtggaaagagccttactaataaaattgattttacttatgaa

SEQ ID NO: 295838 - DNA, 1775 bp, Homo sapiens
  misc_feature (32)..(32): n is a, c, g, or t
ctagaggatcccccgctctcatagcggggaangggtgggctttgcgaagatggcggcgctgggggtgctggagtccgacctgccaagtgccgtgacacttctgaaaaatctccaggagcaagtgatggctgtaactgcacaagtgaaatcactgacacaaaaagttcaagctggtgcctatcctacagaaaagggtctcagcttcttggaagtgaaagaccagctgctgctcatgtaccttatggatttgacccacctcattctggacaaagcctcaggaggatctcttcagggacatgatgcagttttgagactggtagagattcgaacggttttggaaaagcttcgtcccttggaccaaaagctgaagtatcaaattgacaagctgatcaagactgcagtgacaggcagccttagtgagaatgacccacttcgttttaagcctcatcccagcaatatgatgagcaagttgagctctgaggatgaggaggaagatgaagcagaagatgaccagtctgaggcttcagggaagaaatctgtgaagggagtgtctaagaaatatgttcctccacgcttggttccagtacattatgatgaaacagaagctgagcgggagaagaagcgtctagaacgagccaagagacgggcattgagcagctctgtcattcgtgaacttaaggagcagtactcagatgctccagaggaaatccgtgatgctcggcatccccatgttacccgccagagtcaggaggaccaacacaggattaactatgaggagagcatgatggtgcgtttgagcgtcagtaagcgagagaaaggacggcgaaaacgagcaaatgtcatgagctcacaacttcattcccttacacacttcagtgacatcagtgctttgacagggggaactgttcatcttgatgaggatcagaatcctattaagaagcggaagaagatacctcagaaaggtcggaagaaaaaaggttttcggaggcggcggtgattatgggtgtacatatttgtatattttttgtcatcctgagatacttctaatttcattgtatataggtggttttccctggaattcattaattgtttgctttggacatgtggaaagagccttactaataaaattgattttacttatgaattaaagcccctttttgcacatgtattgtacgactggagtcgttgggtttgggatatttttggtgagtggttggtgaaaagggaaattttttttggaagtgcaaaacatttgtattgttttctttgataatatatttttcccaaaaactaaaaattggttacgtcacaaaaagtattgagagacgaggctggtataatcaactctttcaacccatgttgccacaacttcctgtatgatttgttataatacaatacagattgagatattaacacatgaattttaggttttattagtgttatctgggctggccaccaggtggcataagtggttcaagaaacttgagcttggctgtaatcaaaagcaagatagaacctttccacatcagcaagattattcttatctccacttctctgaatgtttttcatttctttctgaaatagcatgaacataaggctgatctttggtcagttactgagggagtttgtagaaaatagtagagtgagtaagaaggctagagtgaagagtcagtatagtcttgtgtttttcagactctgacccccacccccccgccttcaactgagggtcattttaccagagtcaataaaggccaacccttctataaagagctggc

SEQ ID NO: 295839 - DNA, 1590 bp, Homo sapiens
  misc_feature (32)..(32): n is a, c, g, or t
ctagaggatcccccgctctcatagcggggaangggtgggctttgcgaagatggcggcgctgggggtgctggagtccgacctgccaagtgccgtgacacttctgaaaaatctccaggagcaagtgatggctgtaactgcacaagtgaaatcactgacacaaaaagttcaagctggtgcctatcctacagaaaagggtctcagcttcttggaagtgaaagaccagctgctgctcatgtaccttatggatttgacccacctcattctggacaaagcctcaggaggatctcttcagggacatgatgcagttttgagactggtagagattcgaacggttttggaaaagcttcgtcccttggaccaaaagctgaagtatcaaattgacaagctgatcaagactgcagtgacaggcagccttagtgagaatgacccacttcgttttaagcctcatcccagcaatatgatgagcaagttgagctctgaggatgaggaggaagatgaagcagaagatgaccagtctgaggcttcagggaagaaatctgtgaagggagtgtctaagaaatatgttcctccacgcttggttccagtacattatgatgaaacagaagctgagcgggagaagaagcgtctagaacgagccaagagacgggcattgagcagctctgtcattcgtgaacttaaggagcagtactcagatgctccagaggaaatccgtgatgctcggcatccccatgttacccgccagagtcaggaggaccaacacaggattaactatgaggagagcatgatggtgcgtttgagcgtcagtaagcgagagaaaggacggcgaaaacgagcaaatgtcatgagctcacaacttcattcccttacacacttcagtgacatcagtgctttgacagggggaactgttcatcttgatgaggatcagaatcctattaagaagcggaagaagatacctcagaaaggtcggaagaaaaaaggtcagtgaactgctgggacttaggtgatcaggtgcaaggtggggagtacaaattgagtctctttggatttgccattctgggtctcaccaagccctgtagtatctcttccatactgggcaataatctccttaggtgggcttttattttttgctttcctgagctggaaatcagcatcattcacaaaatgaatctctggattctgcctctaaggtcccacagctcctgttcaggcttccctaaatagaactggtaaagtgtcacttgaaggaaccattatcccatttcaattttattcctacttctcgtcttttgtcctgggaagatattcagggtactgcctaggagaccccacccctgtgagcccttccctctagatgtcctgttttcctgtccctttagcttttccaactgtcctttgcctcattcttggtttcccttcctttcaggttttcggaggcggcggtgattatgggtgtacatatttgtatattttttgtcatcctgagatacttctaatttcattgtatataggtggttttccctggaattcattaattgtttgctttggacatgtggaaagagccttactaataaaattgattttacttatgaa

SEQ ID NO: 295840 - DNA, 1736 bp, Homo sapiens
  misc_feature (32)..(32): n is a, c, g, or t
ctagaggatcccccgctctcatagcggggaangggtgggctttgcgaagatggcggcgctgggggtgctggagtccgacctgccaagtgccgtgacacttctgaaaaatctccaggagcaagtgatggctgtaactgcacaagtgaaatcactgacacaaaaagttcaagctggtgcctatcctacagaaaagggtctcagcttcttggaagtgaaagaccagctgctgctcatgtaccttatggatttgacccacctcattctggacaaagcctcaggaggatctcttcagggacatgatgcagttttgagactggtagagattcgaacggttttggaaaagcttcgtcccttggaccaaaagctgaagtatcaaattgacaagctgatcaagactgcagtgacaggcagccttagtgagaatgacccacttcgttttaagcctcatcccagcaatatgatgagcaagttgagctctgaggatgaggaggaagatgaagcagaagatgaccagtctgaggcttcagggaagaaatctgtgaagggagtgtctaagaaatatgttcctccacgcttggttccagtacattatgatgaaacagaagctgagcgggagaagaagcgtctagaacgagccaagagacgggcattgagcagctctgtcattcgtgaacttaaggagcagtactcagatgctccagaggaaatccgtgatgctcggcatccccatgttacccgccagagtcaggaggaccaacacaggattaactatgaggagagcatgatggtgcgtttgagcgtcagtaagcgagagaaaggacggcgaaaacgagcaaatgtcatgagctcacaacttcattcccttacacacttcagtgacatcagtgctttgacagggggaactgttcatcttgatgaggtgaggttgagatatggttgtagtaggatgtgactttcatgctttcagcaaaatgtatgtggggcttattaccatgaggaacttgggaagggatgctggctctcagaaccacagtgccattccatcacttctccatctgtctccaggatcagaatcctattaagaagcggaagaagatacctcagaaaggtcggaagaaaaaaggtcagtgaactgctgggacttaggtgatcaggtgcaaggtggggagtacaaattgagtctctttggatttgccattctgggtctcaccaagccctgtagtatctcttccatactgggcaataatctccttaggtgggcttttattttttgctttcctgagctggaaatcagcatcattcacaaaatgaatctctggattctgcctctaaggtcccacagctcctgttcaggcttccctaaatagaactggtaaagtgtcacttgaaggaaccattatcccatttcaattttattcctacttctcgtcttttgtcctgggaagatattcagggtactgcctaggagaccccacccctgtgagcccttccctctagatgtcctgttttcctgtccctttagcttttccaactgtcctttgcctcattcttggtttcccttcctttcaggttttcggaggcggcggtgattatgggtgtacatatttgtatattttttgtcatcctgagatacttctaatttcattgtatataggtggttttccctggaattcattaattgtttgctttggacatgtggaaagagccttactaataaaattgattttacttatgaa

SEQ ID NO: 295841 - DNA, 1029 bp, Homo sapiens
  misc_feature (32)..(32): n is a, c, g, or t
ctagaggatcccccgctctcatagcggggaangggtgggctttgcgaagatggcggcgctgggggtgctggagtccgacctgccaagtgccgtgacacttctgaaaaatctccaggagcaagtgatggctgtaactgcacaagtgaaatcactgacacaaaaagttcaagctggtgcctatcctacagaaaagggtctcagcttcttggaagtgaaagaccagctgctgctcatgtaccttatggatttgacccacctcattctggacaaagcctcaggaggatctcttcagggacatgatgcagttttgagactggtagagattcgaacggttttggaaaagcttcgtcccttggaccaaaagctgaagtatcaaattgacaagctgatcaagactgcagtgacaggcagccttagtgagaatgacccacttcgttttaagcctcatcccagcaatatgatgagcaagttgagctctgaggatgaggaggaagatgaagcagaagatgaccagtctgaggcttcagggaagaaatctgtgaagggagtgtctaagaaatatgttcctccacgcttggttccagtacattatgatgaaacagaagctgagcgggagaagaagcgtctagaacgagccaagagacgggcattgagcagctctgtcattcgtgaacttaaggagcagtactcagatgctccagaggaaatccgtgatgctcggcatccccatgttacccgccagagtcaggaggaccaacacaggattaactatgaggagagcatgatggtgcgtttgagcgtcagtaagcgagagaaaggacggcgaaaacgagcaaatgtcatgagctcacaacttcattcccttacacacttcagtgacatcagtgctttgacagggggaactgttcatcttgatgaggatcagaatcctattaagaagcggaagaagatacctcagaaaggtcggaagaaaaaaggttttcggaggcggcggtgattatgggtgtacctcggccgcgaccacgctaa

SEQ ID NO: 295842 - DNA, 1623 bp, Homo sapiens
  misc_feature (32)..(32): n is a, c, g, or t
ctagaggatcccccgctctcatagcggggaangggtgggctttgcgaagatggcggcgctgggggtgctggagtccgacctgccaagtgccgtgacacttctgaaaaatctccaggagcaagtgatggctgtaactgcacaagtgaaatcactgacacaaaaagttcaagctggtgcctatcctacagaaaagggtctcagcttcttggaagtgaaagaccagctgctgctcatgtaccttatggatttgacccacctcattctggacaaagcctcaggaggatctcttcagggacatgatgcagttttgagactggtagagattcgaacggttttggaaaagcttcgtcccttggaccaaaagctgaagtatcaaattgacaagctgatcaagactgcagtgacaggcagccttagtgagaatgacccacttcgttttaagcctcatcccagcaatatgatgagcaagttgagctctgaggatgaggaggaagatgaagcagaagatgaccagtctgaggcttcagggaagaaatctgtgaagggagtgtctaagaaatatgttcctccacgcttggttccagtacattatgatgaaacagaagctgagcgggagaagaagcgtctagaacgagccaagagacgggcattgagcagctctgtcattcgtgaacttaaggagcagtactcagatgctccagaggaaatccgtgatgctcggcatccccatgttacccgccagagtcaggaggaccaacacaggattaactatgaggagagcatgatggtgcgtttgagcgtcagtaagcgagagaaaggacggcgaaaacgagcaaatgtcatgagctcacaacttcattcccttacacacttcagtgacatcagtgctttgacagggggaactgttcatcttgatgaggtgaggttgagatatggttgtagtaggatgtgactttcatgctttcagcaaaatgtatgtggggcttattaccatgaggaacttgggaagggatgctggctctcagaaccacagtgccattccatcacttctccatctgtctccaggatcagaatcctattaagaagcggaagaagatacctcagaaaggtcggaagaaaaaaggttttcggaggcggcggtgattatgggtgtacatatttgtatattttttgtcatcctgagatacttctaatttcattgtatataggtggttttccctggaattcattaattgtttgctttggacatgtggaaagagccttactaataaaattgattttacttatgaaaaaaaaaaaaagaacaaaaaaaaaaaaacactcccccgcgggactgccgcccagcaagaagcgggagtacatccaaggggggggccgcgacaaccaaactattggtgcgcaccatcagaaggggccgacctacacaagcgcgcgtggagaatacacttgggccagaagccaggtgtgctttgcggtggaagaacatgatagtcgtcaggcgccgacgaatatcctcgcacacaactacatatgcagaagcgaatgcgtcggtcaccgacgaccggcaacacatgcagccactgcagcaaacacgaagaccagcagagccacagcatgcggaac

SEQ ID NO: 295843 - DNA, 1510 bp, Homo sapiens
gaaaataatgccaatgctttttccaggtagtattgaggagctgggctgagtgcttgttgtttgtttttaagtactatttgtccaaatgcacacatctgtgggactgctgcaattttgaaagaaaaatgacagctgtgtaaaaccagtgcataggaaaaaagaagtgtcaacaatttggctgccaggcacaccgcgcccctgcagcaatctggtggggcaggggaggacactcggagtaggtagaaaactaaccaggctgaacggccccttcaggggttggtgagctgtccaaatcaatgtctgaaaaggcatagccaactctggcattttccaggttggtcctgatctcgaaaggtggtagtctgtaggtgggatgtggtgagtggatgtgaagtggcagcatagttctctgaagatggcggcgctgggggtgctggagtccgacctgccaagtgccgtgacacttctgaaaaatctccaggagcaagtgatggctgtaactgcacaagtgaaatcactgacacaaaaagttcaagctggtgcctatcctacagaaaagggtctcagcttcttggaagtgaaagaccagctgctgctcatgtaccttatggatttgacccacctcattctggacaaagcctcaggaggatctcttcagggacatgatgcagttttgagactggtagagattcgaacggttttggaaaagcttcgtcccttggaccaaaagctgaagtatcaaattgacaagctgatcaagactgcagtgacaggcagccttagtgagaatgacccacttcgttttaagcctcatcccagcaatatgatgagcaagttgagctctgaggatgaggaggaagatgaagcagaagatgaccagtctgaggcttcagggaagaaatctgtgaagggagtgtctaagaaatatgttcctccacgcttggttccagtacattatgatgaaacagaagctgagcgggagaagaagcgtctagaacgagccaagagacgggcattgagcagctctgtcattcgtgaacttaaggagcagtactcagatgctccagaggaaatccgtgatgctcggcatccccatgttacccgccagagtcaggaggaccaacacaggattaactatgaggagagcatgatggtgcgtttgagcgtcagtaagcgagagaaaggacggcgaaaacgagcaaatgtcatgagctcacaacttcattcccttacacacttcagtgacatcagtgctttgacagggggaactgttcatcttgatgaggatcagaatcctattaagaagcggaagaagatacctcagaaaggtcggaagaaaaaaggttttcggaggcggcggtgattatgggtgtacatatttgtatattttttgtcatcctgagatacttctaatttcattgtatataggtggttttccctggaattcattaattgtttgctttggacatgtggaaagagccttactaataaaattgattttacttatgaa

SEQ ID NO: 295844 - DNA, 1597 bp, Homo sapiens
atttagccagttcctttattccattggccagatcagactcctcctctcgtttatcctgttgggggcggaagtgagaaagcccttattcgtattggcttagatttgcaagcggcagttgtctatcaaatctatcaagtcgcccttagcgctcaggaagtacgacaccggaaggggtgggctttgcgaagatggcggcgctggtgagtttggtgtggtttcttcctcgcgtagctattgtggagttgtcctttgccttcagcggctggaggcaaactgttggtaccagggaagggtggtgatgaaagttgcttcagggaggcggcctccctagagttaccgttcctgtccggtaacccaaggggctggctttaaggcgagtctgtgaacccgagtgtgaaggccccgagtctgggtgtctgacggagagagggcagtttcccaccctagacgttccactttcctataatcctgaggaaagaatgacttttctttacgcctcctctcccttctgtagggggtgctggagtccgacctgccaagtgccgtgacacttctgaaaaatctccaggagcaagtgatggctgtaactgcacaagtgaaatcactgacacaaaaagttcaagctggtgcctatcctacagaaaagggtctcagcttcttggaagtgaaagaccagctgctgctcatgtaccttatggatttgacccacctcattctggacaaagcctcaggaggatctcttcagggacatgatgcagttttgagactggtagagattcgaacggttttggaaaagcttcgtcccttggaccaaaagctgaagtatcaaattgacaagctgatcaagactgcagtgacaggcagccttagtgagaatgacccacttcgttttaagcctcatcccagcaatatgatgagcaagttgagctctgaggatgaggaggaagatgaagcagaagatgaccagtctgaggcttcagggaagaaatctgtgaagggagtgtctaagaaatatgttcctccacgcttggttccagtacattatgatgaaacagaagctgagcgggagaagaagcgtctagaacgagccaagagacgggcattgagcagctctgtcattcgtgaacttaaggagcagtactcagatgctccagaggaaatccgtgatgctcggcatccccatgttacccgccagagtcaggaggaccaacacaggattaactatgaggagagcatgatggtgcgtttgagcgtcagtaagcgagagaaaggacggcgaaaacgagcaaatgtcatgagctcacaacttcattcccttacacacttcagtgacatcagtgctttgacagggggaactgttcatcttgatgaggatcagaatcctattaagaagcggaagaagatacctcagaaaggtcggaagaaaaaaggttttcggaggcggcggtgattatgggtgtacatatttgtatattttttgtcatcctgagatacttctaatttcattgtatataggtggttttccctggaattcattaattgtttgctttggacatgtggaaagagccttactaataaaattgattttacttatgaa

SEQ ID NO: 295845 - DNA, 972 bp, Homo sapiens
tttctgttttgttcaactcagggtctcagcttcttggaagtgaaagaccagctgctgctcatgtaccttatggatttgacccacctcattctggacaaagcctcaggaggatctcttcagggacatgatgcagttttgagactggtagagattcgaacggttttggaaaagcttcgtcccttggaccaaaagctgaagtatcaaattgacaagctgatcaagactgcagtgacaggcagccttagtgagaatgacccacttcgttttaagcctcatcccagcaatatgatgagcaagttgagctctgaggatgaggaggaagatgaagcagaagatgaccagtctgaggcttcagggaagaaatctgtgaagggagtgtctaagaaatatgttcctccacgcttggttccagtacattatgatgaaacagaagctgagcgggagaagaagcgtctagaacgagccaagagacgggcattgagcagctctgtcattcgtgaacttaaggagcagtactcagatgctccagaggaaatccgtgatgctcggcatccccatgttacccgccagagtcaggaggaccaacacaggattaactatgaggagagcatgatggtgcgtttgagcgtcagtaagcgagagaaaggacggcgaaaacgagcaaatgtcatgagctcacaacttcattcccttacacacttcagtgacatcagtgctttgacagggggaactgttcatcttgatgaggatcagaatcctattaagaagcggaagaagatacctcagaaaggtcggaagaaaaaaggttttcggaggcggcggtgattatgggtgtacatatttgtatattttttgtcatcctgagatacttctaatttcattgtatataggtggttttccctggaattcattaattgtttgctttggacatgtggaaagagccttactaataaaattgattttacttatgaa

SEQ ID NO: 295846 - DNA, 983 bp, Homo sapiens
gctcatgtaccttatggatttgagcagcagctggtctttcacttccaagaagctgagaccagctgctgctcatgtaccttatggatttgacccacctcattctggacaaagcctcaggaggatctcttcagggacatgatgcagttttgagactggtagagattcgaacggttttggaaaagcttcgtcccttggaccaaaagctgaagtatcaaattgacaagctgatcaagactgcagtgacaggcagccttagtgagaatgacccacttcgttttaagcctcatcccagcaatatgatgagcaagttgagctctgaggatgaggaggaagatgaagcagaagatgaccagtctgaggcttcagggaagaaatctgtgaagggagtgtctaagaaatatgttcctccacgcttggttccagtacattatgatgaaacagaagctgagcgggagaagaagcgtctagaacgagccaagagacgggcattgagcagctctgtcattcgtgaacttaaggagcagtactcagatgctccagaggaaatccgtgatgctcggcatccccatgttacccgccagagtcaggaggaccaacacaggattaactatgaggagagcatgatggtgcgtttgagcgtcagtaagcgagagaaaggacggcgaaaacgagcaaatgtcatgagctcacaacttcattcccttacacacttcagtgacatcagtgctttgacagggggaactgttcatcttgatgaggatcagaatcctattaagaagcggaagaagatacctcagaaaggtcggaagaaaaaaggttttcggaggcggcggtgattatgggtgtacatatttgtatattttttgtcatcctgagatacttctaatttcattgtatataggtggttttccctggaattcattaattgtttgctttggacatgtggaaagagccttactaataaaattgattttacttatgaa

SEQ ID NO: 295847 - DNA, 1139 bp, Homo sapiens
tcggaataccgaggatgcccagaagtgcccgcttgacacattctgcaaccgatcgtccagcggagcataggttgatgccactcgataacctccggagcgaaggtagaccaggttcagcttgacagcaagacacaggttcccaaactgagctgactctaatcgctacacgatagaagcggtctacgagcctgtactatgcgcaagctagaaaggaccagctgctgctcatgtaccttatggatttgacccacctcattctggacaaagcctcaggaggatctcttcagggacatgatgcagttttgagactggtagagattcgaacggttttggaaaagcttcgtcccttggaccaaaagctgaagtatcaaattgacaagctgatcaagactgcagtgacaggcagccttagtgagaatgacccacttcgttttaagcctcatcccagcaatatgatgagcaagttgagctctgaggatgaggaggaagatgaagcagaagatgaccagtctgaggcttcagggaagaaatctgtgaagggagtgtctaagaaatatgttcctccacgcttggttccagtacattatgatgaaacagaagctgagcgggagaagaagcgtctagaacgagccaagagacgggcattgagcagctctgtcattcgtgaacttaaggagcagtactcagatgctccagaggaaatccgtgatgctcggcatccccatgttacccgccagagtcaggaggaccaacacaggattaactatgaggagagcatgatggtgcgtttgagcgtcagtaagcgagagaaaggacggcgaaaacgagcaaatgtcatgagctcacaacttcattcccttacacacttcagtgacatcagtgctttgacagggggaactgttcatcttgatgaggatcagaatcctattaagaagcggaagaagatacctcagaaaggtcggaagaaaaaaggttttcggaggcggcggtgattatgggtgtacatatttgtatattttttgtcatcctgagatacttctaatttcattgtatataggtggttttccctggaattcattaattgtttgctttggacatgtggaaagagccttactaataaaattgattttacttatgaa

SEQ ID NO: 295848 - DNA, 1532 bp, Homo sapiens
atttagccagttcctttattccattggccagatcagactcctcctctcgtttatcctgttgggggcggaagtgagaaagcccttattcgtattggcttagatttgcaagcggcagttgtctatcaaatctatcaagtcgcccttagcgctcaggaagtacgacaccggaaggggtgggctttgcgaagatggcggcgctgggggtgctggagtccgacctgccaagtgccgtgacacttctgaaaaatctccaggagcaagtgatggctgtaactgcacaagtgaaatcactgacacaaaaagttcaagctggtgcctatcctacagaaaagggtctcagcttcttggaagtgaaagaccagctgctgctcatgtaccttatggatttgacccacctcattctggacaaagcctcaggaggatctcttcagggacatgatgcagttttgagactggtagagattcgaacggtatgaagcatttggcttcttggagttttaggtttctaaattttgagctccaagggtatcacacagtagctctcatttaagtgagtcttctcatgtttaaggaaaccaaatgagaaaaggtatttttctattcatttgctctactttgtacatattttaggtgccttatgtggcaccttaatatagggactctggtgtgtgcttcattttgggaaggaaatataatcctgattaactaccatgttgtaggttttggaaaagcttcgtcccttggaccaaaagctgaagtatcaaattgacaagctgatcaagactgcagtgacaggcagccttagtgagaatgacccacttcgttttaagcctcatcccagcaatatgatgagcaagttgagctctgaggatgaggaggaagatgaagcagaagatgaccagtctgaggcttcagggaagaaatctgtgaagggagtgtctaagaaatatgttcctccacgcttggttccagtacattatgatgaaacagaagctgagcgggagaagaagcgtctagaacgagccaagagacgggcattgagcagctctgtcattcgtgaacttaaggagcagtactcagatgctccagaggaaatccgtgatgctcggcatccccatgttacccgccagagtcaggaggaccaacacaggattaactatgaggagagcatgatggtgcgtttgagcgtcagtaagcgagagaaaggacggcgaaaacgagcaaatgtcatgagctcacaacttcattcccttacacacttcagtgacatcagtgctttgacagggggaactgttcatcttgatgaggatcagaatcctattaagaagcggaagaagatacctcagaaaggtcggaagaaaaaaggttttcggaggcggcggtgattatgggtgtacatatttgtatattttttgtcatcctgagatacttctaatttcattgtatataggtggttttccctggaattcattaattgtttgctttggacatgtggaaagagccttactaataaaattgattttacttatgaa

SEQ ID NO: 295849 - DNA, 1760 bp, Homo sapiens
gaaaataatgccaatgctttttccaggtagtattgaggagctgggctgagtgcttgttgtttgtttttaagtactatttgtccaaatgcacacatctgtgggactgctgcaattttgaaagaaaaatgacagctgtgtaaaaccagtgcataggaaaaaagaagtgtcaacaatttggctgccaggcacaccgcgcccctgcagcaatctggtggggcaggggaggacactcggagtaggtagaaaactaaccaggctgaacggccccttcaggggttggtgagctgtccaaatcaatgtctgaaaaggcatagccaactctggcattttccaggttggtcctgatctcgaaaggtggtagtctgtaggtgggatgtggtgagtggatgtgaagtggcagcatagttctctgaagatggcggcgctgggggtgctggagtccgacctgccaagtgccgtgacacttctgaaaaatctccaggagcaagtgatggctgtaactgcacaagtgaaatcactgacacaaaaagttcaagctggtgcctatcctacagaaaagggtctcagcttcttggaagtgaaagaccagctgctgctcatgtaccttatggatttgacccacctcattctggacaaagcctcaggaggatctcttcagggacatgatgcagttttgagactggtagagattcgaacggttttggaaaagcttcgtcccttggaccaaaagctgaagtatcaaattgacaagctgatcaagactgcagtgacaggcagccttagtgagaatgacccacttcgttttaagcctcatcccagcaatatgatgagcaaggtaaggggttgtagtattctcctgatttttttctgaggcagctatacctagatgagcctcttggtgatcctggataccctgggattctcttaggacttgattttccaacttgtgtgttagaatgctgagtttgagattcccttttttccctttttatattcccaccaccccagggtactccagctttgggttttcttctcacttatctcatgaatgcttcctaaatttgcagacattgtttcttttgtagttgagctctgaggatgaggaggaagatgaagcagaagatgaccagtctgaggcttcagggaagaaatctgtgaagggagtgtctaagaaatatgttcctccacgcttggttccagtacattatgatgaaacagaagctgagcgggagaagaagcgtctagaacgagccaagagacgggcattgagcagctctgtcattcgtgaacttaaggagcagtactcagatgctccagaggaaatccgtgatgctcggcatccccatgttacccgccagagtcaggaggaccaacacaggattaactatgaggagagcatgatggtgcgtttgagcgtcagtaagcgagagaaaggacggcgaaaacgagcaaatgtcatgagctcacaacttcattcccttacacacttcagtgacatcagtgctttgacagggggaactgttcatcttgatgaggatcagaatcctattaagaagcggaagaagatacctcagaaaggtcggaagaaaaaaggttttcggaggcggcggtgattatgggtgtacatatttgtatattttttgtcatcctgagatacttctaatttcattgtatataggtggttttccctggaattcattaattgtttgctttggacatgtggaaagagccttactaataaaattgattttacttatgaa

SEQ ID NO: 295850 - DNA, 1792 bp, Homo sapiens
atttagccagttcctttattccattggccagatcagactcctcctctcgtttatcctgttgggggcggaagtgagaaagcccttattcgtattggcttagatttgcaagcggcagttgtctatcaaatctatcaagtcgcccttagcgctcaggaagtacgacaccggaaggggtgggctttgcgaagatggcggcgctggtgagtttggtgtggtttcttcctcgcgtagctattgtggagttgtcctttgccttcagcggctggaggcaaactgttggtaccagggaagggtggtgatgaaagttgcttcagggaggcggcctccctagagttaccgttcctgtccggtaacccaaggggctggctttaaggcgagtctgtgaacccgagtgtgaaggccccgagtctgggtgtctgacggagagagggcagtttcccaccctagacgttccactttcctataatcctgaggaaagaatgacttttctttacgcctcctctcccttctgtagggggtgctggagtccgacctgccaagtgccgtgacacttctgaaaaatctccaggagcaagtgatggctgtaactgcacaagtgaaatcactgacacaaaaagttcaagctggtgcctatcctacagaaaagggtctcagcttcttggaagtgaaagaccagctgctgctcatgtaccttatggatttgacccacctcattctggacaaagcctcaggaggatctcttcagggacatgatgcagttttgagactggtagagattcgaacggtatgaagcatttggcttcttggagttttaggtttctaaattttgagctccaagggtatcacacagtagctctcatttaagtgagtcttctcatgtttaaggaaaccaaatgagaaaaggtatttttctattcatttgctctactttgtacatattttaggtgccttatgtggcaccttaatatagggactctggtgtgtgcttcattttgggaaggaaatataatcctgattaactaccatgttgtaggttttggaaaagcttcgtcccttggaccaaagtgagaatgacccacttcgttttaagcctcatcccagcaatatgatgagcaagttgagctctgaggatgaggaggaagatgaagcagaagatgaccagtctgaggcttcagggaagaaatctgtgaagggagtgtctaagaaatatgttcctccacgcttggttccagtacattatgatgaaacagaagctgagcgggagaagaagcgtctagaacgagccaagagacgggcattgagcagctctgtcattcgtgaacttaaggagcagtactcagatgctccagaggaaatccgtgatgctcggcatccccatgttacccgccagagtcaggaggaccaacacaggattaactatgaggagagcatgatggtgcgtttgagcgtcagtaagcgagagaaaggacggcgaaaacgagcaaatgtcatgagctcacaacttcattcccttacacacttcagtgacatcagtgctttgacagggggaactgttcatcttgatgaggatcagaatcctattaagaagcggaagaagatacctcagaaaggtcggaagaaaaaaggttttcggaggcggcggtgattatgggtgtacatatttgtatattttttgtcatcctgagatacttctaatttcattgtatataggtggttttccctggaattcattaattgtttgctttggacatgtggaaagagccttactaataaaattgattttacttatgaa

SEQ ID NO: 295851 - DNA, 1512 bp, Homo sapiens
atttagccagttcctttattccattggccagatcagactcctcctctcgtttatcctgttgggggcggaagtgagaaagcccttattcgtattggcttagatttgcaagcggcagttgtctatcaaatctatcaagtcgcccttagcgctcaggaagtacgacaccggaaggggtgggctttgcgaagatggcggcgctggtgagtttggtgtggtttcttcctcgcgtagctattgtggagttgtcctttgccttcagcggctggaggcaaactgttggtaccagggaagggtggtgatgaaagttgcttcagggaggcggcctccctagagttaccgttcctgtccggtaacccaaggggctggctttaaggcgagtctgtgaacccgagtgtgaaggccccgagtctgggtgtctgacggagagagggcagtttcccaccctagacgttccactttcctataatcctgaggaaagaatgacttttctttacgcctcctctcccttctgtagggggtgctggagtccgacctgccaagtgccgtgacacttctgaaaaatctccaggagcaagtgatggctgtaactgcacaagtgaaatcactgacacaaaaagttcaagctggtgcctatcctacagaaaaggtaagatgtactcaaacagtaagcatcccctgacttaatgttctcagtagttctttcattgtatgtttattgtgtcttatatatcctaagtgctcgagcttcaaacataaatatgatccagtttctgtgctgaagtctagagggaagacaaagcaaagcaatagatgtaagtattaatagtagcagtcacattacagagttatgagtctccagccaaagagagggattaattaactgccagaagagcagagggattcaggacaggcttcccagaggaggtgataggattttgaggaataaatgggagggacagaaagaaggaacatgtgcaaaggcacaaaggcctgaaagtatggtgataagggaaaggagtaagtcatttttgtgataggatgtactttctgtgttatgtgtgttgggggtaggaaataagactggaaaagtcactctgaagattactgtaggccaactgaggagttactttcagatttcatctaatctaagacacttattaattgggacatatcacttattgtatatattaagaaaaaatgtgacaggccgggcatggtggctcatgcctgtaattccagcacttcaggaggctgaggctggaggatcgcttgagctcaggagttcgggaccaacctgggtaacatagtgagaccctacaaaagttaaaaattagccgggcatgatggcatgtgcctgtagtcctagccactcaggaggctgaggccagaggattgcttaagcctgggaggttgaggctgcagtaagctgtgattgtgccactgcattcagcctgggtgacagagcaagaccctgtctcaaaaaaaaaaaaaaaattgcttatgacataatac

SEQ ID NO: 295852 - DNA, 890 bp, Homo sapiens
cctcataaacaccatcatccttcatttcagtaagtagtcggcatcacctaagaagcggaagaagatacctcagaaaggtcggaagaaaaaaggttttcggaggcggcggtgattatgggtgtacatatttgtatattttttgtcatcctgagatacttctaatttcattgtatataggtggttttccctggaattcattaattgtttgctttggacatgtggaaagagccttactaataaaattgattttacttatgaattaaagcccctttttgcacatgtattgtacgactggagtcgttgggtttgggatatttttggtgagtggttggtgaaaagggaaattttttttggaagtgcaaaacatttgtattgttttctttgataatatatttttcccaaaaactaaaaattggttacgtcacaaaaagtattgagagacgaggctggtataatcaactctttcaacccatgttgccacaacttcctgtatgatttgttataatacaatacagattgagatattaacacatgaattttaggttttattagtgttatctgggctggccaccaggtggcataagtggttcaagaaacttgagcttggctgtaatcaaaagcaagatagaacctttccacatcagcaagattattcttatctccacttctctgaatgtttttcatttctttctgaaatagcatgaacataaggctgatctttggtcagttactgagggagtttgtagaaaatagtagagtgagtaagaaggctagagtgaagagtcagtatagtcttgtgtttttcagactctgacccccacccccccgccttcaactgagggtcattttaccagagtcaataaaggccaacccttctataaagagctggc

SEQ ID NO: 295853 - DNA, 2312 bp, Homo sapiens
atcattgggtttcgagctcacttctgtggaaaagagtttaagggagtggtctagactttccagggaagttattgcctggctgtgtccctctagtcctaattttatacttaactttcccccacctccttcagcctcatctgtttcaatggtgcaactcttttcatccccttttggttaccagtcaccttcaggccattcagaggaggaaagagaggggaatatgaagtcagccaagccccaagtgaaccacagtcagcatggggaaagccagcgggccttgagccccctgcagtctactctgagttctgctgcatctccttcccaagcgtatgagacctatattgaaaatggactcatatgccttaaacacaaaattagaaacatcgagaaaaagaagctcaaactggaggattataaggatcgcctgaaaagtggagagcatcttaatccagaccagttggaagctgtagagaaatatgaagaagtgctacataatttggaatttgccaaggagcttcaaaaaaccttttctgggttgagcctagatctactaaaagcgcaaaagaaggcccagagaagggagcacatgctaaaacttgaggctgagaagaaaaagcttcgaactatacttcaagttcagtatgtattgcagaacttgacacaggagcacgtacaaaaagacttcaaagggggtttgaatggtgcagtgtatttgccttcaaaagaacttgactacctcattaagttttcaaaactgacctgccctgaaagaaatgaaagtctgagacaaacacttgaaggatctactgtctaaattgctgaactcaggctattttgaaagtatcccagttcccaaaaatgccaaggaaaaggaagtaccactggaggaagaaatgctaatacaatcagagaaaaaaacacaattatcgaagactgaatctgtcaaagagtcagagtctctaatggaatttgcccagccagagatacaaccacaagagtttcttaacagacgctatatgacagaagtagattattcaaacaaacaaggcgaagagcaaccttgggaagcagattatgctagaaaaccaaatctcccaaaacgttgggatatgcttactgaaccagatggtcaagagaagaaacaggagtcctttaagtcctgggaggcttctggtaagcaccaggaggtatccaagcctgcagtttccttagaacagaggaaacaagacacctcaaaactcaggtctactctgccggaagagcagaagaagcaggagatctccaaatccaagccatctcctagccagtggaagcaagatacacctaaatccaaagcagggtatgttcaagaggaacaaaagaaacaggagacaccaaagctgtggccagttcagctgcagaaagaacaagatccaaagaagcaaactccaaagtcttggacaccttccatgcagagcgaacagaacaccaccaagtcatggaccactcccatgtgtgaagaacaggattcaaaacagccagagactccaaaatcctgggaaaacaatgttgagagtcaaaaacactctttaacatcacagtcacagatttctccaaagtcctggggagtagctacagcaagcctcataccaaatgaccagctgctgcccaggaagttgaacacagaacccaaagatgtgcctaagcctgtgcatcagcctgtaggttcttcctctacccttccgaaggatccagtattgaggaaagaaaaactgcaggatctgatgactcagattcaaggaacttgtaactttatgcaagagtctgttcttgactttgacaaaccttcaagtgcaattccaacgtcacaaccgccttcagctactccaggtagccccgtagcatctaaagaacaaaatctgtccagtcaaagtgattttcttcaagagccgttacaggctacttcttctccagttacttgtagctcaaatgcttgcttggttactaccgatcaggcttcttctggatctgaaacagagtttatgacctcagagactcctgaggcagcaattcccccaggcaagcaaccgtcttcactagcttctccaaatcctcccatggcaaagggctctgaacagggcttccagtcacctccagcaagtagtagttcagtaaccattaacacagcaccctttcaagccatgcagacagtatttaacgttaatgcacctctgcctccacggaaaaggaacaaggaaataaaagaatccccttattcacctggctacaatcaaagttttaccacagcaagtacacaaacaccaccccagtgc

SEQ ID NO: 295854 - DNA, 2183 bp, Homo sapiens
ccccggggcggggcggggctcccgagggccgcggtcggtgcgttttccgcagtcaccttcaggccattcagaggaggaaagagaggggaatatgaagtcagccaagccccaagtgaaccacagtcagcatggggaaagccagcgggccttgagccccctgcagtctactctgagttctgctgcatctccttcccaagcgtatgagacctatattgaaaatggactcatatgccttaaacacaaaattagaaacatcgagaaaaagaagctcaaactggaggattataaggatcgcctgaaaagtggagagcatcttaatccagaccagttggaagctgtagagaaatatgaagaagtgctacataatttggaatttgccaaggagcttcaaaaaaccttttctgggttgagcctagatctactaaaagcgcaaaagaaggcccagagaagggagcacatgctaaaacttgaggctgagaagaaaaagcttcgaactatacttcaagttcagtatgtattgcagaacttgacacaggagcacgtacaaaaagacttcaaagggggtttgaatggtgcagtgtatttgccttcaaaagaacttgactacctcattaagttttcaaaactgacctgccctgaaagaaatgaaagtctgagacaaacacttgaaggatctactgtctaaattgctgaactcaggctattttgaaagtatcccagttcccaaaaatgccaaggaaaaggaagtaccactggaggaagaaatgctaatacaatcagagaaaaaaacacaattatcgaagactgaatctgtcaaagagtcagagtctctaatggaatttgcccagccagagatacaaccacaagagtttcttaacagacgctatatgacagaagtagattattcaaacaaacaaggcgaagagcaaccttgggaagcagattatgctagaaaaccaaatctcccaaaacgttgggatatgcttactgaaccagatggtcaagagaagaaacaggagtcctttaagtcctgggaggcttctggtaagcaccaggaggtatccaagcctgcagtttccttagaacagaggaaacaagacacctcaaaactcaggtctactctgccggaagagcagaagaagcaggagatctccaaatccaagccatctcctagccagtggaagcaagatacacctaaatccaaagcagggtatgttcaagaggaacaaaagaaacaggagacaccaaagctgtggccagttcagctgcagaaagaacaagatccaaagaagcaaactccaaagtcttggacaccttccatgcagagcgaacagaacaccaccaagtcatggaccactcccatgtgtgaagaacaggattcaaaacagccagagactccaaaatcctgggaaaacaatgttgagagtcaaaaacactctttaacatcacagtcacagatttctccaaagtcctggggagtagctacagcaagcctcataccaaatgaccagctgctgcccaggaagttgaacacagaacccaaagatgtgcctaagcctgtgcatcagcctgtaggttcttcctctacccttccgaaggatccagtattgaggaaagaaaaactgcaggatctgatgactcagattcaaggaacttgtaactttatgcaagagtctgttcttgactttgacaaaccttcaagtgcaattccaacgtcacaaccgccttcagctactccaggtagccccgtagcatctaaagaacaaaatctgtccagtcaaagtgattttcttcaagagccgttacaggctacttcttctccagttacttgtagctcaaatgcttgcttggttactaccgatcaggcttcttctggatctgaaacagagtttatgacctcagagactcctgaggcagcaattcccccaggcaagcaaccgtcttcactagcttctccaaatcctcccatggcaaagggctctgaacagggcttccagtcacctccagcaagtagtagttcagtaaccattaacacagcaccctttcaagccatgcagacagtatttaacgttaatgcacctctgcctccacggaaaaggaacaaggaaataaaagaatccccttattcacctggctacaatcaaagttttaccacagcaagtacacaaacaccaccccagtgc

SEQ ID NO: 295855 - DNA, 2320 bp, Homo sapiens
ggctgagtcggctgggtctctggcgccgcagaggccgcgggcgaggaccgggaggggagagggaggagacaggaggaggagacgcgagtgcggggtggcgccggtccacctccgcagcgctcctgcctcccccaggctttggaaggcgggcccgggctgcggcagcggcggcctcggctgcctggggagtcaccttcaggccattcagaggaggaaagagaggggaatatgaagtcagccaagccccaagtgaaccacagtcagcatggggaaagccagcgggccttgagccccctgcagtctactctgagttctgctgcatctccttcccaagcgtatgagacctatattgaaaatggactcatatgccttaaacacaaaattagaaacatcgagaaaaagaagctcaaactggaggattataaggatcgcctgaaaagtggagagcatcttaatccagaccagttggaagctgtagagaaatatgaagaagtgctacataatttggaatttgccaaggagcttcaaaaaaccttttctgggttgagcctagatctactaaaagcgcaaaagaaggcccagagaagggagcacatgctaaaacttgaggctgagaagaaaaagcttcgaactatacttcaagttcagtatgtattgcagaacttgacacaggagcacgtacaaaaagacttcaaagggggtttgaatggtgcagtgtatttgccttcaaaagaacttgactacctcattaagttttcaaaactgacctgccctgaaagaaatgaaagtctgagacaaacacttgaaggatctactgtctaaattgctgaactcaggctattttgaaagtatcccagttcccaaaaatgccaaggaaaaggaagtaccactggaggaagaaatgctaatacaatcagagaaaaaaacacaattatcgaagactgaatctgtcaaagagtcagagtctctaatggaatttgcccagccagagatacaaccacaagagtttcttaacagacgctatatgacagaagtagattattcaaacaaacaaggcgaagagcaaccttgggaagcagattatgctagaaaaccaaatctcccaaaacgttgggatatgcttactgaaccagatggtcaagagaagaaacaggagtcctttaagtcctgggaggcttctggtaagcaccaggaggtatccaagcctgcagtttccttagaacagaggaaacaagacacctcaaaactcaggtctactctgccggaagagcagaagaagcaggagatctccaaatccaagccatctcctagccagtggaagcaagatacacctaaatccaaagcagggtatgttcaagaggaacaaaagaaacaggagacaccaaagctgtggccagttcagctgcagaaagaacaagatccaaagaagcaaactccaaagtcttggacaccttccatgcagagcgaacagaacaccaccaagtcatggaccactcccatgtgtgaagaacaggattcaaaacagccagagactccaaaatcctgggaaaacaatgttgagagtcaaaaacactctttaacatcacagtcacagatttctccaaagtcctggggagtagctacagcaagcctcataccaaatgaccagctgctgcccaggaagttgaacacagaacccaaagatgtgcctaagcctgtgcatcagcctgtaggttcttcctctacccttccgaaggatccagtattgaggaaagaaaaactgcaggatctgatgactcagattcaaggaacttgtaactttatgcaagagtctgttcttgactttgacaaaccttcaagtgcaattccaacgtcacaaccgccttcagctactccaggtagccccgtagcatctaaagaacaaaatctgtccagtcaaagtgattttcttcaagagccgttacaggctacttcttctccagttacttgtagctcaaatgcttgcttggttactaccgatcaggcttcttctggatctgaaacagagtttatgacctcagagactcctgaggcagcaattcccccaggcaagcaaccgtcttcactagcttctccaaatcctcccatggcaaagggctctgaacagggcttccagtcacctccagcaagtagtagttcagtaaccattaacacagcaccctttcaagccatgcagacagtatttaacgttaatgcacctctgcctccacggaaaaggaacaaggaaataaaagaatccccttattcacctggctacaatcaaagttttaccacagcaagtacacaaacaccaccccagtgc

SEQ ID NO: 295856 - DNA, 2156 bp, Homo sapiens
atcattgggtttcgagctcacttctgtggaaaagagtttaagggagtggtctagactttccagggaagttattgcctggctgtgtccctctagtcctaattttatacttaactttcccccacctccttcagcctcatctgtttcaatggtgcaactcttttcatccccttttggttaccagtcaccttcaggccattcagaggaggaaagagaggggaatatgaagtcagccaagccccaagtgaaccacagtcagcatggggaaagccagcgggccttgagccccctgcagtctactctgagttctgctgcatctccttcccaagcgtatgagacctatattgaaaatggactcatatgccttaaacacaaaattagaaacatcgagaaaaagaagctcaaactggaggattataaggatcgcctgaaaagtggagagcatcttaatccagaccagttggaagctgtagagaaatatgaagaagtgctacataatttggaatttgccaaggagcttcaaaaaaccttttctgggttgagcctagatctactaaaagcgcaaaagaaggcccagagaagggagcacatgctaaaacttgaggctgagaagaaaaagcttcgaactatacttcaagttcagtatgtattgcagaacttgacacaggagcacgtacaaaaagacttcaaagggggtttgaatggtgcagtgtatttgccttcaaaagaacttgactacctcattaagttttcaaaactgacctgccctgaaagaaatgaaagtctgagacaaacacttgaaggatctactgtctaaattgctgaactcaggctattttgaaagtatcccagttcccaaaaatgccaaggaaaaggaagtaccactggaggaagaaatgctaatacaatcagagaaaaaaacacaattatcgaagactgaatctgtcaaagagtcagagtctctaatggaatttgcccagccagagatacaaccacaagagtttcttaacagacgctatatgacagaagtagattattcaaacaaacaaggcgaagagcaaccttgggaagcagattatgctagaaaaccaaatctcccaaaacgttgggatatgcttactgaaccagatggtcaagagaagaaacaggagtcctttaagtcctgggaggcttctggtaagcaccaggaggtatccaagcctgcagtttccttagaacagaggaaacaagacacctcaaaactcaggtctactctgccggaagagcagaagaagcaggagatctccaaatccaagccatctcctagccagtggaagcaagatacacctaaatccaaagcagggtatgttcaagaggaacaaaagaaacaggagacaccaaagctgtggccagttcagctgcagaaagaacaagatccaaagaagcaaactccaaagtcttggacaccttccatgcagagcgaacagaacaccaccaagtcatggaccactcccatgtgtgaagaacaggattcaaaacagccagagactccaaaatcctgggaaaacaatgttgagagtcaaaaacactctttaacatcacagtcacagatttctccaaagtcctggggagtagctacagcaagcctcataccaaatgaccagctgctgcccaggaagttgaacacagaacccaaagatgtgagttgatctgtatcattctgcttctgtaagtgtaggcataaataaggtgtcgtggtaatgactttttagttctcttttttttttttttttgagatggagaaacactctgttacccaggctggagtgcagtggcactatctctgctcactgtaacctccgcctcctggattcaagcgattctcttgcctcagcctcctgagtagctgggactacaggcgcatgccaccacacctggctaatttttttgtatttttagtagagacggggtttcactgtgttagccaggatggcctggatctcctgatctcgtgatccaaccgcctcggcctcccaaagtgctgagattacaggcgtgagccattgtgcccggccttagttctcttcaaagcccatgtgaagttaatgtataaaatatttcaccctctttagtgggtagatttattgttttcccttgaaaactgggagttaatctagtct

SEQ ID NO: 295857 - DNA, 1986 bp, Homo sapiens
gatggaattttgtagttgaaaaatacttcagagtttgtaaaagatagggttttctaaaatagattaataatattagtaatctaatagagattgtccaatataggattttctaacccaatctaatagattttgaggaactgacttttacttctctaaagccttaattacttggggaaggtagagtggttgctagctgtgatgtcttgggagcagataggaaaaatgacttatttctcatctcagggaatagatgtgtgcttttgtgacatacttgattagggtctctgatttttagtcatttttcaaatggtggaaatggaggtccagagaaacttaagtgacttgctgaacttttgagattctgatctcattaaaattcatattgattcagcataaaataaagatggactgcatatttacttttcatggtactgacaagttctccagtcagtaccatgaaagtgtaaactgttgtaaactattgtaaggatgtactatgtacatcaatgtaaactattgtaacaatgtactacaactaggataaaattaggatttctattcccagtaattttcaattaggtcatgtgacaattaagtcttaatcactctttcttagacaaacacttgaaggatctactgtctaaattgctgaactcaggctattttgaaagtatcccagttcccaaaaatgccaaggaaaaggaagtaccactggaggaagaaatgctaatacaatcagagaaaaaaacacaattatcgaagactgaatctgtcaaagagtcagagtctctaatggaatttgcccagccagagatacaaccacaagagtttcttaacagacgctatatgacagaagtagattattcaaacaaacaaggcgaagagcaaccttgggaagcagattatgctagaaaaccaaatctcccaaaacgttgggatatgcttactgaaccagatggtcaagagaagaaacaggagtcctttaagtcctgggaggcttctggtaagcaccaggaggtatccaagcctgcagtttccttagaacagaggaaacaagacacctcaaaactcaggtctactctgccggaagagcagaagaagcaggagatctccaaatccaagccatctcctagccagtggaagcaagatacacctaaatccaaagcagggtatgttcaagaggaacaaaagaaacaggagacaccaaagctgtggccagttcagctgcagaaagaacaagatccaaagaagcaaactccaaagtcttggacaccttccatgcagagcgaacagaacaccaccaagtcatggaccactcccatgtgtgaagaacaggattcaaaacagccagagactccaaaatcctgggaaaacaatgttgagagtcaaaaacactctttaacatcacagtcacagatttctccaaagtcctggggagtagctacagcaagcctcataccaaatgaccagctgctgcccaggaagttgaacacagaacccaaagatgtgagttgatctgtatcattctgcttctgtaagtgtaggcataaataaggtgtcgtggtaatgactttttagttctcttttttttttttttttgagatggagaaacactctgttacccaggctggagtgcagtggcactatctctgctcactgtaacctccgcctcctggattcaagcgattctcttgcctcagcctcctgagtagctgggactacaggcgcatgccaccacacctggctaatttttttgtatttttagtagagacggggtttcactgtgttagccaggatggcctggatctcctgatctcgtgatccaaccgcctcggcctcccaaagtgctgagattacaggcgtgagccattgtgcccggccttagttctcttcaaagcccatgtgaagttaatgtataaaatatttcaccctctttagtgggtagatttattgttttcccttgaaaactgggagttaatctagtct

SEQ ID NO: 295858 - DNA, 2239 bp, Homo sapiens
atcattgggtttcgagctcacttctgtggaaaagagtttaagggagtggtctagactttccagggaagttattgcctggctgtgtccctctagtcctaattttatacttaactttcccccacctccttcagcctcatctgtttcaatggtgcaactcttttcatccccttttggttaccagtcaccttcaggccattcagaggaggaaagagaggggaatatgaagtcagccaagccccaagtgaaccacagtcagcatggggaaagccagcgggccttgagccccctgcagtctactctgagttctgctgcatctccttcccaagcgtatgagacctatattgaaaatggactcatatgccttaaacacaaaattagaaacatcgagaaaaagaagctcaaactggaggattataaggatcgcctgaaaagtggagagcatcttaatccagaccagttggaagctgtagagaaatatgaagaagtgctacataatttggaatttgccaaggagcttcaaaaaaccttttctgggttgagcctagatctactaaaagcgcaaaagaaggcccagagaagggagcacatgctaaaacttgaggctgagaagaaaaagcttcgaactatacttcaagttcagtatgtattgcagaacttgacacaggagcacgtacaaaaagacttcaaagggggtttgaatggtgcagtgtatttgccttcaaaagaacttgactacctcattaagttttcaaaactgacctgccctgaaagaaatgaaagtctgagtgttgaagaccagatggagcagtcatccttgtacttttgggaccttttggaaggtagtgagaaagcagtggtaggaacgacatacaaacacttgaaggatctactgtctaaattgctgaactcaggctattttgaaagtatcccagttcccaaaaatgccaaggaaaaggaagtaccactggaggaagaaatgctaatacaatcagagaaaaaaacacaattatcgaagactgaatctgtcaaagagtcagagtctctaatggaatttgcccagccagagatacaaccacaagagtttcttaacagacgctatatgacagaagtagattattcaaacaaacaaggcgaagagcaaccttgggaagcagattatgctagaaaaccaaatctcccaaaacgttgggatatgcttactgaaccagatggtcaagagaagaaacaggagtcctttaagtcctgggaggcttctggtaagcaccaggaggtatccaagcctgcagtttccttagaacagaggaaacaagacacctcaaaactcaggtctactctgccggaagagcagaagaagcaggagatctccaaatccaagccatctcctagccagtggaagcaagatacacctaaatccaaagcagggtatgttcaagaggaacaaaagaaacaggagacaccaaagctgtggccagttcagctgcagaaagaacaagatccaaagaagcaaactccaaagtcttggacaccttccatgcagagcgaacagaacaccaccaagtcatggaccactcccatgtgtgaagaacaggattcaaaacagccagagactccaaaatcctgggaaaacaatgttgagagtcaaaaacactctttaacatcacagtcacagatttctccaaagtcctggggagtagctacagcaagcctcataccaaatgaccagctgctgcccaggaagttgaacacagaacccaaagatgtgagttgatctgtatcattctgcttctgtaagtgtaggcataaataaggtgtcgtggtaatgactttttagttctcttttttttttttttttgagatggagaaacactctgttacccaggctggagtgcagtggcactatctctgctcactgtaacctccgcctcctggattcaagcgattctcttgcctcagcctcctgagtagctgggactacaggcgcatgccaccacacctggctaatttttttgtatttttagtagagacggggtttcactgtgttagccaggatggcctggatctcctgatctcgtgatccaaccgcctcggcctcccaaagtgctgagattacaggcgtgagccattgtgcccggccttagttctcttcaaagcccatgtgaagttaatgtataaaatatttcaccctctttagtgggtagatttattgttttcccttgaaaactgggagttaatctagtct

SEQ ID NO: 295859 - DNA, 2060 bp, Homo sapiens
atcattgggtttcgagctcacttctgtggaaaagagtttaagggagtggtctagactttccagggaagttattgcctggctgtgtccctctagtcctaattttatacttaactttcccccacctccttcagcctcatctgtttcaatggtgcaactcttttcatccccttttggttaccagtcaccttcaggccattcagaggaggaaagagaggggaatatgaagtcagccaagccccaagtgaaccacagtcagcatggggaaagccagcgggccttgagccccctgcagtctactctgagttctgctgcatctccttcccaagcgtatgagacctatattgaaaatggactcatatgccttaaacacaaaattagaaacatcgagaaaaagaagctcaaactggaggattataaggatcgcctgaaaagtggagagcatcttaatccagaccagttggaagctgtagagaaatatgaagaagtgctacataatttggaatttgccaaggagcttcaaaaaaccttttctgggttgagcctagatctactaaaagcgcaaaagaaggcccagagaagggagcacatgctaaaacttgaggctgagaagaaaaagcttcgaactatacttcaagttcagtatgtattgcagaacttgacacaggagcacgtacaaaaagacttcaaagggggtttgaatggtgcagtgtatttgccttcaaaagaacttgactacctcattaagttttcaaaactgacctgccctgaaagaaatgaaagtctgagacaaacacttgaaggatctactgtctaaattgctgaactcaggctattttgaaagtatcccagttcccaaaaatgccaaggaaaaggaagtaccactggaggaagaaatgctaatacaatcagagaaaaaaacacaattatcgaagactgaatctgtcaaagagtcagagtctctaatggaatttgcccagccagagatacaaccacaagagtttcttaacagacgctatatgacagaagtagattattcaaacaaacaaggcgaagagcaaccttgggaagcagattatgctagaaaaccaaatctcccaaaacgttgggatatgcttactgaaccagatggtcaagagaagaaacaggagtcctttaagtcctgggaggcttctggtaagcaccaggaggtatccaagcctgcagtttccttagaacagaggaaacaagacacctcaaaactcaggtctactctgccggaagagcagaagaagcaggagatctccaaatccaagccatctcctagccagtggaagcaagatacacctaaatccaaagcagggtatgttcaagaggaacaaaagaaacaggagacaccaaagctgtggccagttcagctgcagaaagaacaagatccaaagaagcaaactccaaagtcttggacaccttccatgcagagcgaacagaacaccaccaagtcatggaccactcccatgtgtgaagaacaggattcaaaacagccagagactccaaaatcctgggaaaacaatgttgagagtcaaaaacactctttaacatcacagtcacagatttctccaaagtcctggggagtagctacagcaagcctcataccaaatgaccagctgctgcccaggaagttgaacacagaacccaaagatgtgcctaagcctgtgcatcagcctgtaggttcttcctctacccttccgaaggatccagtattgaggaaagaaaaactgcaggatctgatgactcagattcaaggaacttgtaactttatgcaagagtctgttcttgactttgacaaaccttcaagtgcaattccaacgtcacaaccgccttcagctactccaggtagccccgtagcatctaaagaacaaaatctgtccagtcaaagtgattttcttcaagagccgttacaggtatttaacgttaatgcacctctgcctccacggaaaaggaacaaggaaataaaagaatccccttattcacctggctacaatcaaagttttaccacagcaagtacacaaacaccaccccagtgc

SEQ ID NO: 295860 - DNA, 1892 bp, Homo sapiens
atcattgggtttcgagctcacttctgtggaaaagagtttaagggagtggtctagactttccagggaagttattgcctggctgtgtccctctagtcctaattttatacttaactttcccccacctccttcagcctcatctgtttcaatggtgcaactcttttcatccccttttggttaccagtcaccttcaggccattcagaggaggaaagagaggggaatatgaagtcagccaagccccaagtgaaccacagtcagcatggggaaagccagcgggccttgagccccctgcagtctactctgagttctgctgcatctccttcccaagcgtatgagacctatattgaaaatggactcatatgccttaaacacaaaattagaaacatcgagaaaaagaagctcaaactggaggattataaggatcgcctgaaaagtggagagcatcttaatccagaccagttggaagctgtagagaaatatgaagaagtgctacataatttggaatttgccaaggagcttcaaaaaaccttttctgggttgagcctagatctactaaaagcgcaaaagaaggcccagagaagggagcacatgctaaaacttgaggctgagaagaaaaagcttcgaactatacttcaagttcagtatgtattgcagaacttgacacaggagcacgtacaaaaagacttcaaagggggtttgaatggtgcagtgtatttgccttcaaaagaacttgactacctcattaagttttcaaaactgacctgccctgaaagaaatgaaagtctgagagtctctaatggaatttgcccagccagagatacaaccacaagagtttcttaacagacgctatatgacagaagtagattattcaaacaaacaaggcgaagagcaaccttgggaagcagattatgctagaaaaccaaatctcccaaaacgttgggatatgcttactgaaccagatggtcaagagaagaaacaggagtcctttaagtcctgggaggcttctggtaagcaccaggaggtatccaagcctgcagtttccttagaacagaggaaacaagacacctcaaaactcaggtctactctgccggaagagcagaagaagcaggagatctccaaatccaagccatctcctagccagtggaagcaagatacacctaaatccaaagcagggtatgttcaagaggaacaaaagaaacaggagacaccaaagctgtggccagttcagctgcagaaagaacaagatccaaagaagcaaactccaaagtcttggacaccttccatgcagagcgaacagaacaccaccaagtcatggaccactcccatgtgtgaagaacaggattcaaaacagccagagactccaaaatcctgggaaaacaatgttgagagtcaaaaacactctttaacatcacagtcacagatttctccaaagtcctggggagtagctacagcaagcctcataccaaatgaccagctgctgcccaggaagttgaacacagaacccaaagatgtgcctaagcctgtgcatcagcctgtaggttcttcctctacccttccgaaggatccagtattgaggaaagaaaaactgcaggatctgatgactcagattcaaggaacttgtaactttatgcaagagtctgttcttgactttgacaaaccttcaagtgcaattccaacgtcacaaccgccttcagctactccaggtagccccgtagcatctaaagaacaaaatctgtccagtcaaagtgattttcttcaagagccgttacaggtatttaacgttaatgcacctctgcctccacggaaaaggaacaaggaaataaaagaatccccttattcacctggctacaatcaaagttttaccacagcaagtacacaaacaccaccccagtgc

SEQ ID NO: 295861 - DNA, 673 bp, Homo sapiens
atcagttggatcagtggagataaggcagttggatgatttgctcttttcccgctttctagctgtaagaagaaatgtcttctgattttcttctttttccaagtatatacatctcctcatcaaagttcagactatctgagatactattgtttttggaaaatcttctgaagatctggcttggaagcagtatccaaggtgttttccccatcaacactctcttcagcattttctcccagaacaggggagctgactgaaagaacatgaactttggtttccaaatcttgagcatctggcttcatgactgcagccggaccatcaatgccatgaagacgacattgctgtggggggtatgagagtccatcaaaggagtctgctcctcattggcctttggcttcacccaacttagcctgacttctggatttggctgcaccatgaatggctgaaggtgcttttttctctgcttcttcttaagcagtgctctctgattatccagtgccagctgttaaagtttcatcgtctcatcgtgaaagacactgtccccactggaaccaagccggcagcaactggcattcatgcctgctgctgtttaagtggcagccatgtccccactcctagccacccatggctctaaactacttttaagagcttgttggccaggcgtggtggctcacacctg

SEQ ID NO: 295862 - DNA, 1060 bp, Homo sapiens
cagcattattcataatagctaaaaggtggaagcaacccaagtgtccattgacagatgaatgaatgagcaaaatgtggtatgcacagtgaaattttactccgccttaaaggacattcagacactttctacaacatgaaccttgagaatactgtgctaggtgaaataagccagtcacagaaagacaaatattctgtgattccacttctgtgaagaaagcagcgtagtcaaaatcatagagacagaaagtagaatagtggctgccagggttggggaaaaagggaatggagagttggtgtttatggggacagttttagtccccccccgccccgcttaccccaacttgaagctcagagtcttagttgtacaagatgaaaagagttctggagatgtgtgggggtgatggccgtacaacatcgtgaatgtatttagtgcccctgaaccacacacctacatatggctaagatggtaaatgttatgctatgtatattttactacaataaaatatgttggaaaaaaaattttgatgtgataatgcaaacttacagcgactcacacctgctttatcgggagtttcagaaggggcaggagggagaggacacgctgagcagccagaggctattgacacaccagaagcatccccagggactgcctttctcaacatcaccctctgtaatggcagcgtcagccaagagcgcactgccattggttttactgaccaaacctaaagaaacggctgcgttcccatcagatttgctcactaaatcatgccgacacacagacatgcatcttccagcctgttcggcagcagtgcagacaacatgaggggtctcagatcctccacaagaatgattctggttctgcctgagccttcgcctgagcccccatcagacattgtaaaggtcaacttaaggatgatgggcaggcagaggcaggaataaggactgatatggttgaatctctcattgctctagcaccatccgcttggtgctgctctcatgatagctggttgtttaaaagtgtgtggcacctgccgggcgcggtggctcacgcctgtcatccc

SEQ ID NO: 295863 - DNA, 859 bp, Homo sapiens
ggccggggcgggtcaatggcggtggcggaaacggcgggccactgcgcgggaacgggttacgcggctgacgtccgccgcagcagccgctgggtcctggaggcagaagcctccctgagaagcgcacaataggcagggcgcggtggctcacgcctgtaatcccagcactttgggaggctcaggcgggcggatcacaagcctgcactaggtgacgctgaagccacagaagacactgcagtgggaaaaccagcatgagccgctgcccccaaggaacctcgaagcccaggcagaggaccagccatcccagcctgcagggtctcctgagaacacagaccagaattactgagcgactcacacctgctttatcgggagtttcagaaggggcaggagggagaggacacgctgagcagccagaggctattgacacaccagaagcatccccagggactgcctttctcaacatcaccctctgtaatggcagcgtcagccaagagcgcactgccattggttttactgaccaaacctaaagaaacggctgcgttcccatcagatttgctcactaaatcatgccgacacacagacatgcatcttccagcctgttcggcagcagtgcagacaacatgaggggtctcagatcctccacaagaatgattctggttctgcctgagccttcgcctgagcccccatcagacattgtaaaggtcaacttaaggatgatgggcaggcagaggcaggaataaggactgatatggttgaatctctcattgctctagcaccatccgcttggtgctgctctcatgatagctggttgtttaaaagtgtgtggcacctgccgggcgcggtggctcacgcctgtcatccc

SEQ ID NO: 295864 - DNA, 1476 bp, Homo sapiens
atttttcttctgtgcctggcttatttcacttaacataatgacctccagttccatccatcaggcctccttttttcacggaggatttattttaggaaacttgcaattgtgagttctttctctacctctttgagaggcaaatcttctcccaaattttcttctagcctcctcctagttttgcaacccaggaatgcctttctcaagacttcagagccatccctttaaaatgcaattattgaaggagatgatacatctgtgtctcagtttttgtagaagggcagattcccagttttgaaaaattccaatgagccaacgcagatagctttacggcatttcctaacctcttcctgatgtctctagttccttctcagcatctcaccccggcacttaaaaactccccagccttttgtttcaatgaagttaagctcctctcttccgtattgcagtagtcctgactgagtccttccttgaaggtttaacttgtctggtgcaattttttctttgacaatgtccagatcaaatgatcccataaaaacatcgagtgtgattttagcctgagaagggggagggtgagaagatagattgggaggcagctgtgtaggcaggggacttggccactccctaaacctctcccagtctcacctgtaaatggagtgcataggtagcagtgcttctcccccaaggctggggcgatggaatcagttagactattgagggcatctggaagggcatctgtgtcagggttagtcctcagggtatggtggccaatgggtttcttttggttgactgttgacaatgcgtttgttgaatggcagcctgcactaggtgacgctgaagccacagaagacactgcagtgggaaaaccagcatgagccgctgcccccaaggaacctcgaagcccaggcagaggaccagccatcccagcctgcagggtctcctgagaacacagaccagaattactgagcgactcacacctgctttatcgggagtttcagaaggggcaggagggagaggacacgctgagcagccagaggctattgacacaccagaagcatccccagggactgcctttctcaacatcaccctctgtaatggcagcgtcagccaagagcgcactgccattggttttactgaccaaacctaaagaaacggctgcgttcccatcagatttgctcactaaatcatgccgacacacagacatgcatcttccagcctgttcggcagcagtgcagacaacatgaggggtctcagatcctccacaagaatgattctggttctgcctgagccttcgcctgagcccccatcagacattgtaaaggtcaacttaaggatgatgggcaggcagaggcaggaataaggactgatatggttgaatctctcattgctctagcaccatccgcttggtgctgctctcatgatagctggttgtttaaaagtgtgtggcacctgccgggcgcggtggctcacgcctgtcatccc

SEQ ID NO: 295865 - DNA, 482 bp, Homo sapiens
catcttaagaaagttgagcgtctactctgtatattgttttttaatgtgtgctgtttctagtcccccgaccctccatcttttaaatttatattgactgtttcatatagaaatcttagcaaatgattcattgtctggaataatttcatagatttttagttgtttaattaagccaaattgtgcattagcaacagacttttaggatgctaatgtgtccagtagttaggtcctgaggaatgtttgaaagataagagtagctcttttcacatggaagagaaatggattttccttttgttacagcgtagtatggacctaaagaccatagatgaaagttacagagagctcagttaaaacacatgcacacaaacttcctagcaattagagagctatttacagattgagtaaactcactttcagaacagttaagtcctaaacagtgggaattgtaaaagcagaggctggttgccctttttttttaaaaaaaa

SEQ ID NO: 295866 - DNA, 384 bp, Homo sapiens
ggcttgtattagtaatgtaatttaccatagataactttcctcatgtttcaaactgctggtcattaccaattagtgggttgagaaaacactttagatctcatacagcatggtaaaaaagtagaatagaatggaagctatgagagtgtatcacatgtagttagaggattgttttttatgacattttagtttgttgtataaatgttgtatataaatgtatgttatgtgagtatatgcttgtgtacactaggtggtgatataaaatatgtttaatgggccgggcgcggtggctcacgcttgtaatcccagcactttgggaggccgaggtgggtggatcacgaggtcaggagatcgagaccacggtgaaaccccgtctctactaaaaat

SEQ ID NO: 295867 - DNA, 4820 bp, Homo sapiens
  misc_feature (2170)..(2170): n is a, c, g, or t
  misc_feature (2175)..(2175): n is a, c, g, or t
  misc_feature (3077)..(3077): n is a, c, g, or t
agccggaagtgcgtggccgcccggggccatggcgacactcagcttcgtcttcctgctgctgggggcagtgtcctggcctccggcttctgcctccggccaggagttctggcccggacaatcggcggccgatattctgtcgggggcggcttcccgcagacggtatcttctgtatgacgtcaaccccccggaaggcttcaacctgcgcagggatgtctatatccgaatcgcctctctcctgaagactctgctgaagacggaggagtgggtgcttgtcctgcctccatggggccgcctctatcactggcagagtcctgacatccaccaggtccggattccctggtctgagttttttgatcttccaagtctcaataaaaacatccccgtcatcgagtatgagcagttcatcgcagaatctggtgggccctttattgaccaggtttacgtcctgcaaagttacgcagaggggtggaaagaagggacctgggaagagaaggtggacgagcggccgtgtattgatcagctcctgtactcccaggacaagcacgagtactacagaggatggttttggggttatgaggagaccaggggtctaaacgtctcctgtctgtccgtccagggctcagcctccatcgtggcgcccctgctgctgagaaacacatcagcccggtccgtgatgttagacagagccgagaacctacttcacgaccactatggagggaaagaatactgggatacccgtcgcagcatggtgtttgccaggcacctgcgggaggtgggagacgagttcaggagcagacatctcaactccacggacgacgcagacaggatccccttccaggaggactggatgaagatgaaggtcaagctgggctccgcgctagggggcccctacctgggagtccacctgagaagaaaagatttcatctggggtcacagacaggatgtacccagtctggaaggggccgtgaggaagatccgcagcctcatgaagacccaccggctggacaaggtgtttgtggccacagatgccgtcagaaaggaatatgaagagctaaaaaagctgttacccgagatggtgaggtttgaacccacgtgggaggagctggagctctacaaggacggaggcgttgcgattattgaccagtggatctgcgcacacgccaggtgcctgcccacgtcactgtcggccgagagcgggtcgggtggctttcaaaggttcttctgtcccaagtactcggtgtcagagcagatggtcgcctgtgttcacagtggtcatttccatactgtttgcctcctcgtctgagtctcctgtagcatctggttcagtgtttccctgggctgaagttaattgttcatcttgcccctttagttctcatgcacagaattcctccatagcaggctgttggcatagctggcctcgtctcagaacctcttcttgtgtcgcattttcccatcattcccggtttctgcccctgtctgccccctgccctgagagttgcccgtgccctggacttgggcatgtccttgttgctgtgttgttgagcatccgtgagcgtccccgaggccgggagcgtgggccctcgtgtgatcattctcgtggggctgccatgagcgtccccaaggctgggagcatgggccctcgtgtgatcgttcttgtggggctgccgtgagcgtccccgaggccgggagcgtgggccctcgtgtgatcattctcgtggggctgccgtgagcgtcccagaggccgggagcgtgggccctgcgtgcagtcattcctctggggttgctgtgggaggtacgcctgggcctctgttcctccaaagacctgcctgcccatctgcataggagatgaaggctggggttagggtgaaacggtttgagttaaatggaaaatgaaagtagagggaatgatcttccccgtggttagcactgtgcacacgcgtgcgtctctgtgggttagtctgtctctctcctgcccgaggaatgctgagcgccctgagccggtgcctcttcacacatctgctatttcctgtggtgttctgggcatggtgtgtaagacccacagaggctccgggtgatgctgtctgctgggtgtgggtccctttccctgttaagcagacaggatgcagcgctgacttcttaggtcagggcggaggtgtgcaggagcccagtnacganctcacccctgcttctcaggtgtggccttgggattttgactgcgaccttggcggtgctgtctccgcagcccaggaagcctgctgtggggaggcttcgcactgagctctcagcctcctgccctcagctgcgcgaagcgctcggcccagctcactgaagctgccctgcctccgggccggcgcggcctgctctggcaggcccctgtgtgtggggtggtgagggtctccccaccagtgctgcaccccgcagcagcatacaggcctgtgtggcctgctggccctgtggctctgtgtacagcgctgtgcatgttacatttgctctggaaacatctctggggtttgcttgttcacgaagttcatgaagtgccgctggagagccagagaccagctgcgcaggagccggaggaacgggcaggccgctgacctgaggtctggagaaacccctggagaagggtgtccccaccagcccatacagcgtgtgtgtggagggggccttgacctccgtgatgtctactgtgcctcaggataaggacccgccatgccctggctagacagtgtgtggttagtaggaatctctcattgttcaccatgtgacccccaggaggtattcgacctgcactggcgtgcctggcctgggatttggtgacggagaggagggctcccagggggacatgcggtgggacaggagcgtggcggctgctgactgtggggtgtggatggggctgcagcaccaggcagagcccctcagggcgccgatgtcgagggcacctgagcgaggggtgccagcaagggggcggccggctggtgggtgctcgggggacggccgtgttggttccatgtaactgtggaactcatttcactcagctgctcctctcagttctccctgactctggaacctctgtgacnccagttctccctgactctggaacctctgtgatcctttgcaggttttttattggcacctcagtctcaacattttcttttcggattcatgaggaaagagaaatcctggggttggaccccaagacgacgtacaacaggttctgcggagaccaagagaaggcgtgtgagcaacccacccactggaagatcacctactgaggaggatcctccagggccgctccccggacccgacaggcgcgggtggatgcaggttctgtcgccgtggagtcaccgtctactgccagccgggagctgggcggacaggaccgtccctcgcagggtcccaggcccagaagaggccccacgcctctagagctgggctccgtcctcggcgttgccagccgccatggctgatgaagaggctccgctgctctcgggggtggcggttgttttcaggcagcgtctgtgaacccacagctcggttgccagcagtgcccgcgtggtgacccagaagcaggagtgtttgtcaggctcccgctctggcctttccagccacctttcatgtcttcatattttaagtgcattgaggatagatgcaggcgggtgagctgccctccgtcaggtggacccgggctgacatttccctgggagctggtgcaaggagaagcgtcattttaaatgtctgcagagcgaccaggggcctcatgaatctctccgttgccctccgcgcagcaggaggctgcctgtgtgtttcctcctgggatgcgtgcaaggcagacctggtgctgcaaaggaaagggcctgaggcctcagggagccccgtggagggatgacagttcaggccctactgctggcacgtcagagcactgggaagtttttcagtgacgtctctggggcactcagtggattgtctgtaggaaacttgcagctctgctcctcacaccaggcccggctggccacccaccctcgcccccactggccacccctccctcgccccgactgccccgccccaccctcaccccgactgccccgccctcgcccggctggccgtccctgccctcgccccggctggcaggtgcacatggggcctccaggtctgccattcgctattgagaactagaaatgaggaaggacagttacgctaactccaaaaggctgtctaggatgagctgctttatcagggagctccttgtacccattttacagaaatcatttttaggtctttgtgccaccaccacgaggggcatctgcaaagagggcaacgctagacgacagaatccgtggaaggtgcagcagtgcctcaggggtcctcagggtcagggagcccccctcaccctcttggcccgttaccctttgtgactttccaccatggtgtcgtgtgaccctcagtcaggttggtgggggctgagtcctcactgagcagccactttccacatctgctagaggaacagtgacatggacacctgtgacagagagaggacagttaggagggacagacagctcttcctttcggagcctggctagtctaggacatcaccttgctgtgtcttctcaagcttttaaaattgaccctgaacgtgtgacagggtcctatggtgttactcaaagctgtgcagggtaaatgatgacatatttattctttttccatttgttctagaaacagtgcctttttcatcagttgcattttccaggctgagagctgtataaaacattttggactgtgaccatgtaccttcctttttaagaaaaataaactgctttatggaa

SEQ ID NO: 295868 - DNA, 3072 bp, Homo sapiens
agccggaagtgcgtggccgcccggggccatggcgacactcagcttcgtcttcctgctgctgggggcagtgtcctggcctccggcttctgcctccggccaggagttctggcccggacaatcggcggccgatattctgtcgggggcggcttcccgcagacggtatcttctgtatgacgtcaaccccccggaaggcttcaacctgcgcagggatgtctatatccgaatcgcctctctcctgaagactctgctgaagacggaggagtgggtgcttgtcctgcctccatggggccgcctctatcactggcagagtcctgacatccaccaggtccggattccctggtctgagttttttgatcttccaagtctcaataaaaacatccccgtcatcgagtatgagcagttcatcgcagaatctggtgggccctttattgaccaggtttacgtcctgcaaagttacgcagaggggtggaaagaagggacctgggaagagaaggtggacgagcggccgtgtattgatcagctcctgtactcccaggacaagcacgagtactacagaggatggttttggggttatgaggagaccaggggtctaaacgtctcctgtctgtccgtccagggctcagcctccatcgtggcgcccctgctgctgagaaacacatcagcccggtccgtgatgttagacagagccgagaacctacttcacgaccactatggagggaaagaatactgggatacccgtcgcagcatggtgtttgccaggcacctgcgggaggtgggagacgagttcaggagcagacatctcaactccacggacgacgcagacaggatccccttccaggaggactggatgaagatgaaggtcaagctgggctccgcgctagggggcccctacctgggagtccacctgagaagaaaagatttcatctggggtcacagacaggatgtacccagtctggaaggggccgtgaggaagatccgcagcctcatgaagacccaccggctggacaaggtgtttgtggccacagatgccgtcagaaaggaatatgaagagctaaaaaagctgttacccgagatggtgaggtttgaacccacgtgggaggagctggagctctacaaggacggaggcgttgcgattattgaccagtggatctgcgcacacgccagttcatgaagtgccgctggagagccagagaccagctgcgcaggagccggaggaacgggcaggccgctgacctgaggtctggagaaacccctggagaagggtgtccccaccagcccatacagcgtgtgtgtggagggggccttgacctccgtgatgtctactgtgcctcaggataaggacccgccatgccctggctagacagtgtgtggttttttattggcacctcagtctcaacattttcttttcggattcatgaggaaagagaaatcctggggttggaccccaagacgacgtacaacaggttctgcggagaccaagagaaggcgtgtgagcaacccacccactggaagatcacctactgaggaggatcctccagggccgctccccggacccgacaggcgcgggtggatgcaggttctgtcgccgtggagtcaccgtctactgccagccgggagctgggcggacaggaccgtccctcgcagggtcccaggcccagaagaggccccacgcctctagagctgggctccgtcctcggcgttgccagccgccatggctgatgaagaggctccgctgctctcgggggtggcggttgttttcaggcagcgtctgtgaacccacagctcggttgccagcagtgcccgcgtggtgacccagaagcaggagtgtttgtcaggctcccgctctggcctttccagccacctttcatgtcttcatattttaagtgcattgaggatagatgcaggcgggtgagctgccctccgtcaggtggacccgggctgacatttccctgggagctggtgcaaggagaagcgtcattttaaatgtctgcagagcgaccaggggcctcatgaatctctccgttgccctccgcgcagcaggaggctgcctgtgtgtttcctcctgggatgcgtgcaaggcagacctggtgctgcaaaggaaagggcctgaggcctcagggagccccgtggagggatgacagttcaggccctactgctggcacgtcagagcactgggaagtttttcagtgacgtctctggggcactcagtggattgtctgtaggaaacttgcagctctgctcctcacaccaggcccggctggccacccaccctcgcccccactggccacccctccctcgccccgactgccccgccccaccctcaccccgactgccccgccctcgcccggctggccgtccctgccctcgccccggctggcaggtgcacatggggcctccaggtctgccattcgctattgagaactagaaatgaggaaggacagttacgctaactccaaaaggctgtctaggatgagctgctttatcagggagctccttgtacccattttacagaaatcatttttaggtctttgtgccaccaccacgaggggcatctgcaaagagggcaacgctagacgacagaatccgtggaaggtgcagcagtgcctcaggggtcctcagggtcagggagcccccctcaccctcttggcccgttaccctttgtgactttccaccatggtgtcgtgtgaccctcagtcaggttggtgggggctgagtcctcactgagcagccactttccacatctgctagaggaacagtgacatggacacctgtgacagagagaggacagttaggagggacagacagctcttcctttcggagcctggctagtctaggacatcaccttgctgtgtcttctcaagcttttaaaattgaccctgaacgtgtgacagggtcctatggtgttactcaaagctgtgcagggtaaatgatgacatatttattctttttccatttgttctagaaacagtgcctttttcatcagttgcattttccaggctgagagctgtataaaacattttggactgtgaccatgtaccttcctttttaagaaaaataaactgctttatggaa

SEQ ID NO: 295869 - DNA, 1191 bp, Homo sapiens
taggtttgccaccggacaagggttgcagtaattcggacgagacgctgtggaaagaatgcctgcccaggaatggcgtctctaccacggaacagatgcagctccggctttgagctcgagtcagtgaatttgtttccaggcagcttatgtgaacctctcctttttgtcaaagaaaaccttcccccaccctcccctcctcaggcacgcctgcagcttgccatagccgtcggtggatcctggattccaagccttttgcccactgtcaaatacactcctcaaattaggagatacttttctctgatgtcattctgttcgttgacagtcggcattaaagccctctcagaaccgtggtgtggaggccagacggcagcctgcctgtgtctcagccataaccacccaacgcgccctggttagtgtccctcggagacttggtctctgcttcctcggcccggggttctcccagtttgtgctctgagagtgtgaatgtcatcatccttaactcttataactgtttattcttctgttgtttaaaaacaggtccgtgatgttagacagagccgagaacctacttcacgaccactatggagggaaagaatactgggatgtgagtgtttcctcgggagcgtttttctcagttagtgtatgttgcccattatttagcttttgaaaatttaaaacagtcgacagctctttttgaaccttgctgattaaaaccatcattttaagccatggatttgggcaactgcggtgactgtgccacccccaagcctcacgtggctgcagagccaggtcctcgggagcccgcagggccacccagctctcccctctgatgccacaggccctgaatgcggtggcagcgccctggagtcagccccggagtcagtgactccgtcagtggctggaacgtagacccctcctttctcctctctttagctttgaaaggtgggactattctctgcagcgggtcttttccgttggcgttgatttccgcattgatggggtgacttcccatagccacccctggttctgtgagtgagtgggagcagagggcgggaagtggctgccccctcccgtggacacagcaggcctgctgacgtgttcaccagggcagcagcttgtaaagccggaacctgcctgcaggagacacagtccctgctcacgtgggactttgtgcaggtcagtcccaccccgttt

SEQ ID NO: 295870 - DNA, 2866 bp, Homo sapiens
agccggaagtgcgtggccgcccggggccatggcgacactcagcttcgtcttcctgctgctgggggcagtgtcctggcctccggcttctgcctccggccaggagttctggcccggacaatcggcggccgatattctgtcgggggcggcttcccgcagacggtatcttctgtatgacgtcaaccccccggaaggcttcaacctgcgcagggatgtctatatccgaatcgcctctctcctgaagactctgctgaagacggaggagtgggtgcttgtcctgcctccatggggccgcctctatcactggcagagtcctgacatccaccaggtccggattccctggtctgagttttttgatcttccaagtctcaataaaaacatccccgtcatcgagtatgagcagttcatcgcagaatctggtgggccctttattgaccaggtttacgtcctgcaaagttacgcagaggggtggaaagaagggacctgggaagagaaggtggacgagcggccgtgtattgatcagctcctgtactcccaggacaagcacgagtactacagaggatggttttggggttatgaggagaccaggggtctaaacgtctcctgtctgtccgtccagggctcagcctccatcgtggcgcccctgctgctgagaaacacatcagcccggtccgtgatgttagacagagccgagaacctacttcacgaccactatggagggaaagaatactgggatacccgtcgcagcatggtgtttgccaggcacctgcgggaggtgggagacgagttcaggagcagacatctcaactccacggacgacgcagacaggatccccttccaggaggactggatgaagatgaaggtcaagctgggctccgcgctagggggcccctacctgggagtccacctgagaagaaaagatttcatctggggtcacagacaggatgtacccagtctggaaggggccgtgaggaagatccgcagcctcatgaagacccaccggctggacaaggtgtttgtggccacagatgccgtcagaaaggaatatgaagagctaaaaaagctgttacccgagatggtgaggtttgaacccacgtgggaggagctggagctctacaaggacggaggcgttgcgattattgaccagtggatctgcgcacacgccaggttttttattggcacctcagtctcaacattttcttttcggattcatgaggaaagagaaatcctggggttggaccccaagacgacgtacaacaggttctgcggagaccaagagaaggcgtgtgagcaacccacccactggaagatcacctactgaggaggatcctccagggccgctccccggacccgacaggcgcgggtggatgcaggttctgtcgccgtggagtcaccgtctactgccagccgggagctgggcggacaggaccgtccctcgcagggtcccaggcccagaagaggccccacgcctctagagctgggctccgtcctcggcgttgccagccgccatggctgatgaagaggctccgctgctctcgggggtggcggttgttttcaggcagcgtctgtgaacccacagctcggttgccagcagtgcccgcgtggtgacccagaagcaggagtgtttgtcaggctcccgctctggcctttccagccacctttcatgtcttcatattttaagtgcattgaggatagatgcaggcgggtgagctgccctccgtcaggtggacccgggctgacatttccctgggagctggtgcaaggagaagcgtcattttaaatgtctgcagagcgaccaggggcctcatgaatctctccgttgccctccgcgcagcaggaggctgcctgtgtgtttcctcctgggatgcgtgcaaggcagacctggtgctgcaaaggaaagggcctgaggcctcagggagccccgtggagggatgacagttcaggccctactgctggcacgtcagagcactgggaagtttttcagtgacgtctctggggcactcagtggattgtctgtaggaaacttgcagctctgctcctcacaccaggcccggctggccacccaccctcgcccccactggccacccctccctcgccccgactgccccgccccaccctcaccccgactgccccgccctcgcccggctggccgtccctgccctcgccccggctggcaggtgcacatggggcctccaggtctgccattcgctattgagaactagaaatgaggaaggacagttacgctaactccaaaaggctgtctaggatgagctgctttatcagggagctccttgtacccattttacagaaatcatttttaggtctttgtgccaccaccacgaggggcatctgcaaagagggcaacgctagacgacagaatccgtggaaggtgcagcagtgcctcaggggtcctcagggtcagggagcccccctcaccctcttggcccgttaccctttgtgactttccaccatggtgtcgtgtgaccctcagtcaggttggtgggggctgagtcctcactgagcagccactttccacatctgctagaggaacagtgacatggacacctgtgacagagagaggacagttaggagggacagacagctcttcctttcggagcctggctagtctaggacatcaccttgctgtgtcttctcaagcttttaaaattgaccctgaacgtgtgacagggtcctatggtgttactcaaagctgtgcagggtaaatgatgacatatttattctttttccatttgttctagaaacagtgcctttttcatcagttgcattttccaggctgagagctgtataaaacattttggactgtgaccatgtaccttcctttttaagaaaaataaactgctttatggaa

SEQ ID NO: 295871 - DNA, 4820 bp, Homo sapiens
  misc_feature (2170)..(2170): n is a, c, g, or t
  misc_feature (2175)..(2175): n is a, c, g, or t
agccggaagtgcgtggccgcccggggccatggcgacactcagcttcgtcttcctgctgctgggggcagtgtcctggcctccggcttctgcctccggccaggagttctggcccggacaatcggcggccgatattctgtcgggggcggcttcccgcagacggtatcttctgtatgacgtcaaccccccggaaggcttcaacctgcgcagggatgtctatatccgaatcgcctctctcctgaagactctgctgaagacggaggagtgggtgcttgtcctgcctccatggggccgcctctatcactggcagagtcctgacatccaccaggtccggattccctggtctgagttttttgatcttccaagtctcaataaaaacatccccgtcatcgagtatgagcagttcatcgcagaatctggtgggccctttattgaccaggtttacgtcctgcaaagttacgcagaggggtggaaagaagggacctgggaagagaaggtggacgagcggccgtgtattgatcagctcctgtactcccaggacaagcacgagtactacagaggatggttttggggttatgaggagaccaggggtctaaacgtctcctgtctgtccgtccagggctcagcctccatcgtggcgcccctgctgctgagaaacacatcagcccggtccgtgatgttagacagagccgagaacctacttcacgaccactatggagggaaagaatactgggatacccgtcgcagcatggtgtttgccaggcacctgcgggaggtgggagacgagttcaggagcagacatctcaactccacggacgacgcagacaggatccccttccaggaggactggatgaagatgaaggtcaagctgggctccgcgctagggggcccctacctgggagtccacctgagaagaaaagatttcatctggggtcacagacaggatgtacccagtctggaaggggccgtgaggaagatccgcagcctcatgaagacccaccggctggacaaggtgtttgtggccacagatgccgtcagaaaggaatatgaagagctaaaaaagctgttacccgagatggtgaggtttgaacccacgtgggaggagctggagctctacaaggacggaggcgttgcgattattgaccagtggatctgcgcacacgccaggtgcctgcccacgtcactgtcggccgagagcgggtcgggtggctttcaaaggttcttctgtcccaagtactcggtgtcagagcagatggtcgcctgtgttcacagtggtcatttccatactgtttgcctcctcgtctgagtctcctgtagcatctggttcagtgtttccctgggctgaagttaattgttcatcttgcccctttagttctcatgcacagaattcctccatagcaggctgttggcatagctggcctcgtctcagaacctcttcttgtgtcgcattttcccatcattcccggtttctgcccctgtctgccccctgccctgagagttgcccgtgccctggacttgggcatgtccttgttgctgtgttgttgagcatccgtgagcgtccccgaggccgggagcgtgggccctcgtgtgatcattctcgtggggctgccatgagcgtccccaaggctgggagcatgggccctcgtgtgatcgttcttgtggggctgccgtgagcgtccccgaggccgggagcgtgggccctcgtgtgatcattctcgtggggctgccgtgagcgtcccagaggccgggagcgtgggccctgcgtgcagtcattcctctggggttgctgtgggaggtacgcctgggcctctgttcctccaaagacctgcctgcccatctgcataggagatgaaggctggggttagggtgaaacggtttgagttaaatggaaaatgaaagtagagggaatgatcttccccgtggttagcactgtgcacacgcgtgcgtctctgtgggttagtctgtctctctcctgcccgaggaatgctgagcgccctgagccggtgcctcttcacacatctgctatttcctgtggtgttctgggcatggtgtgtaagacccacagaggctccgggtgatgctgtctgctgggtgtgggtccctttccctgttaagcagacaggatgcagcgctgacttcttaggtcagggcggaggtgtgcaggagcccagtnacganctcacccctgcttctcaggtgtggccttgggattttgactgcgaccttggcggtgctgtctccgcagcccaggaagcctgctgtggggaggcttcgcactgagctctcagcctcctgccctcagctgcgcgaagcgctcggcccagctcactgaagctgccctgcctccgggccggcgcggcctgctctggcaggcccctgtgtgtggggtggtgagggtctccccaccagtgctgcaccccgcagcagcatacaggcctgtgtggcctgctggccctgtggctctgtgtacagcgctgtgcatgttacatttgctctggaaacatctctggggtttgcttgttcacgaagttcatgaagtgccgctggagagccagagaccagctgcgcaggagccggaggaacgggcaggccgctgacctgaggtctggagaaacccctggagaagggtgtccccaccagcccatacagcgtgtgtgtggagggggccttgacctccgtgatgtctactgtgcctcaggataaggacccgccatgccctggctagacagtgtgtggttttttattggcacctcagtctcaacattttcttttcggattcatgaggaaagagaaatcctggggttggaccccaagacgacgtacaacaggttctgcggagaccaagagaaggcgtgtgagcaacccacccactggaagatcacctactgaggaggatcctccagggccgctccccggacccgacaggcgcgggtggatgcaggttctgtcgccgtggagtcaccgtctactgccagccgggagctgggcggacaggaccgtccctcgcagggtcccaggcccagaagaggccccacgcctctagagctgggctccgtcctcggcgttgccagccgccatggctgatgaagaggctccgctgctctcgggggtggcggttgttttcaggcagcgtctgtgaacccacagctcggttgccagcagtgcccgcgtggtgacccagaagcaggagtgtttgtcaggctcccgctctggcctttccagccacctttcatgtcttcatattttaagtgcattgaggatagatgcaggcgggtgagctgccctccgtcaggtggacccgggctgacatttccctgggagctggtgcaaggagaagcgtcattttaaatgtctgcagagcgaccaggggcctcatgaatctctccgttgccctccgcgcagcaggaggctgcctgtgtgtttcctcctgggatgcgtgcaaggcagacctggtgctgcaaaggaaagggcctgaggcctcagggagccccgtggagggatgacagttcaggccctactgctggcacgtcagagcactgggaagtttttcagtgacgtctctggggcactcagtggattgtctgtaggaaacttgcagctctgctcctcacaccaggcccggctggccacccaccctcgcccccactggccacccctccctcgccccgactgccccgccccaccctcaccccgactgccccgccctcgcccggctggccgtccctgccctcgccccggctggcaggtgcacatggggcctccaggtctgccattcgctattgagaactagaaatgaggaaggacagttacgctaactccaaaaggctgtctaggatgagctgctttatcagggagctccttgtacccattttacagaaatcatttttaggtctttgtgccaccaccacgaggggcatctgcaaagagggcaacgctagacgacagaatccgtggaaggtgcagcagtgcctcaggggtcctcagggtcagggagcccccctcaccctcttggcccgttaccctttgtgactttccaccatggtgtcgtgtgaccctcagtcaggttggtgggggctgagtcctcactgagcagccactttccacatctgctagaggaacagtgacatggacacctgtgacagagagaggacagttaggagggacagacagctcttcctttcggagcctggctagtctaggacatcaccttgctgtgtcttctcaagcttttaaaattgaccctgaacgtgtgacagggtcctatggtgttactcaaagctgtgcagggtaaatgatgacatatttattctttttccatttgttctagaaacagtgcctttttcatcagttgcattttccaggctgagagctgtataaaacattttggactgtgaccatgtaccttcctttttaagaaaaataaactgctttatggaagttggtagctgtggagtgtagactcattagactcatttcctgccacacagcggaaggtggaagaaccttttcggatctcccagaaagcggatggtgaccaggcatggaggaacagggtaggggccgctcctgctggcctgcgagtgctgtggcatctacatcaggacaccacttctgccagagcccctgggcccccagtgtggcctgggtgtgctcaaggggccctgtaagtcctcgtcatcaacagcagccagccctcctctgttcattagactgctgggaggcctctttggggaaagaatccctcaggtgtaaaactgccaggtttttaggcacataggagatggcagtatggcctttgggagtttaattgtggtgggaaaaga

SEQ ID NO: 295872 - DNA, 2721 bp, Homo sapiens
agccggaagtgcgtggccgcccggggccatggcgacactcagcttcgtcttcctgctgctgggggcagtgtcctggcctccggcttctgcctccggccaggagttctggcccggacaatcggcggccgatattctgtcgggggcggcttcccgcagacggtatcttctgtatgacgtcaaccccccggaaggcttcaacctgcgcagggatgtctatatccgaatcgcctctctcctgaagactctgctgaagacggaggagtgggtgcttgtcctgcctccatggggccgcctctatcactggcagagtcctgacatccaccaggtccggattccctggtctgagttttttgatcttccaagtctcaataaaaacatccccgtcatcgagtatgagcagttcatcgcagaggatggttttggggttatgaggagaccaggggtctaaacgtctcctgtctgtccgtccagggctcagcctccatcgtggcgcccctgctgctgagaaacacatcagcccggtccgtgatgttagacagagccgagaacctacttcacgaccactatggagggaaagaatactgggatacccgtcgcagcatggtgtttgccaggcacctgcgggaggtgggagacgagttcaggagcagacatctcaactccacggacgacgcagacaggatccccttccaggaggactggatgaagatgaaggtcaagctgggctccgcgctagggggcccctacctgggagtccacctgagaagaaaagatttcatctggggtcacagacaggatgtacccagtctggaaggggccgtgaggaagatccgcagcctcatgaagacccaccggctggacaaggtgtttgtggccacagatgccgtcagaaaggaatatgaagagctaaaaaagctgttacccgagatggtgaggtttgaacccacgtgggaggagctggagctctacaaggacggaggcgttgcgattattgaccagtggatctgcgcacacgccaggttttttattggcacctcagtctcaacattttcttttcggattcatgaggaaagagaaatcctggggttggaccccaagacgacgtacaacaggttctgcggagaccaagagaaggcgtgtgagcaacccacccactggaagatcacctactgaggaggatcctccagggccgctccccggacccgacaggcgcgggtggatgcaggttctgtcgccgtggagtcaccgtctactgccagccgggagctgggcggacaggaccgtccctcgcagggtcccaggcccagaagaggccccacgcctctagagctgggctccgtcctcggcgttgccagccgccatggctgatgaagaggctccgctgctctcgggggtggcggttgttttcaggcagcgtctgtgaacccacagctcggttgccagcagtgcccgcgtggtgacccagaagcaggagtgtttgtcaggctcccgctctggcctttccagccacctttcatgtcttcatattttaagtgcattgaggatagatgcaggcgggtgagctgccctccgtcaggtggacccgggctgacatttccctgggagctggtgcaaggagaagcgtcattttaaatgtctgcagagcgaccaggggcctcatgaatctctccgttgccctccgcgcagcaggaggctgcctgtgtgtttcctcctgggatgcgtgcaaggcagacctggtgctgcaaaggaaagggcctgaggcctcagggagccccgtggagggatgacagttcaggccctactgctggcacgtcagagcactgggaagtttttcagtgacgtctctggggcactcagtggattgtctgtaggaaacttgcagctctgctcctcacaccaggcccggctggccacccaccctcgcccccactggccacccctccctcgccccgactgccccgccccaccctcaccccgactgccccgccctcgcccggctggccgtccctgccctcgccccggctggcaggtgcacatggggcctccaggtctgccattcgctattgagaactagaaatgaggaaggacagttacgctaactccaaaaggctgtctaggatgagctgctttatcagggagctccttgtacccattttacagaaatcatttttaggtctttgtgccaccaccacgaggggcatctgcaaagagggcaacgctagacgacagaatccgtggaaggtgcagcagtgcctcaggggtcctcagggtcagggagcccccctcaccctcttggcccgttaccctttgtgactttccaccatggtgtcgtgtgaccctcagtcaggttggtgggggctgagtcctcactgagcagccactttccacatctgctagaggaacagtgacatggacacctgtgacagagagaggacagttaggagggacagacagctcttcctttcggagcctggctagtctaggacatcaccttgctgtgtcttctcaagcttttaaaattgaccctgaacgtgtgacagggtcctatggtgttactcaaagctgtgcagggtaaatgatgacatatttattctttttccatttgttctagaaacagtgcctttttcatcagttgcattttccaggctgagagctgtataaaacattttggactgtgaccatgtaccttcctttttaagaaaaataaactgctttatggaa

SEQ ID NO: 295873 - DNA, 4250 bp, Homo sapiens
  misc_feature (2170)..(2170): n is a, c, g, or t
  misc_feature (2175)..(2175): n is a, c, g, or t
agccggaagtgcgtggccgcccggggccatggcgacactcagcttcgtcttcctgctgctgggggcagtgtcctggcctccggcttctgcctccggccaggagttctggcccggacaatcggcggccgatattctgtcgggggcggcttcccgcagacggtatcttctgtatgacgtcaaccccccggaaggcttcaacctgcgcagggatgtctatatccgaatcgcctctctcctgaagactctgctgaagacggaggagtgggtgcttgtcctgcctccatggggccgcctctatcactggcagagtcctgacatccaccaggtccggattccctggtctgagttttttgatcttccaagtctcaataaaaacatccccgtcatcgagtatgagcagttcatcgcagaatctggtgggccctttattgaccaggtttacgtcctgcaaagttacgcagaggggtggaaagaagggacctgggaagagaaggtggacgagcggccgtgtattgatcagctcctgtactcccaggacaagcacgagtactacagaggatggttttggggttatgaggagaccaggggtctaaacgtctcctgtctgtccgtccagggctcagcctccatcgtggcgcccctgctgctgagaaacacatcagcccggtccgtgatgttagacagagccgagaacctacttcacgaccactatggagggaaagaatactgggatacccgtcgcagcatggtgtttgccaggcacctgcgggaggtgggagacgagttcaggagcagacatctcaactccacggacgacgcagacaggatccccttccaggaggactggatgaagatgaaggtcaagctgggctccgcgctagggggcccctacctgggagtccacctgagaagaaaagatttcatctggggtcacagacaggatgtacccagtctggaaggggccgtgaggaagatccgcagcctcatgaagacccaccggctggacaaggtgtttgtggccacagatgccgtcagaaaggaatatgaagagctaaaaaagctgttacccgagatggtgaggtttgaacccacgtgggaggagctggagctctacaaggacggaggcgttgcgattattgaccagtggatctgcgcacacgccaggtgcctgcccacgtcactgtcggccgagagcgggtcgggtggctttcaaaggttcttctgtcccaagtactcggtgtcagagcagatggtcgcctgtgttcacagtggtcatttccatactgtttgcctcctcgtctgagtctcctgtagcatctggttcagtgtttccctgggctgaagttaattgttcatcttgcccctttagttctcatgcacagaattcctccatagcaggctgttggcatagctggcctcgtctcagaacctcttcttgtgtcgcattttcccatcattcccggtttctgcccctgtctgccccctgccctgagagttgcccgtgccctggacttgggcatgtccttgttgctgtgttgttgagcatccgtgagcgtccccgaggccgggagcgtgggccctcgtgtgatcattctcgtggggctgccatgagcgtccccaaggctgggagcatgggccctcgtgtgatcgttcttgtggggctgccgtgagcgtccccgaggccgggagcgtgggccctcgtgtgatcattctcgtggggctgccgtgagcgtcccagaggccgggagcgtgggccctgcgtgcagtcattcctctggggttgctgtgggaggtacgcctgggcctctgttcctccaaagacctgcctgcccatctgcataggagatgaaggctggggttagggtgaaacggtttgagttaaatggaaaatgaaagtagagggaatgatcttccccgtggttagcactgtgcacacgcgtgcgtctctgtgggttagtctgtctctctcctgcccgaggaatgctgagcgccctgagccggtgcctcttcacacatctgctatttcctgtggtgttctgggcatggtgtgtaagacccacagaggctccgggtgatgctgtctgctgggtgtgggtccctttccctgttaagcagacaggatgcagcgctgacttcttaggtcagggcggaggtgtgcaggagcccagtnacganctcacccctgcttctcaggtgtggccttgggattttgactgcgaccttggcggtgctgtctccgcagcccaggaagcctgctgtggggaggcttcgcactgagctctcagcctcctgccctcagctgcgcgaagcgctcggcccagctcactgaagctgccctgcctccgggccggcgcggcctgctctggcaggcccctgtgtgtggggtggtgagggtctccccaccagtgctgcaccccgcagcagcatacaggcctgtgtggcctgctggccctgtggctctgtgtacagcgctgtgcatgttacatttgctctggaaacatctctggggtttgcttgttcacgaagttcatgaagtgccgctggagagccagagaccagctgcgcaggagccggaggaacgggcaggccgctgacctgaggtctggagaaacccctggagaagggtgtccccaccagcccatacagcgtgtgtgtggagggggccttgacctccgtgatgtctactgtgcctcaggataaggacccgccatgccctggctagacagtgtgtggttttttattggcacctcagtctcaacattttcttttcggattcatgaggaaagagaaatcctggggttggaccccaagacgacgtacaacaggttctgcggagaccaagagaaggcgtgtgagcaacccacccactggaagatcacctactgaggaggatcctccagggccgctccccggacccgacaggcgcgggtggatgcaggttctgtcgccgtggagtcaccgtctactgccagccgggagctgggcggacaggaccgtccctcgcagggtcccaggcccagaagaggccccacgcctctagagctgggctccgtcctcggcgttgccagccgccatggctgatgaagaggctccgctgctctcgggggtggcggttgttttcaggcagcgtctgtgaacccacagctcggttgccagcagtgcccgcgtggtgacccagaagcaggagtgtttgtcaggctcccgctctggcctttccagccacctttcatgtcttcatattttaagtgcattgaggatagatgcaggcgggtgagctgccctccgtcaggtggacccgggctgacatttccctgggagctggtgcaaggagaagcgtcattttaaatgtctgcagagcgaccaggggcctcatgaatctctccgttgccctccgcgcagcaggaggctgcctgtgtgtttcctcctgggatgcgtgcaaggcagacctggtgctgcaaaggaaagggcctgaggcctcagggagccccgtggagggatgacagttcaggccctactgctggcacgtcagagcactgggaagtttttcagtgacgtctctggggcactcagtggattgtctgtaggaaacttgcagctctgctcctcacaccaggcccggctggccacccaccctcgcccccactggccacccctccctcgccccgactgccccgccccaccctcaccccgactgccccgccctcgcccggctggccgtccctgccctcgccccggctggcaggtgcacatggggcctccaggtctgccattcgctattgagaactagaaatgaggaaggacagttacgctaactccaaaaggctgtctaggatgagctgctttatcagggagctccttgtacccattttacagaaatcatttttaggtctttgtgccaccaccacgaggggcatctgcaaagagggcaacgctagacgacagaatccgtggaaggtgcagcagtgcctcaggggtcctcagggtcagggagcccccctcaccctcttggcccgttaccctttgtgactttccaccatggtgtcgtgtgaccctcagtcaggttggtgggggctgagtcctcactgagcagccactttccacatctgctagaggaacagtgacatggacacctgtgacagagagaggacagttaggagggacagacagctcttcctttcggagcctggctagtctaggacatcaccttgctgtgtcttctacgcttcgtcgtacgggatcctctagacacc

SEQ ID NO: 295874 - DNA, 3878 bp, Homo sapiens
  misc_feature (1614)..(1614): n is a, c, g, or t
  misc_feature (1619)..(1619): n is a, c, g, or t
tgagcccagtgtgtgccgcagcttcccacggcaggggctggcagagccggcaggggtgggcggcttgccctgcgttggcttcatgcaggagaccctccaagagcctccaccgtggatggcgctgcttctcaggcgaccgtggatgacgtgtctgaggggcttgttccagctgcggggacccgtcgcagcatggtgtttgccaggcacctgcgggaggtgggagacgagttcaggagcagacatctcaactccacggacgacgcagacaggatccccttccaggaggactggatgaagatgaaggtcaagctgggctccgcgctagggggcccctacctgggagtccacctgagaagaaaagatttcatctggggtcacagacaggatgtacccagtctggaaggggccgtgaggaagatccgcagcctcatgaagacccaccggctggacaaggtgtttgtggccacagatgccgtcagaaaggaatatgaagagctaaaaaagctgttacccgagatggtgaggtttgaacccacgtgggaggagctggagctctacaaggacggaggcgttgcgattattgaccagtggatctgcgcacacgccaggtgcctgcccacgtcactgtcggccgagagcgggtcgggtggctttcaaaggttcttctgtcccaagtactcggtgtcagagcagatggtcgcctgtgttcacagtggtcatttccatactgtttgcctcctcgtctgagtctcctgtagcatctggttcagtgtttccctgggctgaagttaattgttcatcttgcccctttagttctcatgcacagaattcctccatagcaggctgttggcatagctggcctcgtctcagaacctcttcttgtgtcgcattttcccatcattcccggtttctgcccctgtctgccccctgccctgagagttgcccgtgccctggacttgggcatgtccttgttgctgtgttgttgagcatccgtgagcgtccccgaggccgggagcgtgggccctcgtgtgatcattctcgtggggctgccatgagcgtccccaaggctgggagcatgggccctcgtgtgatcgttcttgtggggctgccgtgagcgtccccgaggccgggagcgtgggccctcgtgtgatcattctcgtggggctgccgtgagcgtcccagaggccgggagcgtgggccctgcgtgcagtcattcctctggggttgctgtgggaggtacgcctgggcctctgttcctccaaagacctgcctgcccatctgcataggagatgaaggctggggttagggtgaaacggtttgagttaaatggaaaatgaaagtagagggaatgatcttccccgtggttagcactgtgcacacgcgtgcgtctctgtgggttagtctgtctctctcctgcccgaggaatgctgagcgccctgagccggtgcctcttcacacatctgctatttcctgtggtgttctgggcatggtgtgtaagacccacagaggctccgggtgatgctgtctgctgggtgtgggtccctttccctgttaagcagacaggatgcagcgctgacttcttaggtcagggcggaggtgtgcaggagcccagtnacganctcacccctgcttctcaggtgtggccttgggattttgactgcgaccttggcggtgctgtctccgcagcccaggaagcctgctgtggggaggcttcgcactgagctctcagcctcctgccctcagctgcgcgaagcgctcggcccagctcactgaagctgccctgcctccgggccggcgcggcctgctctggcaggcccctgtgtgtggggtggtgagggtctccccaccagtgctgcaccccgcagcagcatacaggcctgtgtggcctgctggccctgtggctctgtgtacagcgctgtgcatgttacatttgctctggaaacatctctggggtttgcttgttcacgaagttcatgaagtgccgctggagagccagagaccagctgcgcaggagccggaggaacgggcaggccgctgacctgaggtctggagaaacccctggagaagggtgtccccaccagcccatacagcgtgtgtgtggagggggccttgacctccgtgatgtctactgtgcctcaggataaggacccgccatgccctggctagacagtgtgtggttttttattggcacctcagtctcaacattttcttttcggattcatgaggaaagagaaatcctggggttggaccccaagacgacgtacaacaggttctgcggagaccaagagaaggcgtgtgagcaacccacccactggaagatcacctactgaggaggatcctccagggccgctccccggacccgacaggcgcgggtggatgcaggttctgtcgccgtggagtcaccgtctactgccagccgggagctgggcggacaggaccgtccctcgcagggtcccaggcccagaagaggccccacgcctctagagctgggctccgtcctcggcgttgccagccgccatggctgatgaagaggctccgctgctctcgggggtggcggttgttttcaggcagcgtctgtgaacccacagctcggttgccagcagtgcccgcgtggtgacccagaagcaggagtgtttgtcaggctcccgctctggcctttccagccacctttcatgtcttcatattttaagtgcattgaggatagatgcaggcgggtgagctgccctccgtcaggtggacccgggctgacatttccctgggagctggtgcaaggagaagcgtcattttaaatgtctgcagagcgaccaggggcctcatgaatctctccgttgccctccgcgcagcaggaggctgcctgtgtgtttcctcctgggatgcgtgcaaggcagacctggtgctgcaaaggaaagggcctgaggcctcagggagccccgtggagggatgacagttcaggccctactgctggcacgtcagagcactgggaagtttttcagtgacgtctctggggcactcagtggattgtctgtaggaaacttgcagctctgctcctcacaccaggcccggctggccacccaccctcgcccccactggccacccctccctcgccccgactgccccgccccaccctcaccccgactgccccgccctcgcccggctggccgtccctgccctcgccccggctggcaggtgcacatggggcctccaggtctgccattcgctattgagaactagaaatgaggaaggacagttacgctaactccaaaaggctgtctaggatgagctgctttatcagggagctccttgtacccattttacagaaatcatttttaggtctttgtgccaccaccacgaggggcatctgcaaagagggcaacgctagacgacagaatccgtggaaggtgcagcagtgcctcaggggtcctcagggtcagggagcccccctcaccctcttggcccgttaccctttgtgactttccaccatggtgtcgtgtgaccctcagtcaggttggtgggggctgagtcctcactgagcagccactttccacatctgctagaggaacagtgacatggacacctgtgacagagagaggacagttaggagggacagacagctcttcctttcggagcctggctagtctaggacatcaccttgctgtgtcttctcaagcttttaaaattgaccctgaacgtgtgacagggtcctatggtgttactcaaagctgtgcagggtaaatgatgacatatttattctttttccatttgttctagaaacagtgcctttttcatcagttgcattttccaggctgagagctgtataaaacattttggactgtgaccatgtaccttcctttttaagaaaaataaactgctttatggaa

SEQ ID NO: 295875 - DNA, 4302 bp, Homo sapiens
  misc_feature (2038)..(2038): n is a, c, g, or t
  misc_feature (2043)..(2043): n is a, c, g, or t
taggtttgccaccggacaagggttgcagtaattcggacgagacgctgtggaaagaatgcctgcccaggaatggcgtctctaccacggaacagatgcagctccggctttgagctcgagtcagtgaatttgtttccaggcagcttatgtgaacctctcctttttgtcaaagaaaaccttcccccaccctcccctcctcaggcacgcctgcagcttgccatagccgtcggtggatcctggattccaagccttttgcccactgtcaaatacactcctcaaattaggagatacttttctctgatgtcattctgttcgttgacagtcggcattaaagccctctcagaaccgtggtgtggaggccagacggcagcctgcctgtgtctcagccataaccacccaacgcgccctggttagtgtccctcggagacttggtctctgcttcctcggcccggggttctcccagtttgtgctctgagagtgtgaatgtcatcatccttaactcttataactgtttattcttctgttgtttaaaaacaggtccgtgatgttagacagagccgagaacctacttcacgaccactatggagggaaagaatactgggatacccgtcgcagcatggtgtttgccaggcacctgcgggaggtgggagacgagttcaggagcagacatctcaactccacggacgacgcagacaggatccccttccaggaggactggatgaagatgaaggtcaagctgggctccgcgctagggggcccctacctgggagtccacctgagaagaaaagatttcatctggggtcacagacaggatgtacccagtctggaaggggccgtgaggaagatccgcagcctcatgaagacccaccggctggacaaggtgtttgtggccacagatgccgtcagaaaggaatatgaagagctaaaaaagctgttacccgagatggtgaggtttgaacccacgtgggaggagctggagctctacaaggacggaggcgttgcgattattgaccagtggatctgcgcacacgccaggtgcctgcccacgtcactgtcggccgagagcgggtcgggtggctttcaaaggttcttctgtcccaagtactcggtgtcagagcagatggtcgcctgtgttcacagtggtcatttccatactgtttgcctcctcgtctgagtctcctgtagcatctggttcagtgtttccctgggctgaagttaattgttcatcttgcccctttagttctcatgcacagaattcctccatagcaggctgttggcatagctggcctcgtctcagaacctcttcttgtgtcgcattttcccatcattcccggtttctgcccctgtctgccccctgccctgagagttgcccgtgccctggacttgggcatgtccttgttgctgtgttgttgagcatccgtgagcgtccccgaggccgggagcgtgggccctcgtgtgatcattctcgtggggctgccatgagcgtccccaaggctgggagcatgggccctcgtgtgatcgttcttgtggggctgccgtgagcgtccccgaggccgggagcgtgggccctcgtgtgatcattctcgtggggctgccgtgagcgtcccagaggccgggagcgtgggccctgcgtgcagtcattcctctggggttgctgtgggaggtacgcctgggcctctgttcctccaaagacctgcctgcccatctgcataggagatgaaggctggggttagggtgaaacggtttgagttaaatggaaaatgaaagtagagggaatgatcttccccgtggttagcactgtgcacacgcgtgcgtctctgtgggttagtctgtctctctcctgcccgaggaatgctgagcgccctgagccggtgcctcttcacacatctgctatttcctgtggtgttctgggcatggtgtgtaagacccacagaggctccgggtgatgctgtctgctgggtgtgggtccctttccctgttaagcagacaggatgcagcgctgacttcttaggtcagggcggaggtgtgcaggagcccagtnacganctcacccctgcttctcaggtgtggccttgggattttgactgcgaccttggcggtgctgtctccgcagcccaggaagcctgctgtggggaggcttcgcactgagctctcagcctcctgccctcagctgcgcgaagcgctcggcccagctcactgaagctgccctgcctccgggccggcgcggcctgctctggcaggcccctgtgtgtggggtggtgagggtctccccaccagtgctgcaccccgcagcagcatacaggcctgtgtggcctgctggccctgtggctctgtgtacagcgctgtgcatgttacatttgctctggaaacatctctggggtttgcttgttcacgaagttcatgaagtgccgctggagagccagagaccagctgcgcaggagccggaggaacgggcaggccgctgacctgaggtctggagaaacccctggagaagggtgtccccaccagcccatacagcgtgtgtgtggagggggccttgacctccgtgatgtctactgtgcctcaggataaggacccgccatgccctggctagacagtgtgtggttttttattggcacctcagtctcaacattttcttttcggattcatgaggaaagagaaatcctggggttggaccccaagacgacgtacaacaggttctgcggagaccaagagaaggcgtgtgagcaacccacccactggaagatcacctactgaggaggatcctccagggccgctccccggacccgacaggcgcgggtggatgcaggttctgtcgccgtggagtcaccgtctactgccagccgggagctgggcggacaggaccgtccctcgcagggtcccaggcccagaagaggccccacgcctctagagctgggctccgtcctcggcgttgccagccgccatggctgatgaagaggctccgctgctctcgggggtggcggttgttttcaggcagcgtctgtgaacccacagctcggttgccagcagtgcccgcgtggtgacccagaagcaggagtgtttgtcaggctcccgctctggcctttccagccacctttcatgtcttcatattttaagtgcattgaggatagatgcaggcgggtgagctgccctccgtcaggtggacccgggctgacatttccctgggagctggtgcaaggagaagcgtcattttaaatgtctgcagagcgaccaggggcctcatgaatctctccgttgccctccgcgcagcaggaggctgcctgtgtgtttcctcctgggatgcgtgcaaggcagacctggtgctgcaaaggaaagggcctgaggcctcagggagccccgtggagggatgacagttcaggccctactgctggcacgtcagagcactgggaagtttttcagtgacgtctctggggcactcagtggattgtctgtaggaaacttgcagctctgctcctcacaccaggcccggctggccacccaccctcgcccccactggccacccctccctcgccccgactgccccgccccaccctcaccccgactgccccgccctcgcccggctggccgtccctgccctcgccccggctggcaggtgcacatggggcctccaggtctgccattcgctattgagaactagaaatgaggaaggacagttacgctaactccaaaaggctgtctaggatgagctgctttatcagggagctccttgtacccattttacagaaatcatttttaggtctttgtgccaccaccacgaggggcatctgcaaagagggcaacgctagacgacagaatccgtggaaggtgcagcagtgcctcaggggtcctcagggtcagggagcccccctcaccctcttggcccgttaccctttgtgactttccaccatggtgtcgtgtgaccctcagtcaggttggtgggggctgagtcctcactgagcagccactttccacatctgctagaggaacagtgacatggacacctgtgacagagagaggacagttaggagggacagacagctcttcctttcggagcctggctagtctaggacatcaccttgctgtgtcttctcaagcttttaaaattgaccctgaacgtgtgacagggtcctatggtgttactcaaagctgtgcagggtaaatgatgacatatttattctttttccatttgttctagaaacagtgcctttttcatcagttgcattttccaggctgagagctgtataaaacattttggactgtgaccatgtaccttcctttttaagaaaaataaactgctttatggaa

SEQ ID NO: 295876 - DNA, 3131 bp, Homo sapiens
  misc_feature (2170)..(2170): n is a, c, g, or t
  misc_feature (2175)..(2175): n is a, c, g, or t
agccggaagtgcgtggccgcccggggccatggcgacactcagcttcgtcttcctgctgctgggggcagtgtcctggcctccggcttctgcctccggccaggagttctggcccggacaatcggcggccgatattctgtcgggggcggcttcccgcagacggtatcttctgtatgacgtcaaccccccggaaggcttcaacctgcgcagggatgtctatatccgaatcgcctctctcctgaagactctgctgaagacggaggagtgggtgcttgtcctgcctccatggggccgcctctatcactggcagagtcctgacatccaccaggtccggattccctggtctgagttttttgatcttccaagtctcaataaaaacatccccgtcatcgagtatgagcagttcatcgcagaatctggtgggccctttattgaccaggtttacgtcctgcaaagttacgcagaggggtggaaagaagggacctgggaagagaaggtggacgagcggccgtgtattgatcagctcctgtactcccaggacaagcacgagtactacagaggatggttttggggttatgaggagaccaggggtctaaacgtctcctgtctgtccgtccagggctcagcctccatcgtggcgcccctgctgctgagaaacacatcagcccggtccgtgatgttagacagagccgagaacctacttcacgaccactatggagggaaagaatactgggatacccgtcgcagcatggtgtttgccaggcacctgcgggaggtgggagacgagttcaggagcagacatctcaactccacggacgacgcagacaggatccccttccaggaggactggatgaagatgaaggtcaagctgggctccgcgctagggggcccctacctgggagtccacctgagaagaaaagatttcatctggggtcacagacaggatgtacccagtctggaaggggccgtgaggaagatccgcagcctcatgaagacccaccggctggacaaggtgtttgtggccacagatgccgtcagaaaggaatatgaagagctaaaaaagctgttacccgagatggtgaggtttgaacccacgtgggaggagctggagctctacaaggacggaggcgttgcgattattgaccagtggatctgcgcacacgccaggtgcctgcccacgtcactgtcggccgagagcgggtcgggtggctttcaaaggttcttctgtcccaagtactcggtgtcagagcagatggtcgcctgtgttcacagtggtcatttccatactgtttgcctcctcgtctgagtctcctgtagcatctggttcagtgtttccctgggctgaagttaattgttcatcttgcccctttagttctcatgcacagaattcctccatagcaggctgttggcatagctggcctcgtctcagaacctcttcttgtgtcgcattttcccatcattcccggtttctgcccctgtctgccccctgccctgagagttgcccgtgccctggacttgggcatgtccttgttgctgtgttgttgagcatccgtgagcgtccccgaggccgggagcgtgggccctcgtgtgatcattctcgtggggctgccatgagcgtccccaaggctgggagcatgggccctcgtgtgatcgttcttgtggggctgccgtgagcgtccccgaggccgggagcgtgggccctcgtgtgatcattctcgtggggctgccgtgagcgtcccagaggccgggagcgtgggccctgcgtgcagtcattcctctggggttgctgtgggaggtacgcctgggcctctgttcctccaaagacctgcctgcccatctgcataggagatgaaggctggggttagggtgaaacggtttgagttaaatggaaaatgaaagtagagggaatgatcttccccgtggttagcactgtgcacacgcgtgcgtctctgtgggttagtctgtctctctcctgcccgaggaatgctgagcgccctgagccggtgcctcttcacacatctgctatttcctgtggtgttctgggcatggtgtgtaagacccacagaggctccgggtgatgctgtctgctgggtgtgggtccctttccctgttaagcagacaggatgcagcgctgacttcttaggtcagggcggaggtgtgcaggagcccagtnacganctcacccctgcttctcaggtgtggccttgggattttgactgcgaccttggcggtgctgtctccgcagcccaggaagcctgctgtggggaggcttcgcactgagctctcagcctcctgccctcagctgcgcgaagcgctcggcccagctcactgaagctgccctgcctccgggccggcgcggcctgctctggcaggcccctgtgtgtggggtggtgagggtctccccaccagtgctgcaccccgcagcagcatacaggcctgtgtggcctgctggccctgtggctctgtgtacagcgctgtgcatgttacatttgctctggaaacatctctggggtttgcttgttcacgaagttcatgaagtgccgctggagagccagagaccagctgcgcaggagccggaggaacgggcaggccgctgacctgaggtctggagaaacccctggagaagggtgtccccaccagcccatacagcgtgtgtgtggagggggccttgacctccgtgatgtctactgtgcctcaggataaggacccgccatgccctggctagacagtgtgtggttagtaggaatctctcattgttcaccatgtgacccccaggaggtattcgacctgcactggcgtgcctggcctgggatttggtgacggagaggagggctcccagggggacatgcggtgggacaggagcgtggcggctgctgactgtggggtgtggatggggctgcagcaccaggcagagcccctcagggcgccgatgtcgagggcacctgagcgaggggtgccagcaagggggcggccggctggtgggtgctcgggggacggccgtgttggttccatgtaactgtggaactcatttcactcagctgctcctctcagttctccctgactctggaacctattccctatgaattcatggcataataggtgttaaaaaaaaaaaataaaggacctctgggcta

SEQ ID NO: 295877 - DNA, 1150 bp, Homo sapiens
agccggaagtgcgtggccgcccggggccatggcgacactcagcttcgtcttcctgctgctgggggcagtgtcctggcctccggcttctgcctccggccaggagttctggcccggacaatcggcggccgatattctgtcgggggcggcttcccgcagacggtatcttctgtatgacgtcaaccccccggaaggcttcaacctgcgcagggatgtctatatccgaatcgcctctctcctgaagactctgctgaagacggaggagtgggtgcttgtcctgcctccatggggccgcctctatcactggcagagtcctgacatccaccaggtccggattccctggtctgagttttttgatcttccaagtctcaataaaaacatccccgtcatcgagtatgagcagttcatcgcagaatctggtgggccctttattgaccaggtttacgtcctgcaaagttacgcagaggggtggaaagaagggacctgggaagagaaggtggacgagcggccgtgtattgatcagctcctgtactcccaggacaagcacgagtactacagaggatggttttggggttatgaggagaccaggggtctaaacgtctcctgtctgtccgtccagggctcagcctccatcgtggcgcccctgctgctgagaaacacatcagcccggtccgtgatgttagacagagccgagaacctacttcacgaccactatggagggaaagaatactgggatacccgtcgcagcatggtgtttgccaggcacctgcgggaggtgggagacgagttcaggagcagacatctcaactccacggacgacgcagacaggatccccttccaggaggactggatgaagatgaaggtcaagctgggctccgcgctagggggcccctacctgggagtccacctgagaagaaaagatttcatctggggtcacagacaggatgtacccagtctggaaggggccgtgaggaagatccgcagcctcatgaagacccaccggctggacaaggtgtttgtggccacagatgccgtcagaaaggaaacagtgcctttttcatcagttgcattttccaggctgagagctgtataaaacattttggactgtgaccatgtaccttcctttttaagaaaaataaactgctttatggaa

SEQ ID NO: 295878 - DNA, 913 bp, Homo sapiens
agccggaagtgcgtggccgcccggggccatggcgacactcagcttcgtcttcctgctgctgggggcagtgtcctggcctccggcttctgcctccggccaggagttctggcccggacaatcggcggccgatattctgtcgggggcggcttcccgcagacggtatcttctgtatgacgtcaaccccccggaaggcttcaacctgcgcagggatgtctatatccgaatcgcctctctcctgaagactctgctgaagacggaggagtgggtgcttgtcctgcctccatggggccgcctctatcactggcagagtcctgacatccaccaggtccggattccctggtctgagttttttgatcttccaagtctcaataaaaacatccccgtcatcgagtatgagcagttcatcgcagaatctggtgggccctttattgaccaggtttacgtcctgcaaagttacgcagaggggtggaaagaagggacctgggaagagaaggtggacgagcggccgtgtattgatcagctcctgtactcccaggacaagcacgagtactacagtcctcactgagcagccactttccacatctgctagaggaacagtgacatggacacctgtgacagagagaggacagttaggagggacagacagctcttcctttcggagcctggctagtctaggacatcaccttgctgtgtcttctcaagcttttaaaattgaccctgaacgtgtgacagggtcctatggtgttactcaaagctgtgcagggtaaatgatgacatatttattctttttccatttgttctagaaacagtgcctttttcatcagttgcattttccaggctgagagctgtataaaacattttggactgtgaccatgtaccttcctttttaagaaaaataaactgctttatggaa

SEQ ID NO: 295879 - DNA, 1323 bp, Homo sapiens
agccggaagtgcgtggccgcccggggccatggcgacactcagcttcgtcttcctgctgctgggggcagtgtcctggcctccggcttctgcctccggccaggagttctggcccggacaatcggcggccgatattctgtcgggggcggcttcccgcagacggtatcttctgtatgacgtcaaccccccggaaggcttcaacctgcgcagggatgtctatatccgaatcgcctctctcctgaagactctgctgaagacggaggagtgggtgcttgtcctgcctccatggggccgcctctatcactggcagagtcctgacatccaccaggtccggattccctggtctgagttttttgatcttccaagtctcaataaaaacatccccgtcatcgagtatgagcagttcatcgcagaatctggtgggccctttattgaccaggtttacgtcctgcaaagttacgcagaggggtggaaagaagggacctgggaagagaaggtggacgagcggccgtgtattgatcagctcctgtactcccaggacaagcacgagtactacagaggatggttttggggttatgaggagaccaggggtctaaacgtctcctgtctgtccgtccagggctcagcctccatcgtggcgcccctgctgctgagaaacacatcagcccggtccgtgatgttagacagagccgagaacctacttcacgaccactatggagggaaagaatactgggatgtgagtgtttcctcgggagcgtttttctcagttagtgtatgttgcccattatttagcttttgaaaatttaaaacagtcgacagctctttttgaaccttgctgattaaaaccatcattttaagccatggatttgggcaactgcggtgactgtgccacccccaagcctcacgtggctgcagagccaggtcctcgggagcccgcagggccacccagctctcccctctgatgccacaggccctgaatgcggtggcagcgccctggagtcagccccggagtcagtgactccgtcagtggctggaacgtagacccctcctttctcctctctttagctttgaaaggtgggactattctctgcagcgggtcttttccgttggcgttgatttccgcattgatggggtgacttcccatagccacccctggttctgtgagtgagtgggagcagagggcgggaagtggctgccccctcccgtggacacagcaggcctgctgacgtgttcaccagggcagcagcttgtaaagccggaacctgcctgcaggagacacagtccctgctcacgtgggactttgtgcaggtcagtcccaccccgttt

SEQ ID NO: 295880 - DNA, 285 bp, Homo sapiens
ccgtgaggaagatccgcagcctcatgaagacccaccggctggacaaggtgtttgtggccacagatgccgtcagaaagggtatggagcttcaatgctttcgtttctttcctttcttttaatttattttttttattgataattcttgggtgtttctcacagacggggattttggcagggtcatggaacaatagtggagggaaggtcagcagataaacaagtgaacaaaggtctctggttttcctaggcagaggaccctgcggccttccgcagtgtttgtgtccctga

SEQ ID NO: 295881 - DNA, 437 bp, Homo sapiens
ggcttcttttaaaattttactagaatgtcacgatctgcagtcacgatcagtaagttttcctaaagcagccgcgtttcatcaggagcaagccacagtgtgtgcgtgtctagacttgatttgttttccttgtgaaagcaaaataaactgatagagctgctgtgggttttgttttccagaggatggttttggggttatgaggagaccaggggtctaaacgtctcctgtctgtccgtccagggctcagcctccatcgtggcgcccctgctgctgagaaacacatcagcccggtgagtgccccaggccccccgggagcagcctggaggctgtggcgtctgctccgtgcatgctgggctgggggctctccgcccatactcccgcatccctggcccacccacctcacagacagcggaccctgggggccctggggggtggtggtt

SEQ ID NO: 295882 - DNA, 2083 bp, Homo sapiens
aagacttcctggaagaggtcccagcgtgagtgtcgcttctggcatctgtccttctggccagcctgtggtctggccaagtgatgtaaccctcctctccagcctgtgcacaggcagcctgggaacagctccatccccacccctcagctataaatagggcatcgtgacccggccagggaagaagctgccgttgttctgggtactacagcagaagggtatgcggaagcgagcaccccagtctgagatggctcctgccggtgtgagcctgagggccaccatcctctgcctcctggcctgggctggcctggctgcaggtgaccgggtgtacatacaccccttccacctcgtcatccacaatgagagtacctgtgagcagctggcaaaggccaatgccgggaagcccaaagaccccaccttcatacctgctccaattcaggccaagacatcccctgtggatgaaaaggccctacaggaccagctggtgctagtcgctgcaaaacttgacaccgaagacaagttgagggccgcaatggtcgggatgctggccaacttcttgggcttccgtatatatggcatgcacagtgagctatggggcgtggtccatggggccaccgtcctctccccaacggctgtctttggcaccctggcctctctctatctgggagccttggaccacacagctgacaggctacaggcaatcctgggtgttccttggaaggacaagaactgcacctcccggctggatgcgcacaaggtcctgtctgccctgcaggctgtacagggcctgctagtggcccagggcagggctgatagccaggcccagctgctgctgtccacggtggtgggcgtgttcacagccccaggcctgcacctgaagcagccgtttgtgcagggcctggctctctatacccctgtggtcctcccacgctctctggacttcacagaactggatgttgctgctgagaagattgacaggttcatgcaggctgtgacaggatggaagactggctgctccctgacgggagccagtgtggacagcaccctggctttcaacacctacgtccacttccaagggaagatgaagggcttctccctgctggccgagccccaggagttctgggtggacaacagcacctcagtgtctgttcccatgctctctggcatgggcaccttccagcactggagtgacatccaggacaacttctcggtgactcaagtgcccttcactgagagcgcctgcctgctgctgatccagcctcactatgcctctgacctggacaaggtggagggtctcactttccagcaaaactccctcaactggatgaagaaactgtctccccggaccatccacctgaccatgccccaactggtgctgcaaggatcttatgacctgcaggacctgctcgcccaggctgagctgcccgccattctgcacaccgagctgaacctgcaaaaattgagcaatgaccgcatcagggtgggggaggtgctgaacagcattttttttgagcttgaagcggatgagagagagcccacagagtctacccaacagcttaacaagcctgaggtcttggaggtgaccctgaaccgcccattcctgtttgctgtgtatgatcaaagcgccactgccctgcacttcctgggccgcgtggccaacccgctgagcacagcatgaggccagggccccagaacacagtgcctggcaaggcctctgcccctggcctttgaggcaaaggccagcagcagataacaaccccggacaaatcagcgatgtgtcacccccagtctcccaccttttcttctaatgagtcgactttgagctggaaagcagccgtttctccttggtctaagtgtgctgcatggagtgagcagtagaagcctgcagcggcacaaatgcacctcccagtttgctgggtttattttagagaatgggggtggggaggcaagaaccagtgtttagcgcgggactactgttccaaaaagaattccaaccgaccagcttgtttgtgaaacaaaaaagtgttcccttttcaagttgagaacaaaaattgggttttaaaattaaagtatacatttttgcattgcc

SEQ ID NO: 295883 - DNA, 2279 bp, Homo sapiens
aagacttcctggaagaggtcccagcgtgagtgtcgcttctggcatctgtccttctggccagcctgtggtctggccaagtgatgtaaccctcctctccagcctgtgcacaggcagcctgggaacagctccatccccacccctcagctataaatagggcatcgtgacccggccagggaagaagctgccgttgttctgggtactacagcagaagggtatgcggaagcgagcaccccagtctgagatggctcctgccggtgtgagcctgagggccaccatcctctgcctcctggcctgggctggcctggctgcaggtgaccgggtgtacatacaccccttccacctcgtcatccacaatgagagtacctgtgagcagctggcaaaggccaatgccgggaagcccaaagaccccaccttcatacctgctccaattcaggccaagacatcccctgtggatgaaaaggccctacaggaccagctggtgctagtcgctgcaaaacttgacaccgaagacaagttgagggccgcaatggtcgggatgctggccaacttcttgggcttccgtatatatggcatgcacagtgagctatggggcgtggtccatggggccaccgtcctctccccaacggctgtctttggcaccctggcctctctctatctgggagccttggaccacacagctgacaggctacaggcaatcctgggtgttccttggaaggacaagaactgcacctcccggctggatgcgcacaaggtcctgtctgccctgcaggctgtacagggcctgctagtggcccagggcagggctgatagccaggcccagctgctgctgtccacggtggtgggcgtgttcacagccccaggcctgcacctgaagcagccgtttgtgcagggcctggctctctatacccctgtggtcctcccacgctctctggacttcacagaactggatgttgctgctgagaagattgacaggttcatgcaggctgtgacaggatggaagactggctgctccctgacgggagccagtgtggacagcaccctggctttcaacacctacgtccacttccaagggaagatgaagggcttctccctgctggccgagccccaggagttctgggtggacaacagcacctcagtgtctgttcccatgctctctggcatgggcaccttccagcactggagtgacatccaggacaacttctcggtgactcaagtgcccttcactgagagcgcctgcctgctgctgatccagcctcactatgcctctgacctggacaaggtggagggtctcactttccagcaaaactccctcaactggatgaagaaactgtctccccggaccatccacctgaccatgccccaactggtgctgcaaggatcttatgacctgcaggacctgctcgcccaggctgagctgcccgccattctgcacaccgagctgaacctgcaaaaattgagcaatgaccgcatcagggtgggggaggtgctgaacagcattttttttgagcttgaagcggatgagagagagcccacagagtctacccaacagcttaacaagcctgaggtcttggaggtgaccctgaaccgcccattcctgtttgctgtgtatgatcaaagcgccactgccctgcacttcctgggccgcgtggccaacccgctgagcacagcatgaggccagggccccagaacacagtgcctggcaaggcctctgcccctggcctttgaggcaaaggccagcagcagataacaaccccggacaaatcagcgatgtgtcacccccagtctcccaccttttcttctaatgagtcgactttgagctggaaagcagccgtttctccttggtctaagtgtgctgcatggagtgagcagtagaagcctgcagcggcacaaatgcacctcccagtttgctgggtttattttagagaatgggggtggggaggcaagaaccagtgtttagcgcgggactactgttccaaaaagaattccaaccgaccagcttgtttgtgaaacaaaaaagtgttcccttttcaagttgagaacaaaaattgggttttaaaattaaagtatacatttttgcattgccttcggtttgtatttagtgtcttgaatgtaagaacatgacctccgtgtagtgtctgtaataccttagttttttccacagatgcttgtgatttttgaacaatacgtgaaagatgcaagcacctgaatttctgtttgaatgcggaacaatagctggttatttctcccttgtgttagtaataaacgtcttgccacaataa

SEQ ID NO: 295884 - DNA, 294 bp, Homo sapiens
  misc_feature (283)..(283): n is a, c, g, or t
gagctcggtacccaatcagtttacacaaaaaaaagtgttcccttttcaagttgagaacaaaaattgggttttaaaattaaagtatacatttttgcattgccttcggtttgtatttagtgtcttgaatgtaagaacatgacctccgtgtagtgtctgtaataccttagttttttccacagatgcttgtgatttttgaacaatacgtgaaagatgcaagcacctgaatttctgtttgaatgcggaacaatagctggttatttctcccttgtgtaaactgattggntccgagctcga

SEQ ID NO: 295885 - DNA, 317 bp, Homo sapiens
  misc_feature (30)..(30): n is a, c, g, or t
tctttttttgaatgtgagccaaagatttantccttcatttccttgcatttgaaatactcttcaatgacatccttggtctaagtgtgctgcatggagtgagcagtagaagcctgcagcggcacaaatgcacctcccagtttgctgggtttattttagagaatgggggtggggaggcaagaaccagtgtttagcgcgggactactgttccaaaaagaattccaaccgaccagcttgtttgtgaaacaaaaaagtgttcccttttcaagttgagaacaaaaattgggttttaaaattaaagtatacatttttgcattgcc

SEQ ID NO: 295886 - DNA, 842 bp, Homo sapiens
  misc_feature (1)..(1): n is a, c, g, or t
  misc_feature (12)..(13): n is a, c, g, or t
  misc_feature (20)..(20): n is a, c, g, or t
  misc_feature (32)..(32): n is a, c, g, or t
  misc_feature (842)..(842): n is a, c, g, or t
nttgctgctttnnccgggtncatggcatgtgncgacctcttggtcgagaggctcctgttgtgtccgacactgaggccaccatcctctgcctcctggcctgggctggcctggctgcaggtgaccgggtgtacatacaccccttccacctcgtcatccacaatgagagtacctgtgagcagctggcaaaggccaatgccgggaagcccaaagaccccaccttcatacctgctccaattcaggccaagacatcccctgtggatgaaaaggccctacaggaccttttttttgttttttggtggagaaggttgacaccgaatacaggtttggggggcggcccgggtcaatgaatctcccacaactgttgttgagaaaagagtaggggagggcatagcagagaagagtaatggagagagcggtgtaggggggatgacggcacgataggtaatatgagagagtgagagtaagagtgtgagtgtgtgaaaaagttgcgagagagaagaaaagagtgtaggttaggtatacggataactgatcgacacttggagtagtatgtagttgagggacaggacggaaggtgagggcggcagactgagtaattgggaaagaaaggtatcaatgattagtgtacggtgaacacgaaactacgaataagacacaatataactaacggcagtagttctttatatgattacacatgttaaatacaggaataaaggaatggaaggagaagagattcatggtggaacgactgagaggagtagaagagaacatgaagagagcgttatgtcgagaataaatgagaaagaataaatgaaatatagtattgagggaggcggggtgtn

SEQ ID NO: 295887 - DNA, 2029 bp, Homo sapiens
aagacttcctggaagaggtcccagcgtgagtgtcgcttctggcatctgtccttctggccagcctgtggtctggccaagtgatgtaaccctcctctccagcctgtgcacaggcagcctgggaacagctccatccccacccctcagctataaatagggcatcgtgacccggccagggaagaagctgccgttgttctgggtactacagcagaagggtatgcggaagcgagcaccccagtctgagatggctcctgccggtgtgagcctgagggccaccatcctctgcctcctggcctgggctggcctggctgcaggtgaccgggtgtacatacaccccttccacctcgtcatccacaatgagagtacctgtgagcagctggcaaaggccaatgccgggaagcccaaagaccccaccttcatacctgctccaattcaggccaagacatcccctgtggatgaaaaggccctacaggaccagctggtgctagtcgctgcaaaacttgacaccgaagacaagttgagggccgcaatggtcgggatgctggccaacttcttgggcttccgtatatatggcatgcacagtgagctatggggcgtggtccatggggccaccgtcctctccccaacggctgtctttggcaccctggcctctctctatctgggagccttggaccacacagctgacaggctacaggcaatcctgggtgttccttggaaggacaagaactgcacctcccggctggatgcgcacaaggtcctgtctgccctgcaggctgtacagggcctgctagtggcccagggcagggctgatagccaggcccagctgctgctgtccacggtggtgggcgtgttcacagccccaggcctgcacctgaagcagccgtttgtgcagggcctggctctctatacccctgtggtcctcccacgctctctggacttcacagaactggatgttgctgctgagaagattgacaggttcatgcaggctgtgacaggatggaagactggctgctccctgacgggagccagtgtggacagcaccctggctttcaacacctacgtccacttccaagggaagatgaagggcttctccctgctggccgagccccaggagttctgggtggacaacagcacctcagtgtctgttcccatgctctctggcatgggcaccttccagcactggagtgacatccaggacaacttctcggtgactcaagtgcccttcactgagagcgcctgcctgctgctgatccagcctcactatgcctctgacctggacaaggtggagggtctcactttccagcaaaactccctcaactggatgaagaaactgtctccccggaccatccacctgaccatgccccaactggtgctgcaaggatcttatgacctgcaggacctgctcgcccaggctgagctgcccgccattctgcacaccgagctgaacctgcatgagcttgaagcggatgagagagagcccacagagtctacccaacagcttaacaagcctgaggtcttggaggtgaccctgaaccgcccattcctgtttgctgtgtatgatcaaagcgccactgccctgcacttcctgggccgcgtggccaacccgctgagcacagcatgaggccagggccccagaacacagtgcctggcaaggcctctgcccctggcctttgaggcaaaggccagcagcagataacaaccccggacaaatcagcgatgtgtcacccccagtctcccaccttttcttctaatgagtcgactttgagctggaaagcagccgtttctccttggtctaagtgtgctgcatggagtgagcagtagaagcctgcagcggcacaaatgcacctcccagtttgctgggtttattttagagaatgggggtggggaggcaagaaccagtgtttagcgcgggactactgttccaaaaagaattccaaccgaccagcttgtttgtgaaacaaaaaagtgttcccttttcaagttgagaacaaaaattgggttttaaaattaaagtatacatttttgcattgcc

SEQ ID NO: 295888 - DNA, 2676 bp, Homo sapiens
aagacttcctggaagaggtcccagcgtgagtgtcgcttctggcatctgtccttctggccagcctgtggtctggccaagtgatgtaaccctcctctccagcctgtgcacaggcagcctgggaacagctccatccccacccctcagctataaatagggcatcgtgacccggccagggaagaagctgccgttgttctgggtactacagcagaagggtatgcggaagcgagcaccccagtctgagatggctcctgccggtgtgagcctgagggccaccatcctctgcctcctggcctgggctggcctggctgcaggtgaccgggtgtacatacaccccttccacctcgtcatccacaatgagagtacctgtgagcagctggcaaaggccaatgccgggaagcccaaagaccccaccttcatacctgctccaattcaggccaagacatcccctgtggatgaaaaggccctacaggaccagctggtgctagtcgctgcaaaacttgacaccgaagacaagttgagggccgcaatggtcgggatgctggccaacttcttgggcttccgtatatatggcatgcacagtgagctatggggcgtggtccatggggccaccgtcctctccccaacggctgtctttggcaccctggcctctctctatctgggagccttggaccacacagctgacaggctacaggcaatcctgggtgttccttggaaggacaagaactgcacctcccggctggatgcgcacaaggtcctgtctgccctgcaggctgtacagggcctgctagtggcccagggcagggctgatagccaggcccagctgctgctgtccacggtggtgggcgtgttcacagccccaggcctgcacctgaagcagccgtttgtgcagggcctggctctctatacccctgtggtcctcccacgctctctggacttcacagaactggatgttgctgctgagaagattgacaggttcatgcaggctgtgacaggatggaagactggctgctccctgacgggagccagtgtggacagcaccctggctttcaacacctacgtccacttccaagggaagatgaagggcttctccctgctggccgagccccaggagttctgggtggacaacagcacctcagtgtctgttcccatgctctctggcatgggcaccttccagcactggagtgacatccaggacaacttctcggtgactcaagtgcccttcactgagagcgcctgcctgctgctgatccagcctcactatgcctctgacctggacaaggtggagggtctcactttccagcaaaactccctcaactggatgaagaaactgtctccccggaccatccacctgaccatgccccaactggtgctgcaaggatcttatgacctgcaggacctgctcgcccaggctgagctgcccgccattctgcacaccgagctgaacctgcaaaaattgagcaatgaccgcatcagggtgggggaggtgctgaacagcattttttttgagcttgaagcggatgagagagagcccacagagtctacccaacagcttaacaagcctgaggtcttggaggtgaccctgaaccgcccattcctgtttgctgtgtatgatcaaagcgccactgccctgcacttcctgggccgcgtggccaacccgctgagcacagcatgaggccagggccccagaacacagtgcctggcaaggcctctgcccctggcctttgaggcaaaggccagcagcagataacaaccccggacaaatcagcgatgtgtcacccccagtctcccaccttttcttctaatgagtcgactttgagctggaaagcagccgtttctccttggtctaagtgtgctgcatggagtgagcagtagaagcctgcagcggcacaaatgcacctcccagtttgctgggtttattttagagaatgggggtggggaggcaagaaccagtgtttagcgcgggactactgttccaaaaagaattccaaccgaccagcttgtttgtgaaacaaaaaagtgttcccttttcaagttgagaacaaaaattgggttttaaaattaaagtatacatttttgcattgccttcggtttgtatttagtgtcttgaatgtaagaacatgacctccgtgtagtgtctgtaataccttagttttttccacagatgcttgtgatttttgaacaatacgtgaaagatgcaagcacctgaatttctgtttgaatgcggaacaatagctggttatttctcccttgtgttagtaataaacgtcttgccacaataagcctccaaaaaaattttatctttcatttagcagccaaacagatgtatacaattcagcagatagactgtgcaaacgaaagtgctttcctggactttggatggaatttccatgggaggtctgagccagtacttagcagtcctttgaagttttaggtgatgcttttctctggacacttccattggtaagcagtggtggccatctgtgtgatggacagggggcgggaagagggtgacagggaaggccccataccccatgtggcacctgggaaaggaaccaggcagatgggacttcttccgtcctggtgacacagggccagactgctgctggtattgtgccccgggagtggaaggtagagaaataaatcttcacaaataaatatttgcaattttcccccatc

SEQ ID NO: 295889 - DNA, 2276 bp, Homo sapiens
  misc_feature (2265)..(2265): n is a, c, g, or t
aagacttcctggaagaggtcccagcgtgagtgtcgcttctggcatctgtccttctggccagcctgtggtctggccaagtgatgtaaccctcctctccagcctgtgcacaggcagcctgggaacagctccatccccacccctcagctataaatagggcatcgtgacccggccagggaagaagctgccgttgttctgggtactacagcagaagggtatgcggaagcgagcaccccagtctgagatggctcctgccggtgtgagcctgagggccaccatcctctgcctcctggcctgggctggcctggctgcaggtgaccgggtgtacatacaccccttccacctcgtcatccacaatgagagtacctgtgagcagctggcaaaggccaatgccgggaagcccaaagaccccaccttcatacctgctccaattcaggccaagacatcccctgtggatgaaaaggccctacaggaccagctggtgctagtcgctgcaaaacttgacaccgaagacaagttgagggccgcaatggtcgggatgctggccaacttcttgggcttccgtatatatggcatgcacagtgagctatggggcgtggtccatggggccaccgtcctctccccaacggctgtctttggcaccctggcctctctctatctgggagccttggaccacacagctgacaggctacaggcaatcctgggtgttccttggaaggacaagaactgcacctcccggctggatgcgcacaaggtcctgtctgccctgcaggctgtacagggcctgctagtggcccagggcagggctgatagccaggcccagctgctgctgtccacggtggtgggcgtgttcacagccccaggcctgcacctgaagcagccgtttgtgcagggcctggctctctatacccctgtggtcctcccacgctctctggacttcacagaactggatgttgctgctgagaagattgacaggttcatgcaggctgtgacaggatggaagactggctgctccctgacgggagccagtgtggacagcaccctggctttcaacacctacgtccacttccaagggaagatgaagggcttctccctgctggccgagccccaggagttctgggtggacaacagcacctcagtgtctgttcccatgctctctggcatgggcaccttccagcactggagtgacatccaggacaacttctcggtgactcaagtgcccttcactgagagcgcctgcctgctgctgatccagcctcactatgcctctgacctggacaaggtggagggtctcactttccagcaaaactccctcaactggatgaagaaactgtctccccggaccatccacctgaccatgccccaactggtgctgcaaggatcttatgacctgcaggacctgctcgcccaggctgagctgcccgccattctgcacaccgagctgaacctgcaaaaattgagcaatgaccgcatcagggtgggggaggtgctgaacagcattttttttgagcttgaagcggatgagagagagcccacagagtctacccaacagcttaacaagcctgaggtcttggaggtgaccctgaaccgcccattcctgtttgctgtgtatgatcaaagcgccactgccctgcacttcctgggccgcgtggccaacccgctgagcacagcatgaggccagggccccagaacacagtgcctggcaaggcctctgcccctggcctttgaggcaaaggccagcagcagataacaaccccggacaaatcagcgatgtgtcacccccagtctcccaccttttcttctaatgagtcgactttgagctggaaagcagccgtttctccttggtctaagtgtgctgcatggagtgagcagtagaagcctgcagcggcacaaatgcacctcccagtttgctgggtttattttagagaatgggggtggggaggcaagaaccagtgtttagcgcgggactactgttccaaaaagaattccaaccgaccagcttgtttgtgaaacaaaaaagtgttcccttttcaagttgagaacaaaaattgggttttaaaattaaagtatacatttttgcattgccttcggtttgtatttagtgtcttgaatgtaagaacatgacctccgtgtagtgtctgtaataccttagttttttccacagatgcttgtgatttttgaacaatacgtgaaagatgcaagcacctgaatttctgtttgaatgcggaacaatagctggttatttctcccttgtgtaaactgattggntccgagctcga

SEQ ID NO: 295890 - DNA, 2622 bp, Homo sapiens
aagacttcctggaagaggtcccagcgtgagtgtcgcttctggcatctgtccttctggccagcctgtggtctggccaagtgatgtaaccctcctctccagcctgtgcacaggcagcctgggaacagctccatccccacccctcagctataaatagggcatcgtgacccggccagggaagaagctgccgttgttctgggtactacagcagaagggtatgcggaagcgagcaccccagtctgagatggctcctgccggtgtgagcctgagggccaccatcctctgcctcctggcctgggctggcctggctgcaggtgaccgggtgtacatacaccccttccacctcgtcatccacaatgagagtacctgtgagcagctggcaaaggccaatgccgggaagcccaaagaccccaccttcatacctgctccaattcaggccaagacatcccctgtggatgaaaaggccctacaggaccagctggtgctagtcgctgcaaaacttgacaccgaagacaagttgagggccgcaatggtcgggatgctggccaacttcttgggcttccgtatatatggcatgcacagtgagctatggggcgtggtccatggggccaccgtcctctccccaacggctgtctttggcaccctggcctctctctatctgggagccttggaccacacagctgacaggctacaggcaatcctgggtgttccttggaaggacaagaactgcacctcccggctggatgcgcacaaggtcctgtctgccctgcaggctgtacagggcctgctagtggcccagggcagggctgatagccaggcccagctgctgctgtccacggtggtgggcgtgttcacagccccaggcctgcacctgaagcagccgtttgtgcagggcctggctctctatacccctgtggtcctcccacgctctctggacttcacagaactggatgttgctgctgagaagattgacaggttcatgcaggctgtgacaggatggaagactggctgctccctgacgggagccagtgtggacagcaccctggctttcaacacctacgtccacttccaagggaagatgaagggcttctccctgctggccgagccccaggagttctgggtggacaacagcacctcagtgtctgttcccatgctctctggcatgggcaccttccagcactggagtgacatccaggacaacttctcggtgactcaagtgcccttcactgagagcgcctgcctgctgctgatccagcctcactatgcctctgacctggacaaggtggagggtctcactttccagcaaaactccctcaactggatgaagaaactgtctccccggaccatccacctgaccatgccccaactggtgctgcaaggatcttatgacctgcaggacctgctcgcccaggctgagctgcccgccattctgcacaccgagctgaacctgcaaaaattgagcaatgaccgcatcagggtgggggaggtgctgaacagcattttttttgagcttgaagcggatgagagagagcccacagagtctacccaacagcttaacaagcctgaggtcttggaggtgaccctgaaccgcccattcctgtttgctgtgtatgatcaaagcgccactgccctgcacttcctgggccgcgtggccaacccgctgagcacagcatgaggccagggccccagaacacagtgcctggcaaggcctctgcccctggcctttgaggcaaaggccagcagcagataacaaccccggacaaatcagcgatgtgtcacccccagtctcccaccttttcttctaatgagtcgactttgagctggaaagcagccgtttctccttggtctaagtgtgctgcatggagtgagcagtagaagcctgcagcggcacaaatgcacctcccagtttgctgggtttattttagagaatgggggtggggaggcaagaaccagtgtttagcgcgggactactgttccaaaaagaattccaaccgaccagcttgtttgtgaaacaaaaaagtgttcccttttcaagttgagaacaaaaattgggtttttgtaagaacatgacctccgtgtagtgtctgtaataccttagttttttccacagatgcttgtgatttttgaacaatacgtgaaagatgcaagcacctgaatttctgtttgaatgcggaacaatagctggttatttctcccttgtgttagtaataaacgtcttgccacaataagcctccaaaaaaattttatctttcatttagcagccaaacagatgtatacaattcagcagatagactgtgcaaacgaaagtgctttcctggactttggatggaatttccatgggaggtctgagccagtacttagcagtcctttgaagttttaggtgatgcttttctctggacacttccattggtaagcagtggtggccatctgtgtgatggacagggggcgggaagagggtgacagggaaggccccataccccatgtggcacctgggaaaggaaccaggcagatgggacttcttccgtcctggtgacacagggccagactgctgctggtattgtgccccgggagtggaaggtagagaaataaatcttcacaaataaatatttgcaattttcccccatc

SEQ ID NO: 295891 - DNA, 2228 bp, Homo sapiens
aagacttcctggaagaggtcccagcgtgagtgtcgcttctggcatctgtccttctggccagcctgtggtctggccaagtgatgtaaccctcctctccagcctgtgcacaggcagcctgggaacagctccatccccacccctcagctataaatagggcatcgtgacccggccagggaagaagctgccgttgttctgggtactacagcagaagggtatgcggaagcgagcaccccagtctgagatggctcctgccggtgtgagcctgagggccaccatcctctgcctcctggcctgggctggcctggctgcaggtgaccgggtgtacatacaccccttccacctcgtcatccacaatgagagtacctgtgagcagctggcaaaggccaatgccgggaagcccaaagaccccaccttcatacctgctccaattcaggccaagacatcccctgtggatgaaaaggccctacaggaccagctggtgctagtcgctgcaaaacttgacaccgaagacaagttgagggccgcaatggtcgggatgctggccaacttcttgggcttccgtatatatggcatgcacagtgagctatggggcgtggtccatggggccaccgtcctctccccaacggctgtctttggcaccctggcctctctctatctgggagccttggaccacacagctgacaggctacaggcaatcctgggtgttccttggaaggacaagaactgcacctcccggctggatgcgcacaaggtcctgtctgccctgcaggctgtacagggcctgctagtggcccagggcagggctgatagccaggcccagctgctgctgtccacggtggtgggcgtgttcacagccccaggcctgcacctgaagcagccgtttgtgcagggcctggctctctatacccctgtggtcctcccacgctctctggacttcacagaactggatgttgctgctgagaagattgacaggttcatgcaggctgtgacaggatggaagactggctgctccctgacgggagccagtgtggacagcaccctggctttcaacacctacgtccacttccaagggaagatgaagggcttctccctgctggccgagccccaggagttctgggtggacaacagcacctcagtgtctgttcccatgctctctggcatgggcaccttccagcactggagtgacatccaggacaacttctcggtgactcaagtgcccttcactgagagcgcctgcctgctgctgatccagcctcactatgcctctgacctggacaaggtggagggtctcactttccagcaaaactccctcaactggatgaagaaactgtctccccggaccatccacctgaccatgccccaactggtgctgcaaggatcttatgacctgcaggacctgctcgcccaggctgagctgcccgccattctgcacaccgagctgaacctgcaaaaattgagcaatgaccgcatcagggtgggggaggtgctgaacagcattttttttgagcttgaagcggatgagagagagcccacagagtctacccaacagcttaacaagcctgaggtcttggaggtgaccctgaaccgcccattcctgtttgctgtgtatgatcaaagcgccactgccctgcacttcctgggccgcgtggccaacccgctgagcacagcatgaggccagggccccagaacacagtgcctggcaaggcctctgcccctggcctttgaggccagtctcccaccttttcttctaatgagtcgactttgagctggaaagcagccgtttctccttggtctaagtgtgctgcatggagtgagcagtagaagcctgcagcggcacaaatgcacctcccagtttgctgggtttattttagagaatgggggtggggaggcaagaaccagtgtttagcgcgggactactgttccaaaaagaattccaaccgaccagcttgtttgtgaaacaaaaaagtgttcccttttcaagttgagaacaaaaattgggttttaaaattaaagtatacatttttgcattgccttcggtttgtatttagtgtcttgaatgtaagaacatgacctccgtgtagtgtctgtaataccttagttttttccacagatgcttgtgatttttgaacaatacgtgaaagatgcaagcacctgaatttctgtttgaatgcggaacaatagctggttatttctcccttgtgttagtaataaacgtcttgccacaataa

SEQ ID NO: 295892 - DNA, 1915 bp, Homo sapiens
gacccacgcgtccgcggacgcgtggggggtactacagcagaagggtatgcggaagcgagcaccccagtctgagatggctcctgccggtgtgagcctgagggccaccatcctctgcctcctggcctgggctggcctggctgcaggtgaccgggtgtacatacaccccttccacctcgtcatccacaatgagagtacctgtgagcagctggcaaaggccaatgccgggaagcccaaagaccccaccttcatacctgctccaattcaggccaagacatcccctgtggatgaaaaggccctacaggaccagctggtgctagtcgctgcaaaacttgacaccgaagacaagttgagggccgcaatggtcgggatgctggccaacttcttgggcttccgtatatatggcatgcacagtgagctatggggcgtggtccatggggccaccgtcctctccccaacggctgtctttggcaccctggcctctctctatctgggagccttggaccacacagctgacaggctacaggcaatcctgggtgttccttggaaggacaagaactgcacctcccggctggatgcgcacaaggtcctgtctgccctgcaggctgtacagggcctgctagtggcccagggcagggctgatagccaggcccagctgctgctgtccacggtggtgggcgtgttcacagccccaggcctgcacctgaagcagccgtttgtgcagggcctggctctctatacccctgtggtcctcccacgctctctggacttcacagaactggatgttgctgctgagaagattgacaggttcatgcaggctgtgacaggatggaagactggctgctccctgacgggagccagtgtggacagcaccctggctttcaacacctacgtccacttccaagggaagatgaagggcttctccctgctggccgagccccaggagttctgggtggacaacagcacctcagtgtctgttcccatgctctctggcatgggcaccttccagcactggagtgacatccaggacaacttctcggtgactcaagtgcccttcactgagagcgcctgcctgctgctgatccagcctcactatgcctctgacctggacaaggtggagggtctcactttccagcaaaactccctcaactggatgaagaaactgtctccccggaccatccacctgaccatgccccaactggtgctgcaaggatcttatgacctgcaggacctgctcgcccaggctgagctgcccgccattctgcacaccgagctgaacctgcaaaaattgagcaatgaccgcatcagggtgggggaggtgctgaacagcattttttttgagcttgaagcggatgagagagagcccacagagtctacccaacagcttaacaagcctgaggtcttggaggtgaccctgaaccgcccattcctgtttgctgtgtatgatcaaagcgccactgccctgcacttcctgggccgcgtggccaacccgctgagcacagcatgaggccagggccccagaacacagtgcctggcaaggcctctgcccctggcctttgaggcaaaggccagcagcagataacaaccccggacaaatcagcgatgtgtcacccccagtctcccaccttttcttctaatgagtcgactttgagctggaaagcagccgtttctccttggtctaagtgtgctgcatggagtgagcagtagaagcctgcagcggcacaaatgcacctcccagtttgctgggtttattttagagaatgggggtggggaggcaagaaccagtgtttagcgcgggactactgttccaaaaagaattccaaccgaccagcttgtttgtgaaacaaaaaagtgttcccttttcaagttgagaacaaaaattgggttttaaaattaaagtatacatttttgcattgcc

SEQ ID NO: 295893 - DNA, 2029 bp, Homo sapiens
aagacttcctggaagaggtcccagcgtgagtgtcgcttctggcatctgtccttctggccagcctgtggtctggccaagtgatgtaaccctcctctccagcctgtgcacaggcagcctgggaacagctccatccccacccctcagctataaatagggcatcgtgacccggccagggaagaagctgccgttgttctgggtactacagcagaagggtatgcggaagcgagcaccccagtctgagatggctcctgccggtgtgagcctgagggccaccatcctctgcctcctggcctgggctggcctggctgcaggtgaccgggtgtacatacaccccttccacctcgtcatccacaatgagagtacctgtgagcagctggcaaaggccaatgccgggaagcccaaagaccccaccttcatacctgctccaattcaggccaagacatcccctgtggatgaaaaggccctacaggaccagctggtgctagtcgctgcattcttgggcttccgtatatatggcatgcacagtgagctatggggcgtggtccatggggccaccgtcctctccccaacggctgtctttggcaccctggcctctctctatctgggagccttggaccacacagctgacaggctacaggcaatcctgggtgttccttggaaggacaagaactgcacctcccggctggatgcgcacaaggtcctgtctgccctgcaggctgtacagggcctgctagtggcccagggcagggctgatagccaggcccagctgctgctgtccacggtggtgggcgtgttcacagccccaggcctgcacctgaagcagccgtttgtgcagggcctggctctctatacccctgtggtcctcccacgctctctggacttcacagaactggatgttgctgctgagaagattgacaggttcatgcaggctgtgacaggatggaagactggctgctccctgacgggagccagtgtggacagcaccctggctttcaacacctacgtccacttccaagggaagatgaagggcttctccctgctggccgagccccaggagttctgggtggacaacagcacctcagtgtctgttcccatgctctctggcatgggcaccttccagcactggagtgacatccaggacaacttctcggtgactcaagtgcccttcactgagagcgcctgcctgctgctgatccagcctcactatgcctctgacctggacaaggtggagggtctcactttccagcaaaactccctcaactggatgaagaaactgtctccccggaccatccacctgaccatgccccaactggtgctgcaaggatcttatgacctgcaggacctgctcgcccaggctgagctgcccgccattctgcacaccgagctgaacctgcaaaaattgagcaatgaccgcatcagggtgggggaggtgctgaacagcattttttttgagcttgaagcggatgagagagagcccacagagtctacccaacagcttaacaagcctgaggtcttggaggtgaccctgaaccgcccattcctgtttgctgtgtatgatcaaagcgccactgccctgcacttcctgggccgcgtggccaacccgctgagcacagcatgaggccagggccccagaacacagtgcctggcaaggcctctgcccctggcctttgaggcaaaggccagcagcagataacaaccccggacaaatcagcgatgtgtcacccccagtctcccaccttttcttctaatgagtcgactttgagctggaaagcagccgtttctccttggtctaagtgtgctgcatggagtgagcagtagaagcctgcagcggcacaaatgcacctcccagtttgctgggtttattttagagaatgggggtggggaggcaagaaccagtgtttagcgcgggactactgttccaaaaagaattccaaccgaccagcttgtttgtgaaacaaaaaagtgttcccttttcaagttgagaacaaaaattgggttttaaaattaaagtatacatttttgcattgcc

SEQ ID NO: 295894 - DNA, 2216 bp, Homo sapiens
tcaccctcatggcctcatttaaacttaaccatctcttttaaagatcctgtctccaaataatggtcacattctgaggtcctggggttgaggacttcaacacgggcattatggccgttgggggaggtaggacataattcagctgatattggtgcattttgcacttggatcatgtagatattttccatggagctttgaatccatttcttcttttttttgtagacatgaatggatttattctgggctaaatggtgacagggaatattgagacaatgaaagatctggttagatggcacttaaaggtcagttaataaccacctttcaccctttgcaaaatgatatttcagggtatgcggaagcgagcaccccagtctgagatggctcctgccggtgtgagcctgagggccaccatcctctgcctcctggcctgggctggcctggctgcaggtgaccgggtgtacatacaccccttccacctcgtcatccacaatgagagtacctgtgagcagctggcaaaggccaatgccgggaagcccaaagaccccaccttcatacctgctccaattcaggccaagacatcccctgtggatgaaaaggccctacaggaccagctggtgctagtcgctgcaaaacttgacaccgaagacaagttgagggccgcaatggtcgggatgctggccaacttcttgggcttccgtatatatggcatgcacagtgagctatggggcgtggtccatggggccaccgtcctctccccaacggctgtctttggcaccctggcctctctctatctgggagccttggaccacacagctgacaggctacaggcaatcctgggtgttccttggaaggacaagaactgcacctcccggctggatgcgcacaaggtcctgtctgccctgcaggctgtacagggcctgctagtggcccagggcagggctgatagccaggcccagctgctgctgtccacggtggtgggcgtgttcacagccccaggcctgcacctgaagcagccgtttgtgcagggcctggctctctatacccctgtggtcctcccacgctctctggacttcacagaactggatgttgctgctgagaagattgacaggttcatgcaggctgtgacaggatggaagactggctgctccctgacgggagccagtgtggacagcaccctggctttcaacacctacgtccacttccaagggaagatgaagggcttctccctgctggccgagccccaggagttctgggtggacaacagcacctcagtgtctgttcccatgctctctggcatgggcaccttccagcactggagtgacatccaggacaacttctcggtgactcaagtgcccttcactgagagcgcctgcctgctgctgatccagcctcactatgcctctgacctggacaaggtggagggtctcactttccagcaaaactccctcaactggatgaagaaactgtctccccggaccatccacctgaccatgccccaactggtgctgcaaggatcttatgacctgcaggacctgctcgcccaggctgagctgcccgccattctgcacaccgagctgaacctgcaaaaattgagcaatgaccgcatcagggtgggggaggtgctgaacagcattttttttgagcttgaagcggatgagagagagcccacagagtctacccaacagcttaacaagcctgaggtcttggaggtgaccctgaaccgcccattcctgtttgctgtgtatgatcaaagcgccactgccctgcacttcctgggccgcgtggccaacccgctgagcacagcatgaggccagggccccagaacacagtgcctggcaaggcctctgcccctggcctttgaggcaaaggccagcagcagataacaaccccggacaaatcagcgatgtgtcacccccagtctcccaccttttcttctaatgagtcgactttgagctggaaagcagccgtttctccttggtctaagtgtgctgcatggagtgagcagtagaagcctgcagcggcacaaatgcacctcccagtttgctgggtttattttagagaatgggggtggggaggcaagaaccagtgtttagcgcgggactactgttccaaaaagaattccaaccgaccagcttgtttgtgaaacaaaaaagtgttcccttttcaagttgagaacaaaaattgggttttaaaattaaagtatacatttttgcattgcc

SEQ ID NO: 295895 - DNA, 1845 bp, Homo sapiens
aagacttcctggaagaggtcccagcgtgagtgtcgcttctggcatctgtccttctggccagcctgtggtctggccaagtgatgtaaccctcctctccagcctgtgcacaggcagcctgggaacagctccatccccacccctcagctataaatagggcatcgtgacccggccagggaagaagctgccgttgttctgggtactacagcagaagggtatgcggaagcgagcaccccagtctgagatggctcctgccggtgtgagcctgagggccaccatcctctgcctcctggcctgggctggcctggctgcaggtgaccgggtgtacatacaccccttccacctcgtcatccacaatgagagtacctgtgagcagctggcaaaggccaatgccgggaagcccaaagaccccaccttcatacctgctccaattcaggccaagacatcccctgtggatgaaaaggccctacaggaccagctggtgctagtcgctgcaaaacttgacaccgaagacaagttgagggccgcaatggtcgggatgctggccaacttcttgggcttccgtatatatggcatgcacagtgagctatggggcgtggtccatggggccaccgtcctctccccaacggctgtctttggcaccctggcctctctctatctgggagccttggaccacacagctgacaggctacaggcaatcctgggtgttccttggaaggacaagaactgcacctcccggctggatgcgcacaaggtcctgtctgccctgcaggctgtacagggcctgctagtggcccagggcagggctgatagccaggcccagctgctgctgtccacggtggtgggcgtgttcacagccccaggcctgcacctgaagcagccgtttgtgcagggcctggctctctatacccctgtggtcctcccacgctctctggacttcacagaactggatgttgctgctgagaagattgacaggttcatgcaggctgtgacaggatggaagactggctgctccctgacgggagccagtgtggacagcaccctggctttcaacacctacgtccacttccaagggaagatgaagggcttctccctgctggccgagccccaggagttctgggtggacaacagcacctcagtgtctgttcccatgctctctggcatgggcaccttccagcactggagtgacatccaggacaacttctcggtgactcaagtgcccttcactgagagcgcctgcctgctgctgatccagcctcactatgcctctgacctggacaaggtggagggtctcactttccagcaaaactccctcaactggatgaagaaactgtctccccggaccatccacctgaccatgccccaactggtgctgcaaggatcttatgacctgcaggacctgctcgcccaggctgagctgcccgccattctgcacaccgagctgaacctgcaaaaattgagcaatgaccgcatcagggtgggggaggtgctgaacagcattttttttgagcttgaagcggatgagagagagcccacagagtctacagtctcccaccttttcttctaatgagtcgactttgagctggaaagcagccgtttctccttggtctaagtgtgctgcatggagtgagcagtagaagcctgcagcggcacaaatgcacctcccagtttgctgggtttattttagagaatgggggtggggaggcaagaaccagtgtttagcgcgggactactgttccaaaaagaattccaaccgaccagcttgtttgtgaaacaaaaaagtgttcccttttcaagttgagaacaaaaattgggttttaaaattaaagtatacatttttgcattgcc

SEQ ID NO: 295896 - DNA, 1037 bp, Homo sapiens
ccctgtctcctgtctggatttcagggaagatgaagggcttctccctgctggccgagccccaggagttctgggtggacaacagcacctcagtgtctgttcccatgctctctggcatgggcaccttccagcactggagtgacatccaggacaacttctcggtgactcaagtgcccttcactgagagcgcctgcctgctgctgatccagcctcactatgcctctgacctggacaaggtggagggtctcactttccagcaaaactccctcaactggatgaagaaactgtctccccggaccatccacctgaccatgccccaactggtgctgcaaggatcttatgacctgcaggacctgctcgcccaggctgagctgcccgccattctgcacaccgagctgaacctgcaaaaattgagcaatgaccgcatcagggtgggggaggtgctgaacagcattttttttgagcttgaagcggatgagagagagcccacagagtctacccaacagcttaacaagcctgaggtcttggaggtgaccctgaaccgcccattcctgtttgctgtgtatgatcaaagcgccactgccctgcacttcctgggccgcgtggccaacccgctgagcacagcatgaggccagggccccagaacacagtgcctggcaaggcctctgcccctggcctttgaggcaaaggccagcagcagataacaaccccggacaaatcagcgatgtgtcacccccagtctcccaccttttcttctaatgagtcgactttgagctggaaagcagccgtttctccttggtctaagtgtgctgcatggagtgagcagtagaagcctgcagcggcacaaatgcacctcccagtttgctgggtttattttagagaatgggggtggggaggcaagaaccagtgtttagcgcgggactactgttccaaaaagaattccaaccgaccagcttgtttgtgaaacaaaaaagtgttcccttttcaagttgagaacaaaaattgggttttaaaattaaagtatacatttttgcattgcc

SEQ ID NO: 295897 - DNA, 781 bp, Homo sapiens
  misc_feature (2)..(2): n is a, c, g, or t
anttcggcacagctggatgaagaaactgtctccccggaccatccacctgaccatgccccaactggtgctgcaaggatcttatgacctgcaggacctgctcgcccaggctgagctgcccgccattctgcacaccgagctgaacctgcaaaaattgagcaatgaccgcatcagggtgggggaggtgctgaacagcattttttttgagcttgaagcggatgagagagagcccacagagtctacccaacagcttaacaagcctgaggtcttggaggtgaccctgaaccgcccattcctgtttgctgtgtatgatcaaagcgccactgccctgcacttcctgggccgcgtggccaacccgctgagcacagcatgaggccagggccccagaacacagtgcctggcaaggcctctgcccctggcctttgaggcaaaggccagcagcagataacaaccccggacaaatcagcgatgtgtcacccccagtctcccaccttttcttctaatgagtcgactttgagctggaaagcagccgtttctccttggtctaagtgtgctgcatggagtgagcagtagaagcctgcagcggcacaaatgcacctcccagtttgctgggtttattttagagaatgggggtggggaggcaagaaccagtgtttagcgcgggactactgttccaaaaagaattccaaccgaccagcttgtttgtgaaacaaaaaagtgttcccttttcaagttgagaacaaaaattgggttttaaaattaaagtatacatttttgcattgcc

SEQ ID NO: 295898 - DNA, 1144 bp, Homo sapiens
aagacttcctggaagaggtcccagcgtgagtgtcgcttctggcatctgtccttctggccagcctgtggtctggccaagtgatgtaaccctcctctccagcctgtgcacaggcagcctgggaacagctccatccccacccctcagctataaatagggcatcgtgacccggccagggaagaagctgccgttgttctgggtactacagcagaagggtatgcggaagcgagcaccccagtctgagatggctcctgccggtgtgagcctgagggccaccatcctctgcctcctggcctgggctggcctggctgcaggtgaccgggtgtacatacaccccttccacctcgtcatccacaatgagagtacctgtgagcagctggcaaaggccaatgccgggaagcccaaagaccccaccttcatacctgctccaattcaggccaagacatcccctgtggatgaaaaggccctacaggaccagctggtgctagtcgctgcaaaacttgacaccgaagacaagttgagggccgcaatggtcgggatgctggccaacttcttgggcttccgtatatatggcatgcacagtgagctatggggcgtggtccatggggccaccgtcctctccccaacggctgtctttggcaccctggcctctctctatctgggagccttggaccacacagctgacaggctacaggcaatcctgggccgcgtggccaacccgctgagcacagcatgaggccagggccccagaacacagtgcctggcaaggcctctgcccctggcctttgaggcaaaggccagcagcagataacaaccccggacaaatcagcgatgtgtcacccccagtctcccaccttttcttctaatgagtcgactttgagctggaaagcagccgtttctccttggtctaagtgtgctgcatggagtgagcagtagaagcctgcagcggcacaaatgcacctcccagtttgctgggtttattttagagaatgggggtggggaggcaagaaccagtgtttagcgcgggactactgttccaaaaagaattccaaccgaccagcttgtttgtgaaacaaaaaagtgttcccttttcaagttgagaacaaaaattgggttttaaaattaaagtatacatttttgcattgcc

SEQ ID NO: 295899 - DNA, 1069 bp, Homo sapiens
tcttcaagttctattttttaatcattcatacagccataacatgcatactagtcgaatatgagccttggataagggattagggtagataagcagcagagtggagtcctgaggtgacataagggctgaccccttatccatgtcatagtgcccactgggtcacaatgccaccaggttgcctaaacctctgccacccacctgtgaacttcactttgccacagggaggcactgaactgaaaaactgccttgtaagaggtgtcgcccctctgtctactccctttcttatatcaagaggggaaaaacacgtaactacctctacccgatctggtcaccatacgcctattacctttactgttacaagtaccggatcactctccgggagaagatgctgcctcgttgttataaaagcatcacttataaggaagaggaggacttgacactccagccccgttcctgcctccagtgctcctgagtccctagtaggcctccaggagggcaaaagcaccgagcagggtaaccacgaccagcttaaagaactgtattcggctgggaacttgacggtgctggctactgaccccctgctccaccaggacccagtacagttagactttcacttccgccttacctcccagacctctgcccattggcacggccttctctgtgaccgtcgactcttcctggatatcccatatcaggccttggatcaaggcaaccgggaaagtttgactgcaaccctggagtacgtggaagagaagacaaatgtggactctgtgtttgtgaacttccagaatgatcggaacgacagaggtgccctgctgcgggccttcagctacatgggctttgaggtggtcagaccagatcaccctgccctccctcccttggacaatgtcatctttatggtgtatccccttgaaagggatgttggccacctgcccagtgagcctccttgaacatgcttattccaacgctttgaggggctggaagccttgacacatggaatcaggggcccgggatgtgattcaggacactttccatcctaggaataaagggtagtgcaatcaaaaaaaaaaaa

SEQ ID NO: 295900 - DNA, 846 bp, Homo sapiens
cggccgcagtagctcctggacgcctccccgaagcagccgtccagcgcccgcccgcagcagagctctgcccggggccgtgacaacgggcgccgccatgttcacaggcacagaatgagacctgagggaggaccccggcgtcggcggcaggaaaggcccccgccagtgctgcctgcggcgcgccgcatcacttataaggaagaggaggacttgacactccagccccgttcctgcctccagtgctcctgagtccctagtaggcctccaggagggcaaaagcaccgagcagggtaaccacgaccagcttaaagaactgtattcggctgggaacttgacggtgctggctactgaccccctgctccaccaggacccagtacagttagactttcacttccgccttacctcccagacctctgcccattggcacggccttctctgtgaccgtcgactcttcctggatatcccatatcaggccttggatcaaggcaaccgggaaagtttgactgcaaccctggagtacgtggaagagaagacaaatgtggactctgtgtttgtgaacttccagaatgatcggaacgacagaggtgccctgctgcgggccttcagctacatgggctttgaggtggtcagaccagatcaccctgccctccctcccttggacaatgtcatctttatggtgtatccccttgaaagggatgttggccacctgcccagtgagcctccttgaacatgcttattccaacgctttgaggggctggaagccttgacacatggaatcaggggcccgggatgtgattcaggacactttccatcctaggaataaagggtagtgcaatcaaaaaaaaaaaa

SEQ ID NO: 295901 - DNA, 824 bp, Homo sapiens
ggatgagctccaggttttctttgggccgatgcttcgtgtcctccaccagcttatagacgcggtgtcgccggtgcaggcgcggcttccggccctccccggccagcggtaccttccaccagcgctccacgatgaccgtgccctggcggccaggaaagcgacgcatcacttataaggaagaggaggacttgacactccagccccgttcctgcctccagtgctcctgagtccctagtaggcctccaggagggcaaaagcaccgagcagggtaaccacgaccagcttaaagaactgtattcggctgggaacttgacggtgctggctactgaccccctgctccaccaggacccagtacagttagactttcacttccgccttacctcccagacctctgcccattggcacggccttctctgtgaccgtcgactcttcctggatatcccatatcaggccttggatcaaggcaaccgggaaagtttgactgcaaccctggagtacgtggaagagaagacaaatgtggactctgtgtttgtgaacttccagaatgatcggaacgacagaggtgccctgctgcgggccttcagctacatgggctttgaggtggtcagaccagatcaccctgccctccctcccttggacaatgtcatctttatggtgtatccccttgaaagggatgttggccacctgcccagtgagcctccttgaacatgcttattccaacgctttgaggggctggaagccttgacacatggaatcaggggcccgggatgtgattcaggacactttccatcctaggaataaagggtagtgcaatcaaaaaaaaaaaa

SEQ ID NO: 295902 - DNA, 517 bp, Homo sapiens
tcttcaagttctattttttaatcattcatacagccataacatgcatactagtcgaatatgagccttggataagggattagggtagataagcagcagagtggagtcctgaggtgacataagggctgaccccttatccatgtcatagtgcccactgggtcacaatgccaccaggttgcctaaacctctgccacccacctgtgaacttcactttgccacagggaggcactgaactgaaaaactgccttgtaagaggtgtcgcccctctgtctactccctttcttatatcaagaggggaaaaacacgtaactacctctacccgatctggtcaccatacgcctattacctttactgttacaagtaccggatcactctccgggagaagatgctgcctcgttgttataaaaggtacttgttttcatctctatttgtagttgtttatataaaatgtaaggaaaaagtaaaagaatttgaaagaatttcccaaatggcaagaaataacaacagaatagggggtgga

SEQ ID NO: 295903 - DNA, 584 bp, Homo sapiens
tcttcaagttctattttttaatcattcatacagccataacatgcatactagtcgaatatgagccttggataagggattagggtagataagcagcagagtggagtcctgaggtgacataagggctgaccccttatccatgtcatagtgcccactgggtcacaatgccaccaggttgcctaaacctctgccacccacctgtgaacttcactttgccacagggaggcactgaactgaaaaactgccttgtaagaggtgtcgcccctctgtctactccctttcttatatcaagaggggaaaaacacgtaactacctctacccgatctggtcaccatacgcctattacctttactgttacaagtaccggatcactctccgggagaagatgctgcctcgttgttataaaagcatcacttataaggaagaggaggacttgacactccagccccgttcctgcctccttgaacatgcttattccaacgctttgaggggctggaagccttgacacatggaatcaggggcccgggatgtgattcaggacactttccatcctaggaataaagggtagtgcaatcaaaaaaaaaaaa

SEQ ID NO: 295904 - DNA, 369 bp, Homo sapiens
cggccgcagtagctcctggacgcctccccgaagcagccgtccagcgcccgcccgcagcagagctctgcccggggccgtgacaacgggcgccgccatgttcacaggcacagaatgagacccagacctctgcccattggcacggccttctctgtgaccgtcgactcttcctggatatcccatatcaggccttggatcaaggcaaccgggaaagctcccggacggggcagctgccgggcggagacgcccctcacttcccagacgaggcggctgccgggcggaggggctcctcacttctcagacagggcggacgggcagagatgctcctcacctcccagatggggtcgcggctgggcagagacactcctcagt

SEQ ID NO: 295905 - DNA, 289 bp, Homo sapiens
cggccgcagtagctcctggacgcctccccgaagcagccgtccagcgcccgcccgcagcagagctctgcccggggccgtgacaacgggcgccgccatgttcacaggcacagaatgagacctgagggaggaccccggcgtcggcggcaggaaaggcccccgccagtgctgcctgcggcgcgccggtacggctgagcgaaagtatggggagcgggccggggaacagatggcaccgcggcttgcctatttttgctttttggcagaggtgacggacgcctagaattactgactg

SEQ ID NO: 295906 - DNA, 647 bp, Homo sapiens
attcggcacgagcggcacgagcccgttcctgcctccagtgctcctgagtccctagtaggcctccaggagggcaaaagcaccgagcagggtaaccacgaccagcttaaagaactgtattcggctgggaacttgacggtgctggctactgaccccctgctccaccaggacccagtacagttagactttcacttccgccttacctcccagacctctgcccattggcacggccttctctgtgaccgtcgactcttcctggatatcccatatcaggccttggatcaaggcaaccgggaaagtttgactgcaaccctggagtacgtggaagagaagacaaatgtggactctgtgtttgtgaacttccagaatgatcggaacgacagaggtgccctgctgcgggccttcagctacatgggctttgaggtggtcagaccagatcaccctgccctccctcccttggacaatgtcatctttatggtgtatccccttgaaagggatgttggccacctgcccagtgagcctccttgaacatgcttattccaacgctttgaggggctggaagccttgacacatggaatcaggggcccgggatgtgattcaggacactttccatcctaggaataaagggtagtgcaatcaaaaaaaaaaaa

SEQ ID NO: 295907 - DNA, 986 bp, Homo sapiens
tcttcaagttctattttttaatcattcatacagccataacatgcatactagtcgaatatgagccttggataagggattagggtagataagcagcagagtggagtcctgaggtgacataagggctgaccccttatccatgtcatagtgcccactgggtcacaatgccaccaggttgcctaaacctctgccacccacctgtgaacttcactttgccacagggaggcactgaactgaaaaactgccttgtaagaggtgtcgcccctctgtctactccctttcttatatcaagaggggaaaaacacgtaactacctctacccgatctggtcaccatacgcctattacctttactgttacaagtaccggatcactctccgggagaagatgctgcctcgttgttataaaagcatcacttataaggaagaggaggacttgacactccagccccgttcctgcctccagtgctcctgagtccctagtaggcctccaggagggcaaaagcaccgagcagggtaaccacgaccagcttaaagaactgtattcgccagacctctgcccattggcacggccttctctgtgaccgtcgactcttcctggatatcccatatcaggccttggatcaaggcaaccgggaaagtttgactgcaaccctggagtacgtggaagagaagacaaatgtggactctgtgtttgtgaacttccagaatgatcggaacgacagaggtgccctgctgcgggccttcagctacatgggctttgaggtggtcagaccagatcaccctgccctccctcccttggacaatgtcatctttatggtgtatccccttgaaagggatgttggccacctgcccagtgagcctccttgaacatgcttattccaacgctttgaggggctggaagccttgacacatggaatcaggggcccgggatgtgattcaggacactttccatcctaggaataaagggtagtgcaatcaaaaaaaaaaaa

SEQ ID NO: 295908 - DNA, 1006 bp, Homo sapiens
tcttcaagttctattttttaatcattcatacagccataacatgcatactagtcgaatatgagccttggataagggattagggtagataagcagcagagtggagtcctgaggtgacataagggctgaccccttatccatgtcatagtgcccactgggtcacaatgccaccaggttgcctaaacctctgccacccacctgtgaacttcactttgccacagggaggcactgaactgaaaaactgccttgtaagaggtgtcgcccctctgtctactccctttcttatatcaagaggggaaaaacacgtaactacctctacccgatctggtcaccatacgcctattacctttactgttacaagtaccggatcactctccgggagaagatgctgcctcgttgttataaaagcatcacttataaggaagaggaggacttgacactccagccccgttcctgcctccagtgctcctgagtccctagtaggcctccaggagggcaaaagcaccgagcagggtaaccacgaccagcttaaagaactgtattcggctgggaacttgacggtgctggctactgaccccctgctccaccaggacccagtacagttagactttcacttccgccttacctcccagacctctgcccattggcacggccttctctgtgaccgtcgactcttcctggatatcccatatcaggccttggatcaaggcaaccgggaaagtttgactgcaaccctggagtacgtggaagagaagacaaatgtggactctgtgtttgtgaacttccagaatgatcggaacgacagaggtggggatctgctgttcttcatctttatggtgtatccccttgaaagggatgttggccacctgcccagtgagcctccttgaacatgcttattccaacgctttgaggggctggaagccttgacacatggaatcaggggcccgggatgtgattcaggacactttccatcctaggaataaagggtagtgcaatcaaaaaaaaaaaa

SEQ ID NO: 295909 - DNA, 983 bp, Homo sapiens
tcttcaagttctattttttaatcattcatacagccataacatgcatactagtcgaatatgagccttggataagggattagggtagataagcagcagagtggagtcctgaggtgacataagggctgaccccttatccatgtcatagtgcccactgggtcacaatgccaccaggttgcctaaacctctgccacccacctgtgaacttcactttgccacagggaggcactgaactgaaaaactgccttgtaagaggtgtcgcccctctgtctactccctttcttatatcaagaggggaaaaacacgtaactacctctacccgatctggtcaccatacgcctattacctttactgttacaagtaccggatcactctccgggagaagatgctgcctcgttgttataaaagcatcacttataaggaagaggaggacttgacactccagccccgttcctgcctccagtgctcctgagtccctagtaggcctccaggagggcaaaagcaccgagcagggtaaccacgaccagcttaaagaactgtattcggctgggaacttgacggtgctggctactgaccccctgctccaccaggacccagtacagttagactttcacttccgccttacctcccagacctctgcccattggcacggccttctctgtgaccgtcgactcttcctggatatcccatatcaggccttggatcaaggcaaccgggaaaggtgccctgctgcgggccttcagctacatgggctttgaggtggtcagaccagatcaccctgccctccctcccttggacaatgtcatctttatggtgtatccccttgaaagggatgttggccacctgcccagtgagcctccttgaacatgcttattccaacgctttgaggggctggaagccttgacacatggaatcaggggcccgggatgtgattcaggacactttccatcctaggaataaagggtagtgcaatcaaaaaaaaaaaa

SEQ ID NO: 295910 - DNA, 459 bp, Homo sapiens
catatgtttggaggaaaggcagactaatgaagaagttatcacaatagcttccattgtcacatctttttgtcccaaaccttttattggaagttaataaagtaagaaaaataattcgggccaggcacagtggctcatgcctgtaatcccagcactttgggaagccaaggcaggaggatcaccgaagcccaagacttccagcctaggcaacatggcgagatcccgtctcttcaaaaaatacgaaaattagccgggtgtgggtggcatgcacctgtagttccagcaacttgggaggctgaggtgggaggattgtttgagccagggaagtcaaggctgcagtgacccgaggttgtgccgctgtgctccagcctgggtgacaaagtgagagaccctcttatccaaaaccacatcactcttcctgagttctaggaccttggaaagataccgacagagctcagcatt

SEQ ID NO: 295911 - DNA, 693 bp, Homo sapiens
catatgtttggaggaaaggcagactaatgaagaagttatcacaatagcttccattgtcacatctttttgtcccaaaccttttattggaagttaataaagtaagaaaaataattcgggccaggcacagtggctcatgcctgtaatcccagcactttgggaagccaaggcaggaggatcaccgaagcccaagacttccagcctaggcaacatggcgagatcccgtctcttcaaaaaatacgaaaattagccgggtgtgggtggcatgcacctgtagttccagcaacttgggaggctgaggtgggaggattgtttgagccagggaagtcaaggctgcagtgacccgaggttgtgccgctgtgctccagcctgggtgacaaagtgagagaccctctgaaacgccctcctgagtctcctccaattgttgaggaatggaatagcagagctgttacagcattttgtttggagccaggttttgcatggatggctatggtgacgcatcctttaggatcaactgccacaggacctaagggaggaagtggtctctctggttccttgctctggcttttacccttggtcgtcgcaccagccttcttaggcatctcggcgcaaagaagccgagcggagccccgagtattgggtgttgcccgaaggtgcctcagcccgctgcggagccgcagcatccccgcctgggaa

SEQ ID NO: 295912 - DNA, 448 bp, Homo sapiens
ttttaatttttaaattttttttaatggaaatgtctttaaaattgtacagattttcagaatgactgacactgccgaagctgttccaaagtttgaagagatgtttgctagtagattcacagaaaatgacaaggagtatcaggaatacctgaaacgccctcctgagtctcctccaattgttgaggaatggaatagcagagctgttacagcattttgtttggagccaggttttgcatggatggctatggtgacgcatcctttaggatcaactgccacaggacctaagggaggaagtggtctctctggttccttgctctggcttttacccttggtcgtcgcaccagccttcttaggcatctcggcgcaaagaagccgagcggagccccgagtattgggtgttgcccgaaggtgcctcagcccgctgcggagccgcagcatccccgcctgggaa

SEQ ID NO: 295913 - DNA, 705 bp, Homo sapiens
ttgataagacctgagctgcgactgaagcccttgctgcattgttcattttgttagtgcacttctccttattgtaggaataaggtgaagcgcttacacaagtttgcagcagaatagtcattccgaaatacttttgtagaaaccactccactgaatgtatacataataaatactacttgtataatgctgacttaaaattttctcacttgaatacacagacttaaattttgactatcatgatgggaaaaaaaaaagatggtctacacagtatgtttaacaaaaaagtagatagcctgaggaattaaattaatggttcaaaccgtcatcatgaaaaattgagatgctgttaccacacgtgatttgggaatcaatgtataagaagaccaagacagtcagacactaataatggcgttctgaaaccataagtgatacttgggccgggcgcggtggctcacgcctgttacagcattttgtttggagccaggttttgcatggatggctatggtgacgcatcctttaggatcaactgccacaggacctaagggaggaagtggtctctctggttccttgctctggcttttacccttggtcgtcgcaccagccttcttaggcatctcggcgcaaagaagccgagcggagccccgagtattgggtgttgcccgaaggtgcctcagcccgctgcggagccgcagcatccccgcctgggaa

SEQ ID NO: 295914 - DNA, 1768 bp, Homo sapiens
agcggggggtagctgaggggagccccagtctatggcaggagcagagatttctgaaagctgttggctccctctgccctggaggtaatgctgaaatttgactttgtgtataactgatgtgtgttacctttgtcatgtcttcagaataaactgtggtcattctttttctttcctcctctggtatatatatggactagttcatgggccttattaaaagacttgtttggagaggaaggcgctcggttacattggagaactggagtggtctggagttccacggtgtagtggaccagaggccacctctcctgggcttctcagtgtctcgccggcggggttcggcctgagctggattgacatagcccttggcggatttaaacaacctaaacattaagcagtacagctgcctcaaacctttgggattttcagaatgactgacactgccgaagctgttccaaagtttgaagagatgtttgctagtagattcacagaaaatgacaaggagtatcaggaatacctgaaacgccctcctgagtctcctccaattgttgaggaatggaatagcagagctggtgggaaccaaagaaacagaggcaatcggttgcaagacaacagacagttcagaggcagggacaacagatgggggtggccaagtgacaatcgatccaatcagtggcatggacgatcctggggtaacaactacccgcaacacagacaagaaccttactatccccagcaatatggacattatggttacaaccagcggcctccttacggttactactgatagaaatgttggcagcttttagtaaaagcatttactctgttaccatgagaaaagttgggtgtcttctgttggtcatagttttacatctgattttacagaatggattattgattttttggaagttgagactttaaaaaaaatagatcttacttgcgaaatgcgatggttgctgggaatacctgaaactgtggattatattgcttgacttctacctcagaatcttctttgtttcatgacttaatagtgctttaagtttggtatattatttgacctctaggaattctttgttttacacagaaataaaaattttaaaatagaaaatgcttttactttgtaaggtaagagagtatccatatgcttagatgtgctcgtttctaaaattctagaggttgatataatcagctcatgaatgcacagctatgctttttgtgatagattgtacataacatcagcagttgaaaggtaaaacaattgcttttttttttttttgcatttgttaagtgactatggtactttgtgattccttaatctatagatgagtcagctccacacttgagtctctttttagagggaaatcagtaataaagctgtaaaataaggaaggaatcattgtcagtttgtgtcttgatctggtggtggttgggataagggtacacatcattttatacaaacactaaagctttttgctaacaacatagcaggtcaaaattcacacataagaaagtttaactctgtactgttcacactttttaatcctgtaaataatgctgcattttgatggttcttacttttttggtatttaatgtgggctgattttacaatgttatattcacttccagatgcatacctctgctgctttctctcctataaatagtgatgctataaacttcctttcacagagatcattctatttcaaatcactttaatgattattacaatgatttcattcaaataaaaattttaaaatatttaagcatcttcactccc

SEQ ID NO: 295915 - DNA, 1384 bp, Homo sapiens
agcggggggtagctgaggggagccccagtctatggcaggagcagagatttctgaaagctgttggctccctctgccctggaggtaatgctgaaatttgactttgtgtataactgatgtgtgttacctttgtcatgtcttcagaataaactgtggtcattctttttctttcctcctctggtatatatatggactagttcatgggccttattaaaagacttgtttggagaggaaggcgctcggttacattggagaactggagtggtctggagttccacggtgtagtggaccagaggccacctctcctgggcttctcagtgtctcgccggcggggttcggcctgagctggattgacatagcccttggcggatttaaacaacctaaacattaagcagtacagctgcctcaaacctttgggattttcagaatgactgacactgccgaagctgttccaaagtttgaagagatgtttgctagtagattcacagaaaatgacaaggagtatcaggaatacctgaaacgccctcctgagtctcctccaattgttgaggaatggaatagcagagctggtgggaaccaaagaaacagaggcaatcggttgcaagacaacagacagttcagaggcagggacaacagatgggggtggccaagtgacaatcgatccaatcagtggcatggacgatcctggggtaacaactacccgcaacacagacaagaaccttactatccccagcaatatggacattatggttacaaccagcggcctccttacggttactactgatagaaatgttggcagcttttagtaaaagcatttactctgttaccatgagaaaagttgggtgtcttctgttggtcatagttttacatctgattttacagaatggattattgattttttggaagttgagactttaaaaaaaatagatcttacttgcgaaatgcgatggttgctgggaatacctgaaactgtggattatattgcttgacttctacctcagaatcttctttgtttcatgacttaatagtgctttaagtttggtatattatttgacctctaggaattctttgttttacacagaaataaaaattttaaaatagaaaatgcttttactttgtaaggtaagagagtatccatatgcttagatgtgctcgtttctaaaattctagaggttgatataatcagctcatgaatgcacagctatgctttttgtgatagattgtacataacatcagcagttgaaaggtaaaacaattgcttttttttttttttgcatttgttaagtgactatggtactttgtgattccttaatctatagatgagtcagctccacacttgagtctctttttagagggaaatcagtaataaagctgtaaaataaggaag

SEQ ID NO: 295916 - DNA, 1566 bp, Homo sapiens
agtcaggtggttgtcggattttagaggaaggcgctcggttacattggagaactggagtggtctggagttccacggtgtagtggaccagaggccacctctcctgggcttctcagtgtctcgccggcggggttcggcctgagctggattgacatagcccttggcggatttaaacaacctaaacattaagcagtacagctgcctcaaacctttgggattttcagaatgactgacactgccgaagctgttccaaagtttgaagagatgtttgctagtagattcacagaaaatgacaaggagtatcaggaatacctgaaacgccctcctgagtctcctccaattgttgaggaatggaatagcagagctggtgggaaccaaagaaacagaggcaatcggttgcaagacaacagacagttcagaggcagggacaacagatgggggtggccaagtgacaatcgatccaatcagtggcatggacgatcctggggtaacaactacccgcaacacagacaagaaccttactatccccagcaatatggacattatggttacaaccagcggcctccttacggttactactgatagaaatgttggcagcttttagtaaaagcatttactctgttaccatgagaaaagttgggtgtcttctgttggtcatagttttacatctgattttacagaatggattattgattttttggaagttgagactttaaaaaaaatagatcttacttgcgaaatgcgatggttgctgggaatacctgaaactgtggattatattgcttgacttctacctcagaatcttctttgtttcatgacttaatagtgctttaagtttggtatattatttgacctctaggaattctttgttttacacagaaataaaaattttaaaatagaaaatgcttttactttgtaaggtaagagagtatccatatgcttagatgtgctcgtttctaaaattctagaggttgatataatcagctcatgaatgcacagctatgctttttgtgatagattgtacataacatcagcagttgaaaggtaaaacaattgcttttttttttttttgcatttgttaagtgactatggtactttgtgattccttaatctatagatgagtcagctccacacttgagtctctttttagagggaaatcagtaataaagctgtaaaataaggaaggaatcattgtcagtttgtgtcttgatctggtggtggttgggataagggtacacatcattttatacaaacactaaagctttttgctaacaacatagcaggtcaaaattcacacataagaaagtttaactctgtactgttcacactttttaatcctgtaaataatgctgcattttgatggttcttacttttttggtatttaatgtgggctgattttacaatgttatattcacttccagatgcatacctctgctgctttctctcctataaatagtgatgctataaacttcctttcacagagatcattctatttcaaatcactttaatgattattacaatgatttcattcaaataaaaattttaaaatatttaagcatcttcactccc

SEQ ID NO: 295917 - DNA, 1426 bp, Homo sapiens
ctggatcgacagtagcgtctgcggatttaaacaacctaaacattaagcagtacagctgcctcaaacctttgggattttcagaatgactgacactgccgaagctgttccaaagtttgaagagatgtttgctagtagattcacagaaaatgacaaggagtatcaggaatacctgaaacgccctcctgagtctcctccaattgttgaggaatggaatagcagagctggtgggaaccaaagaaacagaggcaatcggttgcaagacaacagacagttcagaggcagggacaacagatgggggtggccaagtgacaatcgatccaatcagtggcatggacgatcctggggtaacaactacccgcaacacagacaagaaccttactatccccagcaatatggacattatggttacaaccagcggcctccttacggttactactgatagaaatgttggcagcttttagtaaaagcatttactctgttaccatgagaaaagttgggtgtcttctgttggtcatagttttacatctgattttacagaatggattattgattttttggaagttgagactttaaaaaaaatagatcttacttgcgaaatgcgatggttgctgggaatacctgaaactgtggattatattgcttgacttctacctcagaatcttctttgtttcatgacttaatagtgctttaagtttggtatattatttgacctctaggaattctttgttttacacagaaataaaaattttaaaatagaaaatgcttttactttgtaaggtaagagagtatccatatgcttagatgtgctcgtttctaaaattctagaggttgatataatcagctcatgaatgcacagctatgctttttgtgatagattgtacataacatcagcagttgaaaggtaaaacaattgcttttttttttttttgcatttgttaagtgactatggtactttgtgattccttaatctatagatgagtcagctccacacttgagtctctttttagagggaaatcagtaataaagctgtaaaataaggaaggaatcattgtcagtttgtgtcttgatctggtggtggttgggataagggtacacatcattttatacaaacactaaagctttttgctaacaacatagcaggtcaaaattcacacataagaaagtttaactctgtactgttcacactttttaatcctgtaaataatgctgcattttgatggttcttacttttttggtatttaatgtgggctgattttacaatgttatattcacttccagatgcatacctctgctgctttctctcctataaatagtgatgctataaacttcctttcacagagatcattctatttcaaatcactttaatgattattacaatgatttcattcaaataaaaattttaaaatatttaagcatcttcactccc

SEQ ID NO: 295918 - DNA, 1838 bp, Homo sapiens
atgggtggggagtcgtgggagaacatatgagaacataaaaatggagtagcaccttttccttgccttatgatttttactgcccatctggattaggtatgggtcatctttttagtgatttctgtgatcccactagaattctagacatgatttttaattagctgaatttatttaaaactcattccttggatttgagaatttgatatagtttgccaatcccagacacattgaaagtctgatatttggtatttgataaagcatactaagagcaatagcctgaaagataagagtgtcaggctgggcgcggtggcttatgcctgttatcccagtactttgggaggctgaggcaggcagatcacctgaggtcaggagttcaagatcagcctggccaacatgatgaaaccctgtctctactaaaaatacaaaaattaggaaaattagccgggtgtgggtggcatgcacctgtagttccagcaacttgggaggctgaggtgggaggattgtttgagccagggaagtcaaggctgcagtgacccgaggttgtgccgctgtgctccagcctgggtgacaaagtgagagaccctctgaaacgccctcctgagtctcctccaattgttgaggaatggaatagcagagctggtgggaaccaaagaaacagaggcaatcggttgcaagacaacagacagttcagaggcagggacaacagatgggggtggccaagtgacaatcgatccaatcagtggcatggacgatcctggggtaacaactacccgcaacacagacaagaaccttactatccccagcaatatggacattatggttacaaccagcggcctccttacggttactactgatagaaatgttggcagcttttagtaaaagcatttactctgttaccatgagaaaagttgggtgtcttctgttggtcatagttttacatctgattttacagaatggattattgattttttggaagttgagactttaaaaaaaatagatcttacttgcgaaatgcgatggttgctgggaatacctgaaactgtggattatattgcttgacttctacctcagaatcttctttgtttcatgacttaatagtgctttaagtttggtatattatttgacctctaggaattctttgttttacacagaaataaaaattttaaaatagaaaatgcttttactttgtaaggtaagagagtatccatatgcttagatgtgctcgtttctaaaattctagaggttgatataatcagctcatgaatgcacagctatgctttttgtgatagattgtacataacatcagcagttgaaaggtaaaacaattgcttttttttttttttgcatttgttaagtgactatggtactttgtgattccttaatctatagatgagtcagctccacacttgagtctctttttagagggaaatcagtaataaagctgtaaaataaggaaggaatcattgtcagtttgtgtcttgatctggtggtggttgggataagggtacacatcattttatacaaacactaaagctttttgctaacaacatagcaggtcaaaattcacacataagaaagtttaactctgtactgttcacactttttaatcctgtaaataatgctgcattttgatggttcttacttttttggtatttaatgtgggctgattttacaatgttatattcacttccagatgcatacctctgctgctttctctcctataaatagtgatgctataaacttcctttcacagagatcattctatttcaaatcactttaatgattattacaatgatttcattcaaataaaaattttaaaatatttaagcatcttcactccc

SEQ ID NO: 295919 - DNA, 1647 bp, Homo sapiens
catatgtttggaggaaaggcagactaatgaagaagttatcacaatagcttccattgtcacatctttttgtcccaaaccttttattggaagttaataaagtaagaaaaataattcgggccaggcacagtggctcatgcctgtaatcccagcactttgggaagccaaggcaggaggatcaccgaagcccaagacttccagcctaggcaacatggcgagatcccgtctcttcaaaaaatacgaaaattagccgggtgtgggtggcatgcacctgtagttccagcaacttgggaggctgaggtgggaggattgtttgagccagggaagtcaaggctgcagtgacccgaggttgtgccgctgtgctccagcctgggtgacaaagtgagagaccctctgaaacgccctcctgagtctcctccaattgttgaggaatggaatagcagagctggtgggaaccaaagaaacagaggcaatcggttgcaagacaacagacagttcagaggcagggacaacagatgggggtggccaagtgacaatcgatccaatcagtggcatggacgatcctggggtaacaactacccgcaacacagacaagaaccttactatccccagcaatatggacattatggttacaaccagcggcctccttacggttactactgatagaaatgttggcagcttttagtaaaagcatttactctgttaccatgagaaaagttgggtgtcttctgttggtcatagttttacatctgattttacagaatggattattgattttttggaagttgagactttaaaaaaaatagatcttacttgcgaaatgcgatggttgctgggaatacctgaaactgtggattatattgcttgacttctacctcagaatcttctttgtttcatgacttaatagtgctttaagtttggtatattatttgacctctaggaattctttgttttacacagaaataaaaattttaaaatagaaaatgcttttactttgtaaggtaagagagtatccatatgcttagatgtgctcgtttctaaaattctagaggttgatataatcagctcatgaatgcacagctatgctttttgtgatagattgtacataacatcagcagttgaaaggtaaaacaattgcttttttttttttttgcatttgttaagtgactatggtactttgtgattccttaatctatagatgagtcagctccacacttgagtctctttttagagggaaatcagtaataaagctgtaaaataaggaaggaatcattgtcagtttgtgtcttgatctggtggtggttgggataagggtacacatcattttatacaaacactaaagctttttgctaacaacatagcaggtcaaaattcacacataagaaagtttaactctgtactgttcacactttttaatcctgtaaataatgctgcattttgatggttcttacttttttggtatttaatgtgggctgattttacaatgttatattcacttccagatgcatacctctgctgctttctctcctataaatagtgatgctataaacttcctttcacagagatcattctatttcaaatcactttaatgattattacaatgatttcattcaaataaaaattttaaaatatttaagcatcttcactccc

SEQ ID NO: 295920 - DNA, 872 bp, Homo sapiens
agcggggggtagctgaggggagccccagtctatggcaggagcagagatttctgaaagctgttggctccctctgccctggaggtaatgctgaaatttgactttgtgtataactgatgtgtgttacctttgtcatgtcttcagaataaactgtggtcattctttttctttcctcctctggtatatatatggactagttcatgggccttattaaaagacttgtttggagaggaaggcgctcggttacattggagaactggagtggtctggagttccacggtgtagtggaccagaggccacctctcctgggcttctcagtgtctcgccggcggggttcggcctgagctggattgacatagcccttggcggatttaaacaacctaaacattaagcagtacagctgcctcaaacctttgggattttcagaatgactgacactgccgaagctgttccaaagtttgaagagatgtttgctagtagattcacagaaaatgacaaggagtatcaggaatacctgaaacgccctcctgagtctcctccaattgttgaggaatggaatagcagagctggtgggaaccaaagaaacagaggcaatcggttgcaagacaacagacagttcagaggcagggacaacagatgggggtggccaagtgacaatcgatccaatcagtggcatggacgatcctggggtaacaactacccgcaacacagacaagaaccttactatccccagcaatatggacattatggttacaaccagcggcctcggagtgtctcccccagtataggatatgcttgtatccccccgtcactcctccgcctgtttttttaaacttttccaccacctgcgtccaaaaagaatgttatggcgagtc

SEQ ID NO: 295921 - DNA, 192 bp, Homo sapiens
taacaagggaagtttaaagatcttttttgttttattgttgtaggttgcaagacaacagacagttcagaggcagggacaacagatgggggtggccaagtgacaatcgatccaatcagtggcatggacgatcctggggtaacaactacccgcaacacagacaagaaccttactatccccagcaatatggacatt

SEQ ID NO: 295922 - DNA, 844 bp, Homo sapiens
agcggaagtcaggtggttgtcggattttagaggaaggcgctcggttacattggagaactggagtggtctggagttccacggtgtagtggaccagaggccacctctcctgggcttctcagtgtctcgccggcggggttcggcctgagctggattgacatagcccttggcgggtgagtcgccccggacgcccgggaggagggagcggggcggccgagctgggtggccagcgaggtgtcctccccctgtgcggtgatctgtactctttgctagaccgaagcccgtttacttctcacggcccataatttccctcacttctggaggtataaggtgcttcggaagggagcaaatctgccagaaccttggtaagcaagctgtgatgtgccttgaggacggactggaaaacgcagttgttttcagtctgcatcttcgtctgttccccgggctcacctcccagggcagcgaaaccccattctggttggttatttccagggttagtcgcccgcagccaaagttctttgtggttttatttgtggtgaataaattagcagtattcaagtacaaatctgaaaggcttaccctaaaagaacatacatactttatgaagtttgtattcatacttgaactattttgcttttgaaggcccagaggacaaatcttgtagcttcttgctcttgagaaccagttccctctttggaatattagctttggaagtctttagagcgtttttttggtttgttttttgttttttttttgagacggagtctcgctctgtcgcccaggctggagtgcagtggcgcgatctccgcctcccaagttcaagcgattctcctgcctcagcctcccg

SEQ ID NO: 295923 - DNA, 1635 bp, Homo sapiens
gaccccttgcctgagtgtgacgtcagaatcaccatggccagctatccttaccggcagggctgcccaggagctgcaggacaagcaccaggagcccctccgggtagctactaccctggaccccccaatagtggagggcagtatggtagtgggctaccccctggtggtggttatgggggtcctgcccctggagggccttatggaccaccagctggtggagggccctatggacaccccaatcctgggatgttcccctctggaactccaggaggaccatatggcggtgcagctcccgggggcccctatggtcagccacctccaagttcctacggtgcccagcagcctgggctttatggacagggtggcgcccctcccaatgtggatcctgaggcctactcctggttccagtcggtggactcagatcacagtggctatatctccatgaaggagctaaagcaggccctggtcaactgcaattggtcttcattcaatgatgagacctgcctcatgatgataaacatgtttgacaagaccaagtcaggccgcatcgatgtctacggcttctcagccctgtggaaattcatccagcagtggaagaacctcttccagcagtatgaccgggaccgctcgggctccattagctacacagagctgcagcaagctctgtcccaaatgggctacaacctgagcccccagttcacccagcttctggtctcccgctactgcccacgctctgccaatcctgccatgcagcttgaccgcttcatccaggtgtgcacccagctgcaggtgctgacagaggccttccgggagaaggacacagctgtacaaggcaacattcggctcagcttcgaggacttcgtcaccatgacagcttctcggatgctatgacccaaccatctgtggagagtggagtgcaccagggacctttcctggcttcttagagtgagagaagtatgtggacatctcttcttttcctgtccctctagaagaacattctcccttgcttgatgcaacactgttccaaaagagggtggagagtcctgcatcatagccaccaaatagtgaggaccggggctgaggccacacagataggggcctgatggaggagaggatagaagttgaatgtcctgatggccatgagcagttgagtggcacagcctggcaccaggagcaggtccttgtaatggagttagtgtccagtcagctgagctccaccctgatgccagtggtgagtgttcatcggcctgttaccgttagtacctgtgttccctcaccaggccatcctgtcaaacgagcccattttctccaaagtggaatctgaccaagcatgagagagatctgtctatgggaccagtggcttggattctgccacacccataaatccttgtgtgttaacttctagctgcctggggctggccctgctcagacaaatctgctccctgggcatctttggccaggcttctgccctctgcagctgggacccctcacttgcctgccatgctctgctcggcttcagtctccaggagacagtggtcacctctccctgccaatactttttttaatttgcattttttttcatttggggccaaaagtccagtgaaattgtaagcttcaataaaaggatgaaactctgga

SEQ ID NO: 295924 - DNA, 423 bp, Homo sapiens
gagatctgtctatgggaccagtggcttggattctgccacacccataaatccttgtgtgttaacttctagctgcctggtcagatcccattttctccaaagtggaatctgaccaagcatgagagagatctgtctatgggaccagtggcttggattctgccacacccataaatccttgtgtgttaacttctagctgcctggggctggccctgctcagacaaatctgctccctgggcatctttggccaggcttctgccctctgcagctgggacccctcacttgcctgccatgctctgctcggcttcagtctccaggagacagtggtcacctctccctgccaatactttttttaatttgcattttttttcatttggggccaaaagtccagtgaaattgtaagcttcaataaaaggatgaaactctgga

SEQ ID NO: 295925 - DNA, 2141 bp, Homo sapiens
gaccccttgcctgagtgtgacgtcagaatcaccatggccagctatccttaccggcagggctgcccaggagctgcaggacaagcaccaggagcccctccgggtagctactaccctggaccccccaatagtggagggcagtatggtagtgggctaccccctggtggtggttatgggggtcctgcccctggagggccttatggaccaccagctggtggagggccctatggacaccccaatcctgggatgttcccctctggaactccaggaggaccatatggcggtgcagctcccgggggcccctatggtcagccacctccaagttcctacggtgcccagcagcctgggctttatggacagggtggcgcccctcccaatgtggatcctgaggcctactcctggttccagtcggtggactcagatcacagtggctatatctccatgaaggagctaaagcaggccctggtcaactgcaattggtcttcattcaatgatgagacctgcctcatgatgataaacatgtttgacaagaccaagtcaggccgcatcgatgtctacggcttctcagccctgtggaaattcatccagcagtggaagaacctcttccagcagtatgaccgggaccgctcgggctccattagctacacagagctgcagcaagctctgtcccaaatgggctacaacctgagcccccagttcacccagcttctggtctcccgctactgcccacgctctgccaatcctgccatgcagcttgaccgcttcatccaggtgtgcacccagctgcaggtgctgacagaggccttccgggagaaggacacagctgtacaaggcaacattcggctcagcttcgaggacttcgtcaccatgacagcttctcggatgctatgacccaaccatctgtggagagtggagtgcaccagggacctttcctggcttcttagagtgagagaagtatgtggacatctcttcttttcctgtccctctagaagaacattctcccttgcttgatgcaacactgttccaaaagagggtggagagtcctgcatcatagccaccaaatagtgaggaccggggctgaggccacacagataggggcctgatggaggagaggatagaagttgaatgtcctgatggccatgagcagttgagtggcacagcctggcaccaggagcaggtccttgtaatggagttagtgtccagtcagctgagctccaccctgatgccagtggtgagtgttcatcggcctgttaccgttagtacctgtgttccctcaccaggccatcctgtcaaacgagcccattttctccaaagtggaatctgaccaagcatgagagagatctgtctatgggaccagtggcttggattctgccacacccataaatccttgtgtgttaacttctagctgcctggggctggccctgctcagacaaatctgctccctgggcatctttggccaggcttctgccctctgcagctgggacccctcacttgcctgccatgctctgctcggcttcagtctccaggagacagtggtcacctctccctgccaatactttttttaatttgcattttttttcatttggggccaaaagtccagtgaaattgtaagcttcaataaaaggatgaaactctggaaaaaaaaaacaaaaaaaaaaaaaaaaaaaaaaaaaaaaacaaaaaagaaaaaagaaaaaaaaaaaaaacaaggggggggggcgcgcaaaaaataccccccgggggggcgccatgaggcgcccacgagttttggaagaagggggtcccccaggaatggaggacgtctgttaaaaaaagcagacacgccgcgggggccgcatgattaaaacaagcggcgttgccgcgggaggaaaacaaccgcgctatcactgctagacaacacatctgtttggggagagcaaccccccaaccaatcaccgggcgaggggggaacccaaccatgtggggggaacacagcacctacccccaagaagggtagttgaaggcgccgccccgagacgaacaagctataaagacggggagggggatgtactataggtggtcacaacccacggccgcacaactgctcacgtcggatagaaaagtattggtccacacggcgagctagttttacgaaccaaagtacc

SEQ ID NO: 295926 - DNA, 2416 bp, Homo sapiens
  misc_feature (1723)..(1723): n is a, c, g, or t
gaccccttgcctgagtgtgacgtcagaatcaccatggccagctatccttaccggcagggctgcccaggagctgcaggacaagcaccaggagcccctccgggtagctactaccctggaccccccaatagtggagggcagtatggtagtgggctaccccctggtggtggttatgggggtcctgcccctggagggccttatggaccaccagctggtggagggccctatggacaccccaatcctgggatgttcccctctggaactccaggaggaccatatggcggtgcagctcccgggggcccctatggtcagccacctccaagttcctacggtgcccagcagcctgggctttatggacagggtggcgcccctcccaatgtggatcctgaggcctactcctggttccagtcggtggactcagatcacagtggctatatctccatgaaggagctaaagcaggccctggtcaactgcaattggtcttcattcaatgatgagacctgcctcatgatgataaacatgtttgacaagaccaagtcaggccgcatcgatgtctacggcttctcagccctgtggaaattcatccagcagtggaagaacctcttccagcagtatgaccgggaccgctcgggctccattagctacacagagctgcagcaagctctgtcccaaatgggctacaacctgagcccccagttcacccagcttctggtctcccgctactgcccacgctctgccaatcctgccatgcagcttgaccgcttcatccaggtgtgcacccagctgcaggtgctgacagaggccttccgggagaaggacacagctgtacaaggcaacattcggctcagcttcgaggacttcgtcaccatgacagcttctcggatgctatgacccaaccatctgtggagagtggagtgcaccagggacctttcctggcttcttagagtgagagaagtatgtggacatctcttcttttcctgtccctctagaagaacattctcccttgcttgatgcaacactgttccaaaagagggtggagagtcctgcatcatagccaccaaatagtgaggaccggggctgaggccacacagataggggcctgatggaggagaggatagaagttgaatgtcctgatggccatgagcagttgagtggcacagcctggcaccaggagcaggtccttgtaatggagttagtgtccagtcagctgagctccaccctgatgccagtggtgagtgttcatcggcctgttaccgttagtacctgtgttccctcaccaggccatcctgtcaaacgagcccattttctccaaagtggaatctgaccaagcatgagagagatctgtctatgggaccagtggcttggattctgccacacccataaatccttgtgtgttaacttctagctgcctggggctggccctgctcagacaaatctgctccctgggcatctttggccaggcttctgccctctgcagctgggacccctcacttgcctgccatgctctgctcggcttcagtctccaggagacagtggtcacctctccctgccaatactttttttaatttgcattttttttcatttggggccaaaagtccagtgaaattgtaagcttcaataaaaggatgaaactctggaaaaaaaaaaaaaaaaaaaaaaaaaaaaaaaaaaaaaaaaaaaaaaacaaaaaaaaaaaaaaaaaaaaaaaaaaaaacaaaaaagaaanaaaaaacacaaccacaaacatttgctccccccccccccccaaactcaaacccacatccatgtggaggggcggcagaccacacaaaaagaaaaagaagaaccaggtctgacaccggctggcctccatgcgcacaggcaaccccagtgtgaccaaatagactggatgttggtcatacccccaaaacaaacaaaagaaggagcgggcgggggggaacgagcgaccttactaggacaaaaacaccaggacgtgtggacgtcgggtgccaacacgtggaacatctacgacaggggcgaacacacgagagcagatattaaatatacccccgccggcggtgagtgcaaacaaaactgcataagacatcgcacacctaagacagttaacacgaacggatgtgagaaagagtggagacgatccaaaacgacggactgccgcagagacaggggagagctgctcgcaggcaccgagcagcggtgggccagggaggcgctgggcgcgggaaggagcacggcgaggccggggcagcctccgcacacgagggtcaggtacagcacgcgcaacggtacggagccggtagaacaggacgaagcgtccagtgagcgggagcgggggagggcgacagagggaggcgaacgggcgtagcagcgaaaggcgggacgacgcggtagagaagaacacgcggaagcgggggggggc

SEQ ID NO: 295927 - DNA, 1862 bp, Homo sapiens
gaccccttgcctgagtgtgacgtcagaatcaccatggccagctatccttaccggcagggctgcccaggagctgcaggacaagcaccaggagcccctccgggtagctactaccctggaccccccaatagtggagggcagtatggtagtgggctaccccctggtggtggttatgggggtcctgcccctggagggccttatggaccaccagctggtggagggccctatggacaccccaatcctgggatgttcccctctggaactccaggaggaccatatggcggtgcagctcccgggggcccctatggtcagccacctccaagttcctacggtgcccagcagcctgggctttatggacagggtggcgcccctcccaatgtggatcctgaggcctactcctggttccagtcggtggactcagatcacagtggctatatctccatgaaggagctaaagcaggccctggtcaactgcaattggtcttcattcaatgatgagacctgcctcatgatgataaacatgtttgacaagaccaagtcaggccgcatcgatgtctacggcttctcagccctgtggaaattcatccagcagtggaagaacctcttccagcagtatgaccgggaccgctcgggctccattagctacacagagctgcagcaagctctgtcccaaatgggctacaacctgagcccccagttcacccagcttctggtctcccgctactgcccacgctctgccaatcctgccatgcagcttgaccgcttcatccaggtgtgcacccagctgcaggtgctgacagaggccttccgggagaaggacacagctgtacaaggcaacattcggctcagcttcgaggacttcgtcaccatgacagcttctcggatgctatgacccaaccatctgtggagagtggagtgcaccagggacctttcctggcttcttagagtgagagaagtatgtggacatctcttcttttcctgtccctctagaagaacattctcccttgcttgatgcaacactgttccaaaagagggtggagagtcctgcatcatagccaccaaatagtgaggaccggggctgaggccacacagataggggcctgatggaggagaggatagaagttgaatgtcctgatggccatgagcagttgagtggcacagcctggcaccaggagcaggtccttgtaatggagttagtgtccagtcagctgagctccaccctgatgccagtggtgagtgttcatcggcctgttaccgttagtacctgtgttccctcaccaggccatcctgtcaaacgagcccattttctccaaagtggaatctgaccaagcatgagagagatctgtctatgggaccagtggcttggattctgccacacccataaatccttgtgtgttaacttctagctgcctggggctggccctgctcagacaaatctgctccctgggcatctttggccaggcttctgccctctgcagctgggacccctcacttgcctgccatgctctgctcggcttcagtctccaggagacagtggtcacctctccctgccaatactttttttaatttgcattttttttcatttggggccaaaagtccagtgaaattgtaagcttcaataaaaggatgaaactctggaaaaaaaaaaaaaaaacaaaaaaggtttgcggccgcggcggacggcggcctctgcaccaggcggtagccctcggcgagcatcaggtggtcggccatggcggcaggccggctgcctgcggggacagcgcgcggtggtcagcgccggctcccccggcccgggccagcggctcctctgcggcgggagacccgggcaccgtgcggtccctgcagctcggccgggcggagcaa

SEQ ID NO: 295928 - DNA, 1576 bp, Homo sapiens
gaccccttgcctgagtgtgacgtcagaatcaccatggccagctatccttaccggcagggctgcccaggagctgcaggacaagcaccaggagcccctccgggtagctactaccctggaccccccaatagtggagggcagtatggtagtgggctaccccctggtggtggttatgggggtcctgcccctggagggccttatggaccaccagctggtggagggccctatggacaccccaatcctgggatgttcccctctggaactccaggaggaccatatggcggtgcagctcccgggggcccctatggtcagccacctccaagttcctacggtgcccagcagcctgggctttatggacagggtggcgcccctcccaatgtggatcctgaggcctactcctggttccagtcggtggactcagatcacagtggctatatctccatgaaggagctaaagcaggccctggtcaactgcaattggtcttcattcaatgatgagacctgcctcatgatgataaacatgtttgacaagaccaagtcaggccgcatcgatgtctacggcttctcagccctgtggaaattcatccagcagtggaagaacctcttccagcagtatgaccgggaccgctcgggctccattagctacacagagctgcagcaagctctgtcccaaatgggctacaacctgagcccccagttcacccagcttctggtctcccgctactgcccacgctctgccaatcctgccatgcagcttgaccgcttcatccaggtgtgcacccagctgcaggtgctgacagaggccttccgggagaaggacacagctgtacaaggcaacattcggctcagcttcgaggacttcgtcaccatgacagcttctcggatgctatgacccaaccatctgtggagagtggagtgcaccagggacctttcctggcttcttagagtgagagaagtatgtggacatctcttcttttcctgtccctctagaagaacattctcccttgcttgatgcaacactgttccaaaagagggtggagagtcctgcatcatagccaccaaatagtgaggaccggggctgaggccacacagataggggcctgatggaggagaggatagaagttgaatgtcctgatggccatgagcagttgagtggcacagcctggcaccaggagcaggtccttgtaatggagttagtgtccagtcagctgagctccaccctgatgccagtggtgagtgttcatcggcctgttaccgttagtacctgtgttccctcaccaggccatcctgtcaaacgagcccattttctccaaagtggaatctgaccaagcatgagagagatctgtctatgggaccagtggcttggattctgccacacccataaatccttgtgtgttaacttctagctgcctggggctggccctgctcagacaaatctgctccctgggcatctttggccaggcttctgccctctgcagctgggacccctcacttgcctgccatgctctgctcggcttcagtctccaggagacagtggtcacctgtcgacgcggccgcgaatttagtagtagtagtcgacc

SEQ ID NO: 295929 - DNA, 1628 bp, Homo sapiens
cacgcgtcggaccacgcgtcgacccacgcgtcggctatccttaccggcagggctgcccaggagctgcaggacaagcaccaggagcccctccgggtagctactaccctggaccccccaatagtggagggcagtatggtagtgggctaccccctggtggtggttatgggggtcctgcccctggagggccttatggaccaccagctggtggagggccctatggacaccccaatcctgggatgttcccctctggaactccaggaggaccatatggcggtgcagctcccgggggcccctatggtcagccacctccaagttcctacggtgcccagcagcctgggctttatggacagggtggcgcccctcccaatgtggatcctgaggcctactcctggttccagtcggtggactcagatcacagtggctatatctccatgaaggagctaaagcaggccctggtcaactgcaattggtcttcattcaatgatgagacctgcctcatgatgataaacatgtttgacaagaccaagtcaggccgcatcgatgtctacggcttctcagccctgtggaaattcatccagcagtggaagaacctcttccagcagtatgaccgggaccgctcgggctccattagctacacagagctgcagcaagctctgtcccaaatgggctacaacctgagcccccagttcacccagcttctggtctcccgctactgcccacgctctgccaatcctgccatgcagcttgaccgcttcatccaggtgtgcacccagctgcaggtgctgacagaggccttccgggagaaggacacagctgtacaaggcaacattcggctcagcttcgaggacttcgtcaccatgacagcttctcggatgctatgacccaaccatctgtggagagtggagtgcaccagggacctttcctggcttcttagagtgagagaagtatgtggacatctcttcttttcctgtccctctagaagaacattctcccttgcttgatgcaacactgttccaaaagagggtggagagtcctgcatcatagccaccaaatagtgaggaccggggctgaggccacacagataggggcctgatggaggagaggatagaagttgaatgtcctgatggccatgagcagttgagtggcacagcctggcaccaggagcaggtccttgtaatggagttagtgtccagtcagctgagctccaccctgatgccagtggtgagtgttcatcggcctgttaccgttagtacctgtgttccctcaccaggccatcctgtcaaacgagcccattttctccaaagtggaatctgaccaagcatgagagagatctgtctatgggaccagtggcttggattctgccacacccataaatccttgtgtgttaacttctagctgcctggggctggccctgctcagacaaatctgctccctgggcatctttggccaggcttctgccctctgcagctgggacccctcacttgcctgccatgctctgctcggcttcagtctccaggagacagtggtcacctctccctgccaatactttttttaatttgcattttttttcatttggggccaaaagtccagtgaaattgtaagcttcaataaaaggatgaaactctgga

SEQ ID NO: 295930 - DNA, 1795 bp, Homo sapiens
cttggaccccacaggtccaggctggcgctggcctgggctccacagcctcccaaggccctcatgggggccttgggcgggggcatcagccatgaccggaggtttagagttctggttccgccgatctcatttggggcgtcggataaaaatccaggcttccggacccaccccacactgcatcagagtcatcaggaaactctggttgtagcaggcgccacaaggctgcccaggagctgcaggacaagcaccaggagcccctccgggtagctactaccctggaccccccaatagtggagggcagtatggtagtgggctaccccctggtggtggttatgggggtcctgcccctggagggccttatggaccaccagctggtggagggccctatggacaccccaatcctgggatgttcccctctggaactccaggaggaccatatggcggtgcagctcccgggggcccctatggtcagccacctccaagttcctacggtgcccagcagcctgggctttatggacagggtggcgcccctcccaatgtggatcctgaggcctactcctggttccagtcggtggactcagatcacagtggctatatctccatgaaggagctaaagcaggccctggtcaactgcaattggtcttcattcaatgatgagacctgcctcatgatgataaacatgtttgacaagaccaagtcaggccgcatcgatgtctacggcttctcagccctgtggaaattcatccagcagtggaagaacctcttccagcagtatgaccgggaccgctcgggctccattagctacacagagctgcagcaagctctgtcccaaatgggctacaacctgagcccccagttcacccagcttctggtctcccgctactgcccacgctctgccaatcctgccatgcagcttgaccgcttcatccaggtgtgcacccagctgcaggtgctgacagaggccttccgggagaaggacacagctgtacaaggcaacattcggctcagcttcgaggacttcgtcaccatgacagcttctcggatgctatgacccaaccatctgtggagagtggagtgcaccagggacctttcctggcttcttagagtgagagaagtatgtggacatctcttcttttcctgtccctctagaagaacattctcccttgcttgatgcaacactgttccaaaagagggtggagagtcctgcatcatagccaccaaatagtgaggaccggggctgaggccacacagataggggcctgatggaggagaggatagaagttgaatgtcctgatggccatgagcagttgagtggcacagcctggcaccaggagcaggtccttgtaatggagttagtgtccagtcagctgagctccaccctgatgccagtggtgagtgttcatcggcctgttaccgttagtacctgtgttccctcaccaggccatcctgtcaaacgagcccattttctccaaagtggaatctgaccaagcatgagagagatctgtctatgggaccagtggcttggattctgccacacccataaatccttgtgtgttaacttctagctgcctggggctggccctgctcagacaaatctgctccctgggcatctttggccaggcttctgccctctgcagctgggacccctcacttgcctgccatgctctgctcggcttcagtctccaggagacagtggtcacctctccctgccaatactttttttaatttgcattttttttcatttggggccaaaagtccagtgaaattgtaagcttcaataaaaggatgaaactctgga

SEQ ID NO: 295931 - DNA, 1636 bp, Homo sapiens
tgctagtaagaggccgggtgttaatcggccgaggcatggccagctatccttaccggcaggctgcccaggagctgcaggacaagcaccaggagcccctccgggtagctactaccctggaccccccaatagtggagggcagtatggtagtgggctaccccctggtggtggttatgggggtcctgcccctggagggccttatggaccaccagctggtggagggccctatggacaccccaatcctgggatgttcccctctggaactccaggaggaccatatggcggtgcagctcccgggggcccctatggtcagccacctccaagttcctacggtgcccagcagcctgggctttatggacagggtggcgcccctcccaatgtggatcctgaggcctactcctggttccagtcggtggactcagatcacagtggctatatctccatgaaggagctaaagcaggccctggtcaactgcaattggtcttcattcaatgatgagacctgcctcatgatgataaacatgtttgacaagaccaagtcaggccgcatcgatgtctacggcttctcagccctgtggaaattcatccagcagtggaagaacctcttccagcagtatgaccgggaccgctcgggctccattagctacacagagctgcagcaagctctgtcccaaatgggctacaacctgagcccccagttcacccagcttctggtctcccgctactgcccacgctctgccaatcctgccatgcagcttgaccgcttcatccaggtgtgcacccagctgcaggtgctgacagaggccttccgggagaaggacacagctgtacaaggcaacattcggctcagcttcgaggacttcgtcaccatgacagcttctcggatgctatgacccaaccatctgtggagagtggagtgcaccagggacctttcctggcttcttagagtgagagaagtatgtggacatctcttcttttcctgtccctctagaagaacattctcccttgcttgatgcaacactgttccaaaagagggtggagagtcctgcatcatagccaccaaatagtgaggaccggggctgaggccacacagataggggcctgatggaggagaggatagaagttgaatgtcctgatggccatgagcagttgagtggcacagcctggcaccaggagcaggtccttgtaatggagttagtgtccagtcagctgagctccaccctgatgccagtggtgagtgttcatcggcctgttaccgttagtacctgtgttccctcaccaggccatcctgtcaaacgagcccattttctccaaagtggaatctgaccaagcatgagagagatctgtctatgggaccagtggcttggattctgccacacccataaatccttgtgtgttaacttctagctgcctggggctggccctgctcagacaaatctgctccctgggcatctttggccaggcttctgccctctgcagctgggacccctcacttgcctgccatgctctgctcggcttcagtctccaggagacagtggtcacctctccctgccaatactttttttaatttgcattttttttcatttggggccaaaagtccagtgaaattgtaagcttcaataaaaggatgaaactctgga

SEQ ID NO: 295932 - DNA, 2052 bp, Homo sapiens
cttggaccccacaggtccaggctggcgctggcctgggctccacagcctcccaaggccctcatgggggccttgggcgggggcatcagccatgaccggaggtttagagttctggttccgccgatctcatttggggcgtcggataaaaatccaggcttccggacccaccccacactgcatcagagtcatcaggaaactctggttgtagcaggcgccacaagtgagctggtttgaccactgacttagttcaacaccgccatttcgcgtgtagaaaagtgaaccccgagaagacacagaacttacctgaagtcaccaggcagttaggcagcagggccgaggtcagaacccgggctatcttcagatgcctcttccccagcgtatcttgattcagtcaggaataccgcagcaaggtgattctgtggccagaattctttgttgggtgatagtagggtgttgaagtgcactttggtgtcagagggctgcccaggagctgcaggacaagcaccaggagcccctccgggtagctactaccctggaccccccaatagtggagggcagtatggtagtgggctaccccctggtggtggttatgggggtcctgcccctggagggccttatggaccaccagctggtggagggccctatggacaccccaatcctgggatgttcccctctggaactccaggaggaccatatggcggtgcagctcccgggggcccctatggtcagccacctccaagttcctacggtgcccagcagcctgggctttatggacagggtggcgcccctcccaatgtggatcctgaggcctactcctggttccagtcggtggactcagatcacagtggctatatctccatgaaggagctaaagcaggccctggtcaactgcaattggtcttcattcaatgatgagacctgcctcatgatgataaacatgtttgacaagaccaagtcaggccgcatcgatgtctacggcttctcagccctgtggaaattcatccagcagtggaagaacctcttccagcagtatgaccgggaccgctcgggctccattagctacacagagctgcagcaagctctgtcccaaatgggctacaacctgagcccccagttcacccagcttctggtctcccgctactgcccacgctctgccaatcctgccatgcagcttgaccgcttcatccaggtgtgcacccagctgcaggtgctgacagaggccttccgggagaaggacacagctgtacaaggcaacattcggctcagcttcgaggacttcgtcaccatgacagcttctcggatgctatgacccaaccatctgtggagagtggagtgcaccagggacctttcctggcttcttagagtgagagaagtatgtggacatctcttcttttcctgtccctctagaagaacattctcccttgcttgatgcaacactgttccaaaagagggtggagagtcctgcatcatagccaccaaatagtgaggaccggggctgaggccacacagataggggcctgatggaggagaggatagaagttgaatgtcctgatggccatgagcagttgagtggcacagcctggcaccaggagcaggtccttgtaatggagttagtgtccagtcagctgagctccaccctgatgccagtggtgagtgttcatcggcctgttaccgttagtacctgtgttccctcaccaggccatcctgtcaaacgagcccattttctccaaagtggaatctgaccaagcatgagagagatctgtctatgggaccagtggcttggattctgccacacccataaatccttgtgtgttaacttctagctgcctggggctggccctgctcagacaaatctgctccctgggcatctttggccaggcttctgccctctgcagctgggacccctcacttgcctgccatgctctgctcggcttcagtctccaggagacagtggtcacctctccctgccaatactttttttaatttgcattttttttcatttggggccaaaagtccagtgaaattgtaagcttcaataaaaggatgaaactctgga

SEQ ID NO: 295933 - DNA, 1985 bp, Homo sapiens
cttggaccccacaggtccaggctggcgctggcctgggctccacagcctcccaaggccctcatgggggccttgggcgggggcatcagccatgaccggaggtttagagttctggttccgccgatctcatttggggcgtcggataaaaatccaggcttccggacccaccccacactgcatcagagtcatcaggaaactctggttgtagcaggcgccacaagtgagctggtttgaccactgacttagttcaacaccgccatttcgcgtgtagaaaagtgaaccccgagaagacacagaacttacctgaagtcaccaggcagttaggcagcagggccgaggtcagaacccgggctatcttcagatgcctcttccccagcgtatcttgattcagtcaggaataccgcagcaagggctgcccaggagctgcaggacaagcaccaggagcccctccgggtagctactaccctggaccccccaatagtggagggcagtatggtagtgggctaccccctggtggtggttatgggggtcctgcccctggagggccttatggaccaccagctggtggagggccctatggacaccccaatcctgggatgttcccctctggaactccaggaggaccatatggcggtgcagctcccgggggcccctatggtcagccacctccaagttcctacggtgcccagcagcctgggctttatggacagggtggcgcccctcccaatgtggatcctgaggcctactcctggttccagtcggtggactcagatcacagtggctatatctccatgaaggagctaaagcaggccctggtcaactgcaattggtcttcattcaatgatgagacctgcctcatgatgataaacatgtttgacaagaccaagtcaggccgcatcgatgtctacggcttctcagccctgtggaaattcatccagcagtggaagaacctcttccagcagtatgaccgggaccgctcgggctccattagctacacagagctgcagcaagctctgtcccaaatgggctacaacctgagcccccagttcacccagcttctggtctcccgctactgcccacgctctgccaatcctgccatgcagcttgaccgcttcatccaggtgtgcacccagctgcaggtgctgacagaggccttccgggagaaggacacagctgtacaaggcaacattcggctcagcttcgaggacttcgtcaccatgacagcttctcggatgctatgacccaaccatctgtggagagtggagtgcaccagggacctttcctggcttcttagagtgagagaagtatgtggacatctcttcttttcctgtccctctagaagaacattctcccttgcttgatgcaacactgttccaaaagagggtggagagtcctgcatcatagccaccaaatagtgaggaccggggctgaggccacacagataggggcctgatggaggagaggatagaagttgaatgtcctgatggccatgagcagttgagtggcacagcctggcaccaggagcaggtccttgtaatggagttagtgtccagtcagctgagctccaccctgatgccagtggtgagtgttcatcggcctgttaccgttagtacctgtgttccctcaccaggccatcctgtcaaacgagcccattttctccaaagtggaatctgaccaagcatgagagagatctgtctatgggaccagtggcttggattctgccacacccataaatccttgtgtgttaacttctagctgcctggggctggccctgctcagacaaatctgctccctgggcatctttggccaggcttctgccctctgcagctgggacccctcacttgcctgccatgctctgctcggcttcagtctccaggagacagtggtcacctctccctgccaatactttttttaatttgcattttttttcatttggggccaaaagtccagtgaaattgtaagcttcaataaaaggatgaaactctgga

SEQ ID NO: 295934 - DNA, 1913 bp, Homo sapiens
cttggaccccacaggtccaggctggcgctggcctgggctccacagcctcccaaggccctcatgggggccttgggcgggggcatcagccatgaccggaggtttagagttctggttccgccgatctcatttggggcgtcggataaaaatccaggcttccggacccaccccacactgcatcagagtcatcaggaaactctggttgtagcaggcgccacaagtgagctggtttgaccactgacttagttcaacaccgccatttcgcgtgtagaaaagtgaaccccgagaagacacagaacttacctgaagtcaccaggcagttaggcagcagggccgagggctgcccaggagctgcaggacaagcaccaggagcccctccgggtagctactaccctggaccccccaatagtggagggcagtatggtagtgggctaccccctggtggtggttatgggggtcctgcccctggagggccttatggaccaccagctggtggagggccctatggacaccccaatcctgggatgttcccctctggaactccaggaggaccatatggcggtgcagctcccgggggcccctatggtcagccacctccaagttcctacggtgcccagcagcctgggctttatggacagggtggcgcccctcccaatgtggatcctgaggcctactcctggttccagtcggtggactcagatcacagtggctatatctccatgaaggagctaaagcaggccctggtcaactgcaattggtcttcattcaatgatgagacctgcctcatgatgataaacatgtttgacaagaccaagtcaggccgcatcgatgtctacggcttctcagccctgtggaaattcatccagcagtggaagaacctcttccagcagtatgaccgggaccgctcgggctccattagctacacagagctgcagcaagctctgtcccaaatgggctacaacctgagcccccagttcacccagcttctggtctcccgctactgcccacgctctgccaatcctgccatgcagcttgaccgcttcatccaggtgtgcacccagctgcaggtgctgacagaggccttccgggagaaggacacagctgtacaaggcaacattcggctcagcttcgaggacttcgtcaccatgacagcttctcggatgctatgacccaaccatctgtggagagtggagtgcaccagggacctttcctggcttcttagagtgagagaagtatgtggacatctcttcttttcctgtccctctagaagaacattctcccttgcttgatgcaacactgttccaaaagagggtggagagtcctgcatcatagccaccaaatagtgaggaccggggctgaggccacacagataggggcctgatggaggagaggatagaagttgaatgtcctgatggccatgagcagttgagtggcacagcctggcaccaggagcaggtccttgtaatggagttagtgtccagtcagctgagctccaccctgatgccagtggtgagtgttcatcggcctgttaccgttagtacctgtgttccctcaccaggccatcctgtcaaacgagcccattttctccaaagtggaatctgaccaagcatgagagagatctgtctatgggaccagtggcttggattctgccacacccataaatccttgtgtgttaacttctagctgcctggggctggccctgctcagacaaatctgctccctgggcatctttggccaggcttctgccctctgcagctgggacccctcacttgcctgccatgctctgctcggcttcagtctccaggagacagtggtcacctctccctgccaatactttttttaatttgcattttttttcatttggggccaaaagtccagtgaaattgtaagcttcaataaaaggatgaaactctgga

SEQ ID NO: 295935 - DNA, 1397 bp, Homo sapiens
gaccccttgcctgagtgtgacgtcagaatcaccatggccagctatccttaccggcagggctgcccaggagctgcaggacaagcaccaggagcccctccgggtagctactaccctggaccccccaatagtggagggcagtatggtagtgggctaccccctggtggtggttatgggggtcctgcccctggagggccttatggaccaccagctggtggagggccctatggacaccccaatcctgggatgttcccctctggaactccaggaggaccatatggcggtgcagctcccgggggcccctatggtcagccacctccaagttcctacggtgcccagcagcctgggctttatggacagggtggcgcccctcccaatgtggatcctgaggcctactcctggttccagtcggtggactcagatcacagtggctatatctccatgaaggagctaaagcaggccctggtcaactgcaattggtcttcattcaatgatgagacctgcctcatgatgataaacatgtttgacaagaccaagtcaggccgcatcgatgtctacggcttctcagccctgtggaaattcatccagcagtggaagaacctcttccagcagtatgaccgggaccgctcgggctccattagctacacagagctgcagcaagctctgtcccaaatgggctacaacctgagcccccagttcacccagcttctggtctcccgctactgcccacgctctgccaatcctgccatgcagcttgaccgcttcatccaggtgtgcacccagctgcaggtgctgacagaggccttccgggagaaggacacagctgtacaaggcaacattcggctcagcttcgaggacttcgtcaccatgacagcttctcggatgctatgacccaaccatctgtggagagtggagtgcaccagggacctttcctggcttcttagagtgagagaagtatgtggacatctcttcttttcctgtccctctagaagaacattctcccttgcttgatgcaacactgttccaaaagagggtggagagtcctgcatcatagccaccaaatagtgaggaccggggctgaggccacacagataggggcctgatggaggagaggatagaagttgaatgtcctgatggccatgagcagttgagtggcacagcctggcaccaggagcaggtccttgtaatggagttagtgtccagtcagctgagctccaccctgatgccagtggtgagtgttcatcggcctgttaccgttagtacctgtgttccctcaccaggccatcctgtcaaacgagcccattttctccaaagtggaatctgaccaagcatgagagagatctgtctatgggaccagtggcttggattctgccacacccgtagctgtaccaacccggccc

SEQ ID NO: 295936 - DNA, 1745 bp, Homo sapiens
gaccccttgcctgagtgtgacgtcagaatcaccatggccagctatccttaccggcagggctgcccaggagctgcaggacaagcaccaggagcccctccgggtagctactaccctggaccccccaatagtggagggcagtatggtagtgggctaccccctggtggtggttatgggggtcctgcccctggagggccttatggaccaccagctggtggagggccctatggacaccccaatcctgggatgttcccctctggaactccaggaggaccatatggcggtgcagctcccgggggcccctatggtcagccacctccaagttcctacggtgcccagcagcctgggctttatggacaggggatacatgctgaaggagcagctcctgtttgggatatgttatctttgtggcagagagaaggagcaggagagctagcaagaatgcacaatgcctcttaaagcttctctgaagtggcgcccctcccaatgtggatcctgaggcctactcctggttccagtcggtggactcagatcacagtggctatatctccatgaaggagctaaagcaggccctggtcaactgcaattggtcttcattcaatgatgagacctgcctcatgatgataaacatgtttgacaagaccaagtcaggccgcatcgatgtctacggcttctcagccctgtggaaattcatccagcagtggaagaacctcttccagcagtatgaccgggaccgctcgggctccattagctacacagagctgcagcaagctctgtcccaaatgggctacaacctgagcccccagttcacccagcttctggtctcccgctactgcccacgctctgccaatcctgccatgcagcttgaccgcttcatccaggtgtgcacccagctgcaggtgctgacagaggccttccgggagaaggacacagctgtacaaggcaacattcggctcagcttcgaggacttcgtcaccatgacagcttctcggatgctatgacccaaccatctgtggagagtggagtgcaccagggacctttcctggcttcttagagtgagagaagtatgtggacatctcttcttttcctgtccctctagaagaacattctcccttgcttgatgcaacactgttccaaaagagggtggagagtcctgcatcatagccaccaaatagtgaggaccggggctgaggccacacagataggggcctgatggaggagaggatagaagttgaatgtcctgatggccatgagcagttgagtggcacagcctggcaccaggagcaggtccttgtaatggagttagtgtccagtcagctgagctccaccctgatgccagtggtgagtgttcatcggcctgttaccgttagtacctgtgttccctcaccaggccatcctgtcaaacgagcccattttctccaaagtggaatctgaccaagcatgagagagatctgtctatgggaccagtggcttggattctgccacacccataaatccttgtgtgttaacttctagctgcctggggctggccctgctcagacaaatctgctccctgggcatctttggccaggcttctgccctctgcagctgggacccctcacttgcctgccatgctctgctcggcttcagtctccaggagacagtggtcacctctccctgccaatactttttttaatttgcattttttttcatttggggccaaaagtccagtgaaattgtaagcttcaataaaaggatgaaactctgga

SEQ ID NO: 295937 - DNA, 1334 bp, Homo sapiens
gaccccttgcctgagtgtgacgtcagaatcaccatggccagctatccttaccggcaggtggcgcccctcccaatgtggatcctgaggcctactcctggttccagtcggtggactcagatcacagtggctatatctccatgaaggagctaaagcaggccctggtcaactgcaattggtcttcattcaatgatgagacctgcctcatgatgataaacatgtttgacaagaccaagtcaggccgcatcgatgtctacggcttctcagccctgtggaaattcatccagcagtggaagaacctcttccagcagtatgaccgggaccgctcgggctccattagctacacagagctgcagcaagctctgtcccaaatgggctacaacctgagcccccagttcacccagcttctggtctcccgctactgcccacgctctgccaatcctgccatgcagcttgaccgcttcatccaggtgtgcacccagctgcaggtgctgacagaggccttccgggagaaggacacagctgtacaaggcaacattcggctcagcttcgaggacttcgtcaccatgacagcttctcggatgctatgacccaaccatctgtggagagtggagtgcaccagggacctttcctggcttcttagagtgagagaagtatgtggacatctcttcttttcctgtccctctagaagaacattctcccttgcttgatgcaacactgttccaaaagagggtggagagtcctgcatcatagccaccaaatagtgaggaccggggctgaggccacacagataggggcctgatggaggagaggatagaagttgaatgtcctgatggccatgagcagttgagtggcacagcctggcaccaggagcaggtccttgtaatggagttagtgtccagtcagctgagctccaccctgatgccagtggtgagtgttcatcggcctgttaccgttagtacctgtgttccctcaccaggccatcctgtcaaacgagcccattttctccaaagtggaatctgaccaagcatgagagagatctgtctatgggaccagtggcttggattctgccacacccataaatccttgtgtgttaacttctagctgcctggggctggccctgctcagacaaatctgctccctgggcatctttggccaggcttctgccctctgcagctgggacccctcacttgcctgccatgctctgctcggcttcagtctccaggagacagtggtcacctctccctgccaatactttttttaatttgcattttttttcatttggggccaaaagtccagtgaaattgtaagcttcaataaaaggatgaaactctgga

SEQ ID NO: 295938 - DNA, 993 bp, Homo sapiens
gaccccttgcctgagtgtgacgtcagaatcaccatggccagctatccttaccggcagggctgcccaggagctgcaggacaagcaccaggagcccctccgggtagctactaccctggaccccccaatagtggagggcagtatggtagtgggctaccccctggtggtggttatgggggtcctgcccctggagggccttatggaccaccagctggtggagggccctatggacaccccaatcctgggatgttcccctctggaactccaggaggaccatatggcggtgcagctcccgggggcccctatggtcagccacctccaagttcctacggtgcccagcagcctgggctttatggacagggtggcgcccctcccaatgtggatcctgaggcctactcctggttccagtcggtggactcagatcacagtggctatatctccatgaaggagctaaagcaggccctggtcaactgcaattggtcttcattcaatgatgagacctgcctcatgatgataaacatgtttgacaagaccaagtcaggccgcatcgatgtctacggcttctcagccctgtggaaattcatccagcagtggaagaacctcttccagcagtatgaccgggaccgctcgggctccattagctacacagagctgcagcaagctctgtcccaaatgggctacaacctgagcccccagttcacccagcttctggtctcccgctactgcccacgctctgccaatcctgccatgcagcttgaccgcttcatccaggtgtgcacccagctgcaggtgctgacagaggccttccgggagaaggacacagctgtacaaggcaacattcggctcagcttcgaggacttcgtcaccatgacagcttctcggatgctatgacccaaccatctgtggagagtggagtgcaccagggacctttcccgggatctaagaggaaacacctgggcccttttccggccgaaaaaattccccgcggcgctggca

SEQ ID NO: 295939 - DNA, 1012 bp, Homo sapiens
gaccccttgcctgagtgtgacgtcagaatcaccatggccagctatccttaccggcagggctgcccaggagctgcaggacaagcaccaggagcccctccgggtagctactaccctggaccccccaatagtggagggcagtatggtagtgggctaccccctggtggtggttatgggggtcctgcccctggagggccttatggaccaccagctggtggagggccctatggacaccccaatcctgggatgttcccctctggaactccaggaggaccatatggcggtgcagctcccgggggcccctatggtcagccacctccaagttcctacggtgcccagcagcctgggctttatggacagggtggcgcccctcccaatgtggatcctgaggcctactcctggttccagtcggtggactcagatcacagtggctatatctccatgaaggagctaaagcaggccctggtcaactgcaattggtcttcattcaatgatgagacctgcctcatgatgataaacatgtttgacaagaccaagtcaggccgcatcgatgtctacggcttctcagccctgtggaaattcatccagcagtggaagaacctcttccagcagtatgaccgggaccgctcgggctccattagctacacagagctgcagcaagctctgtcccaaatgggctacaacctgagcccccagttcacccagcttctggtctcccgctactgcccacgctctgccaatcctgccatgcagcttgaccgcttcatccaggtgtgcacccagctgcaggtgctgacagaggccttccgggagaaggacacagctgtacaaggcaacattcggctcagcttcgaggacttcgtcaccatgacagcttctcggatgctatgacccaaccatctgtggagagtggagtgcaccagggacctttcgagcaagccaggcctggattgctcaggtctgagtagctagggtttgaatactaccaacttctctgaactacagagtcagatgc

SEQ ID NO: 295940 - DNA, 1129 bp, Homo sapiens
  misc_feature (24)..(24): n is a, c, g, or t
  misc_feature (57)..(57): n is a, c, g, or t
  misc_feature (78)..(78): n is a, c, g, or t
  misc_feature (112)..(112): n is a, c, g, or t
aatcgcatcttttgtgagtagccnaagttttgtccaaagttgggatggcaggccagntgcaccattggggtggcccanaaagcagtaccagcacatcatcccctggagcggncaggtgttcccggatcatgtcggcagtcacaaagcccttgctgtaggcccaatcttttgggggatgatccagagtgaaccccagcttctggtctcccgctactgcccacgctctgccaatcctgccatgcagcttgaccgcttcatccaggtgtgcacccagctgcaggtgctgacagaggccttccgggagaaggacacagctgtacaaggcaacattcggctcagcttcgaggacttcgtcaccatgacagcttctcggatgctatgacccaaccatctgtggagagtggagtgcaccagggacctttcctggcttcttagagtgagagaagtatgtggacatctcttcttttcctgtccctctagaagaacattctcccttgcttgatgcaacactgttccaaaagagggtggagagtcctgcatcatagccaccaaatagtgaggaccggggctgaggccacacagataggggcctgatggaggagaggatagaagttgaatgtcctgatggccatgagcagttgagtggcacagcctggcaccaggagcaggtccttgtaatggagttagtgtccagtcagctgagctccaccctgatgccagtggtgagtgttcatcggcctgttaccgttagtacctgtgttccctcaccaggccatcctgtcaaacgagcccattttctccaaagtggaatctgaccaagcatgagagagatctgtctatgggaccagtggcttggattctgccacacccataaatccttgtgtgttaacttctagctgcctggggctggccctgctcagacaaatctgctccctgggcatctttggccaggcttctgccctctgcagctgggacccctcacttgcctgccatgctctgctcggcttcagtctccaggagacagtggtcacctctccctgccaatactttttttaatttgcattttttttcatttggggccaaaagtccagtgaaattgtaagcttcaataaaaggatgaaactctgga

SEQ ID NO: 295941 - DNA, 942 bp, Homo sapiens
  misc_feature (234)..(234): n is a, c, g, or t
tttttatccaaaatgtgtttattgagatggtttcccactcatcttgactcagagtgcttttagtgctgcttcctcctgaaggaacatccttctgtaagccttgcttttcctcctgtaggctggcagaggacagtggagcagccaacacacaaaactaccgtttgtgcatggctaaagaccgtggtgattttatagcatcctgggcatttcacctcgtgccgaattcggcagagnctctggcttcttagagtgagagaagtatgtggacatctcttcttttcctgtccctctagaagaacattctcccttgcttgatgcaacactgttccaaaagagggtggagagtcctgcatcatagccaccaaatagtgaggaccggggctgaggccacacagataggggcctgatggaggagaggatagaagttgaatgtcctgatggccatgagcagttgagtggcacagcctggcaccaggagcaggtccttgtaatggagttagtgtccagtcagctgagctccaccctgatgccagtggtgagtgttcatcggcctgttaccgttagtacctgtgttccctcaccaggccatcctgtcaaacgagcccattttctccaaagtggaatctgaccaagcatgagagagatctgtctatgggaccagtggcttggattctgccacacccataaatccttgtgtgttaacttctagctgcctggggctggccctgctcagacaaatctgctccctgggcatctttggccaggcttctgccctctgcagctgggacccctcacttgcctgccatgctctgctcggcttcagtctccaggagacagtggtcacctctccctgccaatactttttttaatttgcattttttttcatttggggccaaaagtccagtgaaattgtaagcttcaataaaaggatgaaactctgga

SEQ ID NO: 295942 - DNA, 1459 bp, Homo sapiens
gatgcctggtgctggtggaacccctgcacagagacggacacaggatgagctctaagtacccgcggtctgtccggcgctgcctgcccctctgggccctaacactggaagcagctctcattctcctcttctatttttttacccactatgacgcttccttagaggatcaaaaggggctcgtggcatcctatcaagttggccaagatctgaccgtgatggcggccattggcttgggcttcctcacctcgagtttccggagacacagctggagcagtgtggccttcaacctcttcatgctggcgcttggtgtgcagtgggcaatcctgctggacggcttcctgagccagttcccttctgggaaggtggtcatcacactgttcagtattcggctggccaccatgagtgctttgtcggtgctgatctcagtggatgctgtcttggggaaggtcaacttggcgcagttggtggtgatggtgctggtggaggtgacagctttaggcaacctgaggatggtcatcagtaatatcttcaacacagactaccacatgaacatgatgcacatctacgtgttcgcagcctattttgggctgtctgtggcctggtgcctgccaaagcctctacccgagggaacggaggataaagatcagacagcaacgatacccagtttgtctgccatgctgggcgccctcttcttgtggatgttctggccaagtgtcaactctgctctgctgagaagtccaatccaaaggaagaatgccatgttcaacacctactatgctctagcagtcagtgtggtgacagccatctcagggtcatccttggctcacccccaaaggaagatcagcaagacttatgtgcacagtgcggtgttggcaggaggcgtggctgtgggtacctcgtgtcacctgatcccttctccgtggcttgccatggtgctgggtcttgtggctgggctgatctccgtcgggggagccaagtacctgccggggtgttgtaaccgagtgctggggattccccacagctccatcatgggctacaacttcagcttgctgggtctgcttggagagatcatctacattgtgctgctggtgcttgataccgtctggagccggcaatggcatgattggcttccaggtcctcctcagcattggggaactcagcttggccatcgtgatagctctcacgtctggtctcctgacaggtttgctcctaaatctcaaaatatggaaagcacctcatgtggctaaatattttgatgaccaagttttctggaagtttcctcatttggctgttggattttaagcaaaagcatccaagaaaaacaaggcctgttcaaaaacaagacaacttcctctcactgttgcctgcatttgtacgtgagaaacgctcatgacagcaaagtctccttatgtataatgaaacaaggtcagagacagatttgatattaaaaaattaaagacta

SEQ ID NO: 295943 - DNA, 1297 bp, Homo sapiens
agaggagacctaagaaggctcttcgaacacttgaaagaccggcatgtaggccgggcgcagtgactcacgcctgtaatcccagcagttttggaggtcgaggcgggtggatcacctgagtttgggagtttgataccagcctgaccaacaaggtgaaaccccgtctctactaaaaaatacaaacattagctgggcatggtggcgggtgcctgtaatcccagctactccggtggttgaggcagaattgcttgaacccgggaggcagaggttgcagtgagctgagattgcatcactgcactccagcctgagacaagagcgaaactccatctcaaacaaaacaaacaaccaaccaaacaaaaccaaaaaaaaaactggcatgtagaagaaaaatactttttctctacacttctccaaagaatttaactaggcccaggggaggtgcagtataaatttctaacaatctcaactgtctgccaaatggaatgagctacttcatatggcagtagtgagtcctctgtctttggaggcattcaaataaaagccagatggccatttatcaacaatccatgtaaaacgttagatgaaataaaacctatatatccaagatctcttccaattcagattttatgaaagaatttctaaggtctttgtaatgagacatttaggctgtttcaagagatcaagccaaaatcagtatgtgggttcatctgcaataaaaatgtttgttttgcttttacagtttcctcatttggctgttggattttaagcaaaagcatccaagaaaaacaaggcctgttcaaaaacaagacaacttcctctcactgttgcctgcatttgtacgtgagaaacgctcatgacagcaaagtctccttatgtataatgaaacaaggtcagagacagatttgatattaaaaaattaaagactaaaaacttagtttaagagtcaatttaataagtttaaaataaatgtttagtttcattaggatgatgctatcaatattttcttggttacagacacattattaaagttttgggttaattttattgacaattcttaagattctttctcatgcttaataaagcatgctactcagttaactcttgtctacatcagcaaagcagataatacaaaacaggaaaattacaaatcactgatacttagtccttgtgggaatcatgcttttctcccagcagttttacaaggtggctggcattccctgagcatattctgaattgcactgtggggaaagaggttgtgctcagttgtagggtggggggatgcactgcctgaggataaaaa

SEQ ID NO: 295944 - DNA, 1833 bp, Homo sapiens
gatgcctggtgctggtggaacccctgcacagagacggacacaggatgagctctaagtacccgcggtctgtccggcgctgcctgcccctctgggccctaacactggaagcagctctcattctcctcttctatttttttacccactatgacgcttccttagaggatcaaaaggggctcgtggcatcctatcaagttggccaagatctgaccgtgatggcggccattggcttgggcttcctcacctcgagtttccggagacacagctggagcagtgtggccttcaacctcttcatgctggcgcttggtgtgcagtgggcaatcctgctggacggcttcctgagccagttcccttctgggaaggtggtcatcacactgttcagtattcggctggccaccatgagtgctttgtcggtgctgatctcagtggatgctgtcttggggaaggtcaacttggcgcagttggtggtgatggtgctggtggaggtgacagctttaggcaacctgaggatggtcatcagtaatatcttcaacacagactaccacatgaacatgatgcacatctacgtgttcgcagcctattttgggctgtctgtggcctggtgcctgccaaagcctctacccgagggaacggaggataaagatcagacagcaacgatacccagtttgtctgccatgctgggcgccctcttcttgtggatgttctggccaagtgtcaactctgctctgctgagaagtccaatccaaaggaagaatgccatgttcaacacctactatgctctagcagtcagtgtggtgacagccatctcagggtcatccttggctcacccccaaaggaagatcagcaagacttatgtgcacagtgcggtgttggcaggaggcgtggctgtgggtacctcgtgtcacctgatcccttctccgtggcttgccatggtgctgggtcttgtggctgggctgatctccgtcgggggagccaagtacctgccggggtgttgtaaccgagtgctggggattccccacagctccatcatgggctacaacttcagcttgctgggtctgcttggagagatcatctacattgtgctgctggtgcttgataccgtctggagccggcaatggcatgattggcttccaggtcctcctcagcattggggaactcagcttggccatcgtgatagctctcacgtctggtctcctgacaggtttgctcctaaatctcaaaatatggaaagcacctcatgtggctaaatattttgatgaccaagttttctggaagtttcctcatttggctgttggattttaagcaaaagcatccaagaaaaacaaggcctgttcaaaaacaagacaacttcctctcactgttgcctgcatttgtacgtgagaaacgctcatgacagcaaagtctccttatgtataatgaaacaaggtcagagacagatttgatattaaaaaattaaagactaaaaacttagtttaagagtcaatttaataagtttaaaataaatgtttagtttcattaggatgatgctatcaatattttcttggttacagacacattattaaagttttgggttaattttattgacaattcttaagattctttctcatgcttaataaagcatgctactcagttaactcttgtctacatcagcaaagcagataatacaaaacaggaaaattacaaatcactgatacttagtccttgtgggaatcatgcttttctcccagcagttttacaaggtggctggcattccctgagcatattctgaattgcactgtggggaaagaggttgtgctcagttgtagggtggggggatgcactgcctgaggataaaaa

SEQ ID NO: 295945 - DNA, 1577 bp, Homo sapiens
gatgcctggtgctggtggaacccctgcacagagacggacacaggatgagctctaagtacccgcggtctgtccggcgctgcctgcccctctgggccctaacactggaagcagctctcattctcctcttctatttttttacccactatgacgcttccttagaggatcaaaaggggctcgtggcatcctatcaagttggccaagatctgaccgtgatggcggccattggcttgggcttcctcacctcgagtttccggagacacagctggagcagtgtggccttcaacctcttcatgctggcgcttggtgtgcagtgggcaatcctgctggacggcttcctgagccagttcccttctgggaaggtggtcatcacactgttcagtattcggctggccaccatgagtgctttgtcggtgctgatctcagtggatgctgtcttggggaaggtcaacttggcgcagttggtggtgatggtgctggtggaggtgacagctttaggcaacctgaggatggtcatcagtaatatcttcaacacagactaccacatgaacatgatgcacatctacgtgttcgcagcctattttgggctgtctgtggcctggtgcctgccaaagcctctacccgagggaacggaggataaagatcagacagcaacgatacccagtttgtctgccatgctgggcgccctcttcttgtggatgttctggccaagtgtcaactctgctctgctgagaagtccaatccaaaggaagaatgccatgttcaacacctactatgctctagcagtcagtgtggtgacagccatctcagggtcatccttggctcacccccaaaggaagatcagcaagacttatgtgcacagtgcggtgttggcaggaggcgtggctgtgggtacctcgtgtcacctgatcccttctccgtggcttgccatggtgctgggtcttgtggctgggctgatctccgtcgggggagccaagtacctgccggggtgttgtaaccgagtgctggggattccccacagctccatcatgggctacaacttcagcttgctgggtctgcttggagagatcatctacattgtgctgctggtgcttgataccgtctggagccggcaatggcatgattggcttccaggtcctcctcagcattggggaactcagcttggccatcgtgatagctctcacgtctggtctcctgacaggtttgctcctaaatctcaaaatatggaaagcacctcatgtggctaaatattttgatgaccaagttttctggaagtttcctcatttggctgttggattttaagcaaaagcatccaagaaaaacaaggcctgttcaaaaacaagacaacttcctctcactgttgcctgcatttgtacgtgagaaacgctcatgacagcaaagtctccttatgtataatgaaacaaggtcagagacagatttgatattaaaaaattaaagactaaaaacttagtttaagagtcaatttaataagtttaaaataaatgtttagtttcattaggatgatgctatcaatattttcttggttacagacacattattaaagttttgggttaatttta

SEQ ID NO: 295946 - DNA, 1544 bp, Homo sapiens
gatgcctggtgctggtggaacccctgcacagagacggacacaggatgagctctaagtacccgcggtctgtccggcgctgcctgcccctctgggccctaacactggaagcagctctcattctcctcttctatttttttacccactatgacgcttccttagaggatcaaaaggggctcgtggcatcctatcaagttggccaagatctgaccgtgatggcggccattggcttgggcttcctcacctcgagtttccggagacacagctggagcagtgtggccttcaacctcttcatgctggcgcttggtgtgcagtgggcaatcctgctggacggcttcctgagccagttcccttctgggaaggtggtcatcacactgttcagtattcggctggccaccatgagtgctttgtcggtgctgatctcagtggatgctgtcttggggaaggtcaacttggcgcagttggtggtgatggtgctggtggaggtgacagctttaggcaacctgaggatggtcatcagtaatatcttcaacacagactaccacatgaacatgatgcacatctacgtgttcgcagcctattttgggctgtctgtggcctggtgcctgccaaagcctctacccgagggaacggaggataaagatcagacagcaacgatacccagtttgtctgccatgctgggcgccctcttcttgtggatgttctggccaagtgtcaactctgctctgctgagaagtccaatccaaaggaagaatgccatgttcaacacctactatgctctagcagtcagtgtggtgacagccatctcagggtcatccttggctcacccccaaaggaagatcagcaagacttatgtgcacagtgcggtgttggcaggaggcgtggctgtgggtacctcgtgtcacctgatcccttctccgtggcttgccatggtgctgggtcttgtggctgggctgatctccgtcgggggagccaagtacctgccgtttcctcatttggctgttggattttaagcaaaagcatccaagaaaaacaaggcctgttcaaaaacaagacaacttcctctcactgttgcctgcatttgtacgtgagaaacgctcatgacagcaaagtctccttatgtataatgaaacaaggtcagagacagatttgatattaaaaaattaaagactaaaaacttagtttaagagtcaatttaataagtttaaaataaatgtttagtttcattaggatgatgctatcaatattttcttggttacagacacattattaaagttttgggttaattttattgacaattcttaagattctttctcatgcttaataaagcatgctactcagttaactcttgtctacatcagcaaagcagataatacaaaacaggaaaattacaaatcactgatacttagtccttgtgggaatcatgcttttctcccagcagttttacaaggtggctggcattccctgagcatattctgaattgcactgtggggaaagaggttgtgctcagttgtagggtggggggatgcactgcctgaggataaaaa

SEQ ID NO: 295947 - DNA, 426 bp, Homo sapiens
aggttagattttctgaaggacatctgggggaatactatgttctataatgtctaccgagtgaatatttttctctttatttatatacaaaagtactattttttgggacagggactcactctgccagccaggttcgtgtgcagcaatatgatcattgctcacttgcagcctcaaactcctgggctcaagtgagccccctgccttaacctcccaagtagctgggggactacaggcatgagccaccacacccaactcaatatttatgtacaaaataaataggactagcatgcatggaataggaatctcatacataaggaagagagagaatggggcagaaaaaaaactgaagaaaatttccacatttggtgtgaaaagaagttcaaagaccaagatagacaagggaaaaattacaccttagcaaattgtagc

SEQ ID NO: 295948 - DNA, 599 bp, Homo sapiens
cttttgtcctatcttgatagacacaagctggatgttgtttcctgtggcaagtccacagtccgagtgcagaaggccatctgcagtgggttcttccgtaatgctgccaagaaagacccgcaggagggttaccggacactgatcgaccagcaggtggtctatatccatccttccagtgccctcttcaacagacagccagaatggtaggtggacatgtcccagggtctaggggcttttctgggcagagaaaaacctgtaaatttcctggtattttgtgattgtgtcttcactactcccaatatgtcctagtataacactgcttgcctttctagagcagcagaaacctgaattaggcacaatgtatcaaaccctatgagagaattaaaatcataggggtgagacctagttgaaaatcccagcactttgggaggctgaggtgggcagatcagccgaggtcgggagttcaagaccagcctgaccaacatggagaaaccctgtctctactaatacttagccaggtatggtggcgcatgcctgtaatcccagctacttgggaggctgagacaggacaatcgcttgaacccaggaggtggaggttgcag

SEQ ID NO: 295949 - DNA, 2055 bp, Homo sapiens
cagacccgaatctttgacccagctccaccaggcagcagaaaggttgtgattgccaccaatatcgcagagacatcgctgactattgatggtatctactatgtggtggacccaggattcgtgaaacagaaagtttacaattccaagacagggattgaccagctcgtggtgacgcctatttctcaggctcaggcaaagcaacgagctggcagagctgggagaacaggcccagggaagtgttacaggttgtacacagaacgtgcctaccgagatgaaatgctgaccaccaacgtgccggaaatccagagaaccaacttagcaagcacagtgctgtcactcaaggccatgggtatcaatgatctgctgtcctttgatttcatggatgccccacctatggaaactttgatcacagccatggagcagctgtacacactgggggccctggatgacgagggcctgctcactcgcttgggccgccggatggcagagttccctctggagccaatgctatgcaaaatgctcatcatgtctgtgcatctgggctgcagtgaggaaatgctgaccattgtatccatgctgtctgtgcagaacgtcttctataggcccaaggataaacaagcccttgcagatcagaagaaggccaaattccaccagactgaaggggaccacctcaccctgctagctgtgtacaactcctggaagaacaacaagttctccaacccatggtgctatgagaactttatccaggctcgttccctgcgccgggcccaggacattcgcaagcagatgttaggcataatggacagacacaagctggatgttgtttcctgtggcaagtccacagtccgagtgcagaaggccatctgcagtgggttcttccgtaatgctgccaagaaagacccgcaggagggttaccggacactgatcgaccagcaggtggtctatatccatccttccagtgccctcttcaacagacagccagaatgggtggtgtaccatgagctggtgctcaccaccaaggaatacatgcgtgaagttaccaccatcgaccctcggtggcttgtggagtttgccccagccttcttcaaggtctcagacccaactaagctaagcaaacagaagaagcaacagcgtcttgaacccttgtacaaccgctatgaggaacccaatgcctggagaatatctcgagctttccgacggcgctgaaaggcaagattgttcctttgcctctccagcagcagtagccagggcttggacttatcgatgacaggctggtcctgaggatacagctgtcccgtgactgactgtcttaactgagcattttctcaactcgactctcatttcttccctgctggtaaaatagaaacagggatttaaacctggctttggcaagagcctgcagcctccatcaccccaagtccttgggcccagttgggagctcatatctaacacagagacacattgcatcaacttcaagaaagggacaatttgtgcagctccaggatgggaaggtggagtgggtgagcatcttgtgcagggacatggtgagtgccctgatgccccagctagcaggagctactgtgctcatctaaagtgtttgccccacttcccaccccgtctccagcccctgtactttggcttgacctcgtggaaatatttattttcttaaggaaacaaaaaaaaaaaaaaaaaaaaaaaaaaaaaaaaaaaaaaaacaaaactaaaaacaaagaggggggggcccgcacatcaaaaaatcatccccgggaggggcaccccactatcacgctcgatacaccaggctttctgtggacaaagggggccccacaaagggggcacgcaaataaaaaacgacagagacgacggggcgcggaggtaacaacaacacggcggagagcgggaaaaaccagcgcgacacacggaggaaacctcgtggggaagaagcacaccctaacagagcggggggggggagcaaaaataggggggacacaccaacacccaacagagacaattagaccacgcccagagggcaaaaacataaaacatcgacgcggccaa

SEQ ID NO: 295950 - DNA, 2538 bp, Homo sapiens
cagacccgaatctttgacccagctccaccaggcagcagaaaggttgtgattgccaccaatatcgcagagacatcgctgactattgatggtatctactatgtggtggacccaggattcgtgaaacagaaagtttacaattccaagacagggattgaccagctcgtggtgacgcctatttctcaggctcaggcaaagcaacgagctggcagagctgggagaacaggcccagggaagtgttacaggttgtacacagaacgtgcctaccgagatgaaatgctgaccaccaacgtgccggaaatccagagaaccaacttagcaagcacagtgctgtcactcaaggccatgggtatcaatgatctgctgtcctttgatttcatggatgccccacctatggaaactttgatcacagccatggagcagctgtacacactgggggccctggatgacgagggcctgctcactcgcttgggccgccgggtaagggacagactcaacttcctgtgcttttgggaagattccctggtcagcctttcacatccttcggtctgtacaaaatcaggctgaggccgtggataagctttgagtaaaattctaaatgtttgtttttaacctgaatttctccactgtcactttaaactgtttcttctttatacaaaaaggtgttctgttcataattttgcctgaggatgtattactgaatgtagccttaattagaaacggcatctgcaaaattctcatctaccccaacagtagttatatgcttggtcacatacatcccgttggagtttatttgggaaaagaataaacaacagcattcttctgatagagaaaggcatcccaaggcatcattatgctttgggaaaatctgtgttgttacccactctgaccaaggtcttgctctggtgaatccaaatgtgtcttccacagggaagcagttgtagtctttttttgtccctctagatggcagagttccctctggagccaatgctatgcaaaatgctcatcatgtctgtgcatctgggctgcagtgaggaaatgctgaccattgtatccatgctgtctgtgcagaacgtcttctataggcccaaggataaacaagcccttgcagatcagaagaaggccaaattccaccagactgaaggggaccacctcaccctgctagctgtgtacaactcctggaagaacaacaagttctccaacccatggtgctatgagaactttatccaggctcgttccctgcgccgggcccaggacattcgcaagcagatgttaggcataatggacagacacaagctggatgttgtttcctgtggcaagtccacagtccgagtgcagaaggccatctgcagtgggttcttccgtaatgctgccaagaaagacccgcaggagggttaccggacactgatcgaccagcaggtggtctatatccatccttccagtgccctcttcaacagacagccagaatgggtggtgtaccatgagctggtgctcaccaccaaggaatacatgcgtgaagttaccaccatcgaccctcggtggcttgtggagtttgccccagccttcttcaaggtctcagacccaactaagctaagcaaacagaagaagcaacagcgtcttgaacccttgtacaaccgctatgaggaacccaatgcctggagaatatctcgagctttccgacggcgctgaaaggcaagattgttcctttgcctctccagcagcagtagccagggcttggacttatcgatgacaggctggtcctgaggatacagctgtcccgtgactgactgtcttaactgagcattttctcaactcgactctcatttcttccctgctggtaaaatagaaacagggatttaaacctggctttggcaagagcctgcagcctccatcaccccaagtccttgggcccagttgggagctcatatctaacacagagacacattgcatcaacttcaagaaagggacaatttgtgcagctccaggatgggaaggtggagtgggtgagcatcttgtgcagggacatggtgagtgccctgatgccccagctagcaggagctactgtgctcatctaaagtgtttgccccacttcccaccccgtctccagcccctgtactttggcttgacctcgtggaaatatttattttcttaaggaaacaaaaaaaaaaaaaaaaaaaaaaaaaaaaaaaaaaaaaaaacaaaactaaaaacaaagaggggggggcccgcacatcaaaaaatcatccccgggaggggcaccccactatcacgctcgatacaccaggctttctgtggacaaagggggccccacaaagggggcacgcaaataaaaaacgacagagacgacggggcgcggaggtaacaacaacacggcggagagcgggaaaaaccagcgcgacacacggaggaaacctcgtggggaagaagcacaccctaacagagcggggggggggagcaaaaataggggggacacaccaacacccaacagagacaattagaccacgcccagagggcaaaaacataaaacatcgacgcggccaa

SEQ ID NO: 295951 - DNA, 1582 bp, Homo sapiens
aaaaaaacttgttttaaagtagcatttttaaaaaattggactctatctagaaccctaatataaaactgatttaaaaccaccatgttatcacagtagaagggttagaaatgtggctccttgcatgtttggccttctccatcccttgtggcagtgtgaggcccctcttcagagccctagaattctgtggaaacattctaataaacatcctcacattttatagagcaagaaacagattagagaagggatgtgattggctccatgtcacttaactagttagagccagagccaggactagaatacattctcctgagacctttcttgtggttagaggtgtgcgggtgcttcagtattggggtgtggctgtcataaacagactgcagtcttataggtgtcaggcaggagaggtaatagtataaaatgtaagctcagctgaggcctactagggaccaggttgactgtagagtggggcctatatccagaggcttgagtactatctctgtcccccctcagggtggtgtaccatgagctggtgctcaccaccaaggaatacatgcgtgaagttaccaccatcgaccctcggtggcttgtggagtttgccccagccttcttcaaggtctcagacccaactaagctaagcaaacagaagaagcaacagcgtcttgaacccttgtacaaccgctatgaggaacccaatgcctggagaatatctcgagctttccgacggcgctgaaaggcaagattgttcctttgcctctccagcagcagtagccagggcttggacttatcgatgacaggctggtcctgaggatacagctgtcccgtgactgactgtcttaactgagcattttctcaactcgactctcatttcttccctgctggtaaaatagaaacagggatttaaacctggctttggcaagagcctgcagcctccatcaccccaagtccttgggcccagttgggagctcatatctaacacagagacacattgcatcaacttcaagaaagggacaatttgtgcagctccaggatgggaaggtggagtgggtgagcatcttgtgcagggacatggtgagtgccctgatgccccagctagcaggagctactgtgctcatctaaagtgtttgccccacttcccaccccgtctccagcccctgtactttggcttgacctcgtggaaatatttattttcttaaggaaacaaaaaaaaaaaaaaaaaaaaaaaaaaaaaaaaaaaaaaaacaaaactaaaaacaaagaggggggggcccgcacatcaaaaaatcatccccgggaggggcaccccactatcacgctcgatacaccaggctttctgtggacaaagggggccccacaaagggggcacgcaaataaaaaacgacagagacgacggggcgcggaggtaacaacaacacggcggagagcgggaaaaaccagcgcgacacacggaggaaacctcgtggggaagaagcacaccctaacagagcggggggggggagcaaaaataggggggacacaccaacacccaacagagacaattagaccacgcccagagggcaaaaacataaaacatcgacgcggccaa

SEQ ID NO: 295952 - DNA, 1819 bp, Homo sapiens
cttcccatagagatgggttcccactgtgctgcccaggctgctctccaatccctggcgtcaagcaatcctcctgcctctgcctcccaaagcgctgggattacagttgagagccactgtcctctgcactgaggaggctccttacctggcggaacatcaggcaggtcttgccaggccaggtttcggaacttacggaaagctggtctggatgtagtgcttgtagagaagcttctgagagattgggcacatcctgttacgttgctgcttctcctgtccttatgttattagtaagttctgaagtgatgtaaatgctagaactactgtagaactgtatgccagacactaagagagactatgtaacattccaggatataaaggaatgtatgttgtcactgggcagcaaaccacaccctaaagacaattcagaaagagtccgagggagaggaatataggccaggcaatctgctggctgcagatccctgccccttcattaagctgagtgcctcctgattctgtctgagtattcgcctttgtaagcccaggccagtaatcaaggggcagggcattgttgtgtgttaaccttgaaggccttctggggagagacagtacagggacctcaaatgaaaccaaaggggaaacggggactgggcacccacctccccaatctcgttttgtttttgtttttgttaagacaggatcttgccatcttgcctaggctggcatcaaactcctgagctcaagtgatcttcctgcctcagcctcctgagtagctgggactacaggtgcatgccaccacacctggctcccagtcctaattccagcctaaattttccccattcagaaacactcctggatatagtggcccagcctgtcctgactgagtgcccagcactgacaatgttgacacctggggagggagggttgggtttcaagctgaggttgaaaagggatgttgaatgggctaaggataagagacagcagggttcgttatcttttctggctcaggtggaggaaaaagaaggatccccattctgtgggtgttccttgaccatctctctacgctagagctgaggtcacttctctgctatgacaacatagctgggttctgaccttttgaccatcaggaaagcaatgtcagcagctgagctgagcctgctctgagggagaaggggggggtcctgtccagatgcagaaggggagcttgcctgctgctctcacacaatggagcccttgtttctcttccttgaaccagtatttcccaagattgagtgacagcccaggagaggatgtgggtctcatgcagagagctgggatcttcttggccattaaagtatattgttcacccccaccccgcgagaaccaagctcaggagttgcctgcctctgcacacatgctgagtgtgctgtttgtgtatatggcaggaccgtccctatggggcatgtgtgagctccgcagctgggtcaggctcctcggtccaggtttacttcatcccgcctggacgtgatttggctttgactgtctctcctgcagcccaaagcacttcctccctgtggttgctgtagctgtctcattggagcagtgcctctccaagtttgaggatttgaacaaagaactgggactggtgacttgttaatgaacagttcagagggcagagggccatcatctcagcttgtggagacctttctttccctggatgctgcttctcagctaactccctctctcttcgtgtgtgtactcggccttcagggtttccaccgatttttacaccttcttcccaccacgatagcttggctttaatgtggaattaaattatatattttta

SEQ ID NO: 295953 - DNA, 1880 bp, Homo sapiens
cttcccatagagatgggttcccactgtgctgcccaggctgctctccaatccctggcgtcaagcaatcctcctgcctctgcctcccaaagcgctgggattacagttgagagccactgtcctctgcactgaggaggctccttacctggcggaacatcaggcaggtcttgccaggccaggtttcggaacttacggaaagctggtctggatgtagtgcttgtagagaagcttctgagagattgggcacatcctgttacgttgctgcttctcctgtccttatgttattagtaagttctgaagtgatgtaaatgctagaactactgtagaactgtatgccagacactaagagagactatgtaacattccaggatataaaggaatgtatgttgtcactgggcagcaaaccacaccctaaagacaattcagaaagagtccgagggagaggaatataggccaggcaatctgctggctgcagatccctgccccttcattaagctgagtgcctcctgattctgtctgagtattcgcctttgtaagcccaggccagtaatcaaggggcagggcattgttgtgtgttaaccttgaaggccttctggggagagacagtacagggacctcaaatgaaaccaaaggggaaacggggactgggcacccacctccccaatctcgttttgtttttgtttttgttaagacaggatcttgccatcttgcctaggctggcatcaaactcctgagctcaagtgatcttcctgcctcagcctcctgagtagctgggactacaggtgcatgccaccacacctggctcccagtcctaattccagcctaaattttccccattcagaaacactcctggatatagtggcccagcctgtcctgactgagtgcccagcactgacaatgttgacacctggggagggagggttgggtttcaagctgaggttgaaaagggatgttgaatgggctaaggataagagacagcagggttcgttatcttttctggctcaggtggaggaaaaagaaggatccccattctgtgggtgttccttgaccatctctctacgctagagctgaggtcacttctctgctatgacaacatagctgggttctgaccttttgaccatcaggaaagcaatgtcagcagctgagctgagcctgctctgagggagaaggggggggtcctgtccagatgcagaaggggagcttgcctgctgctctcacacaatggagcccttgtttctcttccttgaaccagtatttcccaagattgagtgacagcccaggagaggatgtgggtctcatgcagagagctgggatcttcttggccattaaagtatattgttcacccccaccccgcgagaaccaagctcaggagttgcctgcctctgcacacatgctgagtgtgctgtttgtgtatatggcaggaccgtccctatggggcatgtgtgagctccgcagctgggtcaggctcctcggtccaggtttacttcatcccgcctggacgtgatttggctttgactgtctctcctgcagcccaaagcacttcctccctgtggttgctgtagctgtctcattggagcagtgcctctccaagtttgaggatttgaacaaagaactgggactggtgacttgttaatgaacagttcagagggcagagggccatcatctcagcttgtggagacctttctttccctggatgctgcttctcagctaactccctctctcttcgtgtgtgtactcggccttcagggtttccaccgatttttacaccttcttcccaccacgatagcttggctttaatgtggaattaaattatatatttttaaaacctgtttttaaaattttgtttcttgcactaaattatgtcagtacattgatattttgtg

SEQ ID NO: 295954 - DNA, 1840 bp, Homo sapiens
gagatggggccttgctctgtcgcccagtttggagtgcagtggtgcaatctcagctcactgcaacctcggcctcctgggttcaacaatcctcctgcctctgcctcccaaagcgctgggattacagttgagagccactgtcctctgcactgaggaggctccttacctggcggaacatcaggcaggtcttgccaggccaggtttcggaacttacggaaagctggtctggatgtagtgcttgtagagaagcttctgagagattgggcacatcctgttacgttgctgcttctcctgtccttatgttattagtaagttctgaagtgatgtaaatgctagaactactgtagaactgtatgccagacactaagagagactatgtaacattccaggatataaaggaatgtatgttgtcactgggcagcaaaccacaccctaaagacaattcagaaagagtccgagggagaggaatataggccaggcaatctgctggctgcagatccctgccccttcattaagctgagtgcctcctgattctgtctgagtattcgcctttgtaagcccaggccagtaatcaaggggcagggcattgttgtgtgttaaccttgaaggccttctggggagagacagtacagggacctcaaatgaaaccaaaggggaaacggggactgggcacccacctccccaatctcgttttgtttttgtttttgttaagacaggatcttgccatcttgcctaggctggcatcaaactcctgagctcaagtgatcttcctgcctcagcctcctgagtagctgggactacaggtgcatgccaccacacctggctcccagtcctaattccagcctaaattttccccattcagaaacactcctggatatagtggcccagcctgtcctgactgagtgcccagcactgacaatgttgacacctggggagggagggttgggtttcaagctgaggttgaaaagggatgttgaatgggctaaggataagagacagcagggttcgttatcttttctggctcaggtggaggaaaaagaaggatccccattctgtgggtgttccttgaccatctctctacgctagagctgaggtcacttctctgctatgacaacatagctgggttctgaccttttgaccatcaggaaagcaatgtcagcagctgagctgagcctgctctgagggagaaggggggggtcctgtccagatgcagaaggggagcttgcctgctgctctcacacaatggagcccttgtttctcttccttgaaccagtatttcccaagattgagtgacagcccaggagaggatgtgggtctcatgcagagagctgggatcttcttggccattaaagtatattgttcacccccaccccgcgagaaccaagctcaggagttgcctgcctctgcacacatgctgagtgtgctgtttgtgtatatggcaggaccgtccctatggggcatgtgtgagctccgcagctgggtcaggctcctcggtccaggtttacttcatcccgcctggacgtgatttggctttgactgtctctcctgcagcccaaagcacttcctccctgtggttgctgtagctgtctcattggagcagtgcctctccaagtttgaggatttgaacaaagaactgggactggtgacttgttaatgaacagttcagagggcagagggccatcatctcagcttgtggagacctttctttccctggatgctgcttctcagctaactccctctctcttcgtgtgtgtactcggccttcagggtttccaccgatttttacaccttcttcccaccacgatagcttggctttaatgtggaattaaattatatattttta

SEQ ID NO: 295955 - DNA, 2001 bp, Homo sapiens
cagacccgaatctttgacccagctccaccaggcagcagaaaggttgtgattgccaccaatatcgcagagacatcgctgactattgatggtatctactatgtggtggacccaggattcgtgaaacagaaagtttacaattccaagacagggattgaccagctcgtggtgacgcctatttctcaggctcaggcaaagcaacgagctggcagagctgggagaacaggcccagggaagtgttacaggttgtacacagaacgtgcctaccgagatgaaatgctgaccaccaacgtgccggaaatccagagaaccaacttagcaagcacagtgctgtcactcaaggccatgggtatcaatgatctgctgtcctttgatttcatggatgccccacctatggaaactttgatcacagccatggagcagctgtacacactgggggccctggatgacgagggcctgctcactcgcttgggccgccggatggcagagttccctctggagccaatgctatgcaaaatgctcatcatgtctgtgcatctgggctgcagtgaggaaatgctgaccattgtatccatgctgtctgtgcagaacgtcttctataggcccaaggataaacaagcccttgcagatcagaagaaggccaaattccaccagactgaaggggaccacctcaccctgctagctgtgtacaactcctggaagaacaacaagttctccaacccatggtgctatgagaactttatccaggctcgttccctgcgccgggcccaggacattcgcaagcagatgttaggcataatggacagacacaagctggatgttgtttcctgtggcaagtccacagtccgagtgcagaaggccatctgcagtgggttcttccgtaatgctgccaagaaagacccgcaggagggttaccggacactgatcgaccagcaggtggtctatatccatccttccagtgccctcttcaacagacagccagaatgggtggtgtaccatgagctggtgctcaccaccaaggaatacatgcgtgaagttaccaccatcgaccctcggtggcttgtggagtttgccccagccttcttcaaggtctcagacccaactaagctaagcaaacagaagaagcaacagcgtcttgaacccttgtacaaccgctatgaggaacccaatgcctggagaatatctcgagctttccgacggcgctgaaaggcaagattgttcctttgcctctccagcagcagtagccagggcttggacttatcgatgacaggctggtcctgaggatacagctgtcccgtgactgactgtcttaactgagcattttctcaactcgactctcatttcttccctgctggtaacccaagtccttgggcccagttgggagctcatatctaacacagagacacattgcatcaacttcaagaaagggacaatttgtgcagctccaggatgggaaggtggagtgggtgagcatcttgtgcagggacatggtgagtgccctgatgccccagctagcaggagctactgtgctcatctaaagtgtttgccccacttcccaccccgtctccagcccctgtactttggcttgacctcgtggaaatatttattttcttaaggaaacaaaaaaaaaaaaaaaaaaaaaaaaaaaaaaaaaaaaaaaacaaaactaaaaacaaagaggggggggcccgcacatcaaaaaatcatccccgggaggggcaccccactatcacgctcgatacaccaggctttctgtggacaaagggggccccacaaagggggcacgcaaataaaaaacgacagagacgacggggcgcggaggtaacaacaacacggcggagagcgggaaaaaccagcgcgacacacggaggaaacctcgtggggaagaagcacaccctaacagagcggggggggggagcaaaaataggggggacacaccaacacccaacagagacaattagaccacgcccagagggcaaaaacataaaacatcgacgcggccaa

SEQ ID NO: 295956 - DNA, 1379 bp, Homo sapiens
cagacccgaatctttgacccagctccaccaggcagcagaaaggttgtgattgccaccaatatcgcagagacatcgctgactattgatggtatctactatgtggtggacccaggattcgtgaaacagaaagtttacaattccaagacagggattgaccagctcgtggtgacgcctatttctcaggctcaggcaaagcaacgagctggcagagctgggagaacaggcccagggaagtgttacaggttgtacacagaacgtgcctaccgagatgaaatgctgaccaccaacgtgccggaaatccagagaaccaacttagcaagcacagtgctgtcactcaaggccatgggtatcaatgatctgctgtcctttgatttcatggatgccccacctatggaaactttgatcacagccatggagcagctgtacacactgggggccctggatgacgagggcctgctcactcgcttgggccgccggatggcagagttccctctggagccaatgctatgcaaaatgctcatcatgtctgtgcatctgggctgcagtgaggaaatgctgaccattgtatccatgctgtctgtgcagaacgtcttctataggcccaaggataaacaagcccttgcagatcagaagaaggccaaattccaccagactgaaggggaccacctcaccctgctagctgtgtacaactcctggaagaacaacaagttctccaacccatggtgctatgagaactttatccaggctcgttccctgcgccgggcccaggacattcgcaagcagatgttaggcataatggacagacacaagctggatgttgtttcctgtggcaagtccacagtccgagtgcagaaggccatctgcagtgggttcttccgtaatgctgccaagaaagacccgcaggagggttaccggacactgatcgaccagcaggtggtctatatccatccttccagtgccctcttcaacagacagccagaatgggacctctactcacggttttctgaatggaaatcaggaacaaactgctcatcactgtctggtacctgagctgcagagagaagtcagagccccaccagcgacaccctcaggccccaccaaaacgcactgaagaatccaaccaggaaacctcctgaacacaccacttccccatcagacccagccacggacccagccacggaccccaccccagccagctcacagctaactccccagcacacaggaaggggggaatttgcctggaggcagaggtattcaagcgggatggaagagggaggaacacttgctattagaattacaatcaaggctatttggggagggagccctgggctctctgtgccaaaggactgccgaaaagaattatttaaacttttgttgtt

SEQ ID NO: 295957 - DNA, 1272 bp, Homo sapiens
cagacccgaatctttgacccagctccaccaggcagcagaaaggttgtgattgccaccaatatcgcagagacatcgctgactattgatggtatctactatgtggtggacccaggattcgtgaaacagaaagtttacaattccaagacagggattgaccagctcgtggtgacgcctatttctcaggctcaggcaaagcaacgagctggcagagctgggagaacaggcccagggaagtgttacaggttgtacacagaacgtgcctaccgagatgaaatgctgaccaccaacgtgccggaaatccagagaaccaacttagcaagcacagtgctgtcactcaaggccatgggtatcaatgatctgctgtcctttgatttcatggatgccccacctatggaaactttgatcacagccatggagcagctgtacacactgggggccctggatgacgagggcctgctcactcgcttgggccgccggatggcagagttccctctggagccaatgctatgcaaaatgctcatcatgtctgtgcatctgggctgcagtgaggaaatgctgaccattgtatccatgctgtctgtgcagaacgtcttctataggcccaaggataaacaagcccttgcagatcagaagaaggccaaattccaccagactgaaggggaccacctcaccctgctagctgtgtacaactcctggaagaacaacaagttctccaacccatggtgctatgagaactttatccaggctcgttccctgcgccgggcccaggacattcgcaagcagatgttaggcataatggacagacacaagctggatgttgtttcctgtggcaagtccacagtccgagtgcagaaggccatctgcagtgggttcttccgtaatgctgccaagaaagacccgcaggagggttaccggacactgatcgaccagcaggtggtctatatccatccttccagtgccctcttcaacagacagccagaatgaaagcacttcctccctgtggttgctgtagctgtctcattggagcagtgcctctccaagtttgaggatttgaacaaagaactgggactggtgacttgttaatgaacagttcagagggcagagggccatcatctcagcttgtggagacctttctttccctggatgctgcttctcagctaactccctctctcttcgtgtgtgtactcggccttcagggtttccaccgatttttacaccttcttcccaccacgatagcttggctttaatgtggaattaaattatatattttta

SEQ ID NO: 295958 - DNA, 1445 bp, Homo sapiens
cagacccgaatctttgacccagctccaccaggcagcagaaaggttgtgattgccaccaatatcgcagagacatcgctgactattgatggtatctactatgtggtggacccaggattcgtgaaacagaaagtttacaattccaagacagggattgaccagctcgtggtgacgcctatttctcaggctcaggcaaagcaacgagctggcagagctgggagaacaggcccagggaagtgttacaggttgtacacagaacgtgcctaccgagatgaaatgctgaccaccaacgtgccggaaatccagagaaccaacttagcaagcacagtgctgtcactcaaggccatgggtatcaatgatctgctgtcctttgatttcatggatgccccacctatggaaactttgatcacagccatggagcagctgtacacactgggggccctggatgacgagggcctgctcactcgcttgggccgccggatggcagagttccctctggagccaatgctatgcaaaatgctcatcatgtctgtgcatctgggctgcagtgaggaaatgctgaccattgtatccatgctgtctgtgcagaacgtcttctataggcccaaggataaacaagcccttgcagatcagaagaaggccaaattccaccagactgaaggggaccacctcaccctgctagctgtgtacaactcctggaagaacaacaagttctccaacccatggtgctatgagaactttatccaggctcgttccctgcgccgggcccaggacattcgcaagcagatgttaggcataatggacagacacaagctggatgttgtttcctgtggcaagtccacagtccgagtgcagaaggccatctgcagtgggttcttccgtaatgctgccaagaaagacccgcaggagggttaccggacactgatcgaccagcaggtggtctatatccatccttccagtgccctcttcaacagacagccagaatggaccgtccctatggggcatgtgtgagctccgcagctgggtcaggctcctcggtccaggtttacttcatcccgcctggacgtgatttggctttgactgtctctcctgcagcccaaagcacttcctccctgtggttgctgtagctgtctcattggagcagtgcctctccaagtttgaggatttgaacaaagaactgggactggtgacttgttaatgaacagttcagagggcagagggccatcatctcagcttgtggagacctttctttccctggatgctgcttctcagctaactccctctctcttcgtgtgtgtactcggccttcagggtttccaccgatttttacaccttcttcccaccacgatagcttggctttaatgtggaattaaattatatatttttaaaacctgtttttaaaattttgtttcttgcactaaattatgtcagtacattgatattttgtg

SEQ ID NO: 295959 - DNA, 832 bp, Homo sapiens
cttcccatagagatgggttcccactgtgctgcccaggctgctctccaatccctggcgtcaagcaatcctcctgcctctgcctcccaaagcgctgggattacagttgagagccactgtcctctgcactgaggaggctccttacctggcggaacatcaggcaggtcttgccaggccaggtttcggaacttacggaaagctggtctggatgtagtgcttgtagagaagcttctgagagattgggcacatcctgttacgttgctgcttctcctgtccttatgttattagtaagttctgaagtgatgtaaatgctagaactactgtagaactgtatgccagacactaagagagactatgtaacattccaggatataaaggaatgtatgttgtcactgggcagcaaaccacaccctaaagacaattcagaaagagtccgagggagaggaatataggccaggcaatctgctggctgcagatccctgccccttcattaagctgagtgcctcctgattctgtctgagtattcgcctttgtaagcccaggccagtaatcaaggggcagggcattgttgtgtgttaaccttgaaggccttctggggagagacagtacagggacctcaaatgaaaccaaaggggaaacggggactgggcacccacctccccaatctcgttttgtttttgtttttgttaagacaggatcttgccatcttgcctaggctggcatcaaactcctgaggcaggagaatcgcttgaacccgggaggtggaggttgcagtgagccaagatagcaccaatgcactccagcctgggcaacagagtgagaccctgtctcaaat

SEQ ID NO: 295960 - DNA, 896 bp, Homo sapiens
cttcccatagagatgggttcccactgtgctgcccaggctgctctccaatccctggcgtcaagcaatcctcctgcctctgcctcccaaagcgctgggattacagttgagagccactgtcctctgcactgaggaggctccttacctggcggaacatcaggcaggtcttgccaggccaggtttcggaacttacggaaagctggtctggatgtagtgcttgtagagaagcttctgagagattgggcacatcctgttacgttgctgcttctcctgtccttatgttattagtaagttctgaagtgatgtaaatgctagaactactgtagaactgtatgccagacactaagagagactatgtaacattccaggatataaaggaatgtatgttgtcactgggcagcaaaccacaccctaaagacaattcagaaagagtccgagggagaggaatataggccaggcaatctgctggctgcagatccctgccccttcattaagctgagtgcctcctgattctgtctctccccagaaggccttcaaggtaacacacaaaaagcacttcctccctgtggttgctgtagctgtctcattggagcagtgcctctccaagtttgaggatttgaacaaagaactgggactggtgacttgttaatgaacagttcagagggcagagggccatcatctcagcttgtggagacctttctttccctggatgctgcttctcagctaactccctctctcttcgtgtgtgtactcggccttcagggtttccaccgatttttacaccttcttcccaccacgatagcttggctttaatgtggaattaaattatatatttttaaaacctgtttttaaaattttgtttcttgcactaaattatgtcagtacattgatattttgtg

SEQ ID NO: 295961 - DNA, 456 bp, Homo sapiens
tcgacccggattccggttccggtgggcctccatcagcaagctccagtgctacgtgtccctggcattttaggtgtcggttgggtaggcagtcatggatcaggtaatgcagtttgttgagccaagtcggcagtttgtaaaggactccattcggctggttaaaagatgcactaaacctgatagaaaagaattccagaagattgccatggcaacagcaataggatttgctataatgggattcattggcttctttgtgaaattgatccatattcctattaataacatcattgttggtggctgaatacattttggaagagagtttttcatcttagagattggtgaacaagtgtgagggtgtgagaaactcacagaatacaaatttgcctgtatgttttgtgggtttttttttttcctttcaagatgttttctatttctaaattaaagtaatttcaaagtaaa

SEQ ID NO: 295962 - DNA, 834 bp, Homo sapiens
tcgacccggattccggttccggtgggcctccatcagcaagctccagtgctacgtgtccctggcattttaggtgtcggttgggtaggcagtcatggatcaggtaatgcagtttgttgagccaagtcggcagtttgtaaaggactccattcggctggttaaaagatgcactaaacctgatagaaaagaattccagaagattgccatggcaacagcaataggatttgctataatgggattcattggcttctttgtgaaattgatccatattcctattaataacatcattgttggtggctgaatacattttggaagagagtttttcatcttagagattggtgaacaagtgtgagggtgtgagaaactcacagaatacaaatttgcctgtatgttttgtgggtttttttttttcctttcaagatgttttctatttctaaattaaagtaatttcaaagtaaaaaaaaaaaaaaaaaaaaaaaaaacaaaaaaaaaaaaaaaaaaaaaaaaaaaaaaatttatatttaaaaaaattatatatataattaattaactcaattcttattttgcctaatccacctttttttgtgccctattactattgactcgcttggccattaccccttttaggaggggtgaaaaccccttctttggcccatattattcacctttcagcaatttccacatctttgcggttccccttcttatcggtatggccaaaattttcgtcttttcccatcagcttgtataactttaggccacatgccattttcaattccttttgcctcataccttaggtcacaggtaattcaacgccttaattttttatccaatacctct

SEQ ID NO: 295963 - DNA, 538 bp, Homo sapiens
ctgctggtgtgttctactggtgtgtcaactttatcaacttgaaaagcttctcaactaaccatcctgtcatgtagttgatattttttgttgtgttcagaaaggcgttatgctagactattccaaaatggcatttcctgaatgagcattgtgagtttacacatagacctcttccagtagccacatcatcttttcaggtccaggattttaaagttcattgtgccattcttttatgccatctttagatgaagttaggtgggattcacataattggtcttgagccgttaaagttatagcatactgcatttcaaataataataattattaaaatcttatctatgctcagaagtaataatttttctttcttttacagtggtggctgaatacattttggaagagagtttttcatcttagagattggtgaacaagtgtgagggtgtgagaaactcacagaatacaaatttgcctgtatgttttgtgggtttttttttttcctttcaagatgttttctatttctaaattaaagtaatttcaaagtaaa

SEQ ID NO: 295964 - DNA, 473 bp, Homo sapiens
tgatttttaggtgtcggttgggtaggaggtggaattgacccatgttagacgtgaattcagtggctggtctcatttacatctttatataaatgagcaagtgcttattgtatgagaaccaataccagtgagtatcttttttgttttaaacaggcagtcatggatcaggtaatgcagtttgttgagccaagtcggcagtttgtaaaggactccattcggctggttaaaagatgcactaaacctgatagaaaaggattcattggcttctttgtgaaattgatccatattcctattaataacatcattgttggtggctgaatacattttggaagagagtttttcatcttagagattggtgaacaagtgtgagggtgtgagaaactcacagaatacaaatttgcctgtatgttttgtgggtttttttttttcctttcaagatgttttctatttctaaattaaagtaatttcaaagtaaa

SEQ ID NO: 295965 - DNA, 773 bp, Homo sapiens
tcgacccggattccggttccggtgggcctccatcagcaagctccagtgctacgtgtccctggcattttaggtgtcggttgggtaggcagtcatggatcaggtaatgcagtttgttgagccaagtcggcagtttgtaaaggactccattcggctggttaaaagatgcactaaacctgatagaaaagaattccagaagattgccatggcaacagcaataggatttgctataatgggattcattggcttctttgtgaaattgatccatattcctattaataacatcattgttggtggctgaatacattttggaagagagtttttcatcttagagattggtgaacaagtgtgagggtgtgagaaactcacagaatacaaatttgcctgtatgttttgtgggtttttttttttcctttcaagatgttttctatttctaaattaaagtaatttcaaagtaaaaaaaaaaaaaaaaaaaaaaaaaacaaaaaaaaaaaaaaaaaaacaacccaacaaaaaccccacaaaaaaaaaaaaaaaaacctgaggggggccccggtacccatttgccttatagagagcgatttacatttactggccggcgtttacaacgtcggacttggaaaaccctgcgtacccacctaaacgccttgaagactatccctttcggcagttggcgtaataccaaaaggcccgacccgtggcctttccaacaatgccaccctgaatgcaaaatggaaattgaaccgtaatatttggaaaattccggtaaactttgt

SEQ ID NO: 295966 - DNA, 576 bp, Homo sapiens
tcgacccggattccggttccggtgggcctccatcagcaagctccagtgctacgtgtccctggcattttaggtgtcggttgggtaggtgagtttcttcccaccggtcggtacgggcgaacggggcggccacacctttgcgactcttgggggcagcgggcgtgggcgagccggcgtgtctccccgggcggccgtcgcggggcgggcggcagtcatggatcaggtaatgcagtttgttgagccaagtcggcagtttgtaaaggactccattcggctggttaaaagatgcactaaacctgatagaaaagaattccagaagattgccatggcaacagcaataggatttgctataatgggattcattggcttctttgtgaaattgatccatattcctattaataacatcattgttggtggctgaatacattttggaagagagtttttcatcttagagattggtgaacaagtgtgagggtgtgagaaactcacagaatacaaatttgcctgtatgttttgtgggtttttttttttcctttcaagatgttttctatttctaaattaaagtaatttcaaagtaaa

SEQ ID NO: 295967 - DNA, 764 bp, Homo sapiens
tcgacccggattccggttccggtgggcctccatcagcaagctccagtgctacgtgtccctggcattttaggtgtcggttgggtaggcagtcatggatcaggtaatgcagtttgttgagccaagtcggcagtttgtaaaggactccattcggctggttaaaagatgcactaaacctgatagaaaagaattccagaagattgccatggcaacagcaataggatttgctataatgggattcattggcttctttgtgaaattgatccatattcctattaataacatcattgttggtggctgaatacattttggaagagagtttttcatcttagagattggtgaacaagtgtgagggtgtgagaaactcacagaatacaaatttgcctgtaaaaaaaaaaaaaaaaaaaaaaaacaaaaaaaaaaaaaaaaaaaaaaaaaaaaaaatttatatttaaaaaaattatatatataattaattaactcaattcttattttgcctaatccacctttttttgtgccctattactattgactcgcttggccattaccccttttaggaggggtgaaaaccccttctttggcccatattattcacctttcagcaatttccacatctttgcggttccccttcttatcggtatggccaaaattttcgtcttttcccatcagcttgtataactttaggccacatgccattttcaattccttttgcctcataccttaggtcacaggtaattcaacgccttaattttttatccaatacctct

SEQ ID NO: 295968 - DNA, 1004 bp, Homo sapiens
ggcggccgcggcgcggagcagccgacgcacgctagtgggtccgcccgccaccgccccttcctcggcgtccgctcccgcccttgccgtcccccgcgcggctccgcgcctcgggccccgggcgcagccagccctccagacgcccgcggtcccggcggcgtgtgctgctcttcctccgcccgcggtttccagcgccgctccttcccccgcttgggcagggagggggcattgatcttcgatcgcgaagatggctgctggctgcctgctggccttgactctgacacttttccaatctttgctcatcggcccctcgtcggaggagccgttcccttcggccgtcactatcaaatcatgggtggataagatgcaagaagaccttgtcacactggcaaaaacagcaagtggagtcaatcagcttgttgatatttatgagaaatatcaagatttgtatactgtggaaccaaataatgcacgccagctggtagaaattgcagccagggatattgagaaacttctgagcaacagatctaaagccctggtggtctcagtgtgaagatcaaaatagcctgcttgacgatgttgtttaaatcagacacccacccctattgttattctgaatgagagacacctacctgtattatcttcagagcaatgatcacagatcggtcatgattcaagtttttgtttgtttcattgtctcctaactggtaaaatccatacgcgcccatttcagttcatatttatcttcatacctgttgggcctaacatcgttcctgatatatagtgggtgttctataaatatttactgaatgaataagttggttaatgagtaaaatataggttttttccctttataagctctctaatattttctgattttctataatcctattaatttagggctgtagaaatcaattatgtttatctgattgctactcatataataaaactcgatgcgcccaattccacttcaacttaaacataatcttatatatagtatgtaatca

SEQ ID NO: 295969 - DNA, 920 bp, Homo sapiens
gcttggacaaggtgctgaaaacagcttacatcctgagcattgctgttaaatgaagctacattcacgaaatcatcatctgagagggtttctaacatttcggagacagatgttcggatcagtttaagtgtcaatccactaacacttccactcacatccaccagaataagcatgtctttaggagatgcagctccttggatgtaccatggtcttctgcgtacatcataaaggtcaatcttatttggagttctactattatatcaaatcatgggtggataagatgcaagaagaccttgtcacactggcaaaaacagcaagtggagtcaatcagcttgttgatatttatgagaaatatcaagatttgtatactgtggaaccaaataatgcacgccagctggtagaaattgcagccagggatattgagaaacttctgagcaacagatctaaagccctggtggtctcagtgtgaagatcaaaatagcctgcttgacgatgttgtttaaatcagacacccacccctattgttattctgaatgagagacacctacctgtattatcttcagagcaatgatcacagatcggtcatgattcaagtttttgtttgtttcattgtctcctaactggtaaaatccatacgcgcccatttcagttcatatttatcttcatacctgttgggcctaacatcgttcctgatatatagtgggtgttctataaatatttactgaatgaataagttggttaatgagtaaaatataggttttttccctttataagctctctaatattttctgattttctataatcctattaatttagggctgtagaaatcaattatgtttatctgattgctactcatataataaaactcgatgcgcccaattccacttcaacttaaacataatcttatatatagtatgtaatca

SEQ ID NO: 295970 - DNA, 944 bp, Homo sapiens
ggcggccgcggcgcggagcagccgacgcacgctagtgggtccgcccgccaccgccccttcctcggcgtccgctcccgcccttgccgtcccggcggcgtgtgctgctcttcctccgcccgcggtttccagcgccgctccttcccccgcttgggcagggagggggcattgatcttcgatcgcgaagatggctgctggctgcctgctggccttgactctgacacttttccaatctttgctcatcggcccctcgtcggaggagccgttcccttcggccgtcactatcaaatcatgggtggataagatgcaagaagaccttgtcacactggcaaaaacagcaagtggagtcaatcagcttgttgatatttatgagaaatatcaagatttgtatactgtggaaccaaataatgcacgccagctggtagaaattgcagccagggatattgagaaacttctgagcaacagatctaaagccctggtggtctcagtgtgaagatcaaaatagcctgcttgacgatgttgtttaaatcagacacccacccctattgttattctgaatgagagacacctacctgtattatcttcagagcaatgatcacagatcggtcatgattcaagtttttgtttgtttcattgtctcctaactggtaaaatccatacgcgcccatttcagttcatatttatcttcatacctgttgggcctaacatcgttcctgatatatagtgggtgttctataaatatttactgaatgaataagttggttaatgagtaaaatataggttttttccctttataagctctctaatattttctgattttctataatcctattaatttagggctgtagaaatcaattatgtttatctgattgctactcatataataaaactcgatgcgcccaattccacttcaacttaaacataatcttatatatagtatgtaatca

SEQ ID NO: 295971 - DNA, 783 bp, Homo sapiens
  misc_feature (725)..(725): n is a, c, g, or t
  misc_feature (727)..(727): n is a, c, g, or t
ggcggccgcggcgcggagcagccgacgcacgctagtgggtccgcccgccaccgccccttcctcggcgtccgctcccgcccttgccgtcccccgcgcggctccgcgcctcgggccccgggcgcagccagccctccagacgcccgcggtcccggcggcgtgtgctgctcttcctccgcccgcggtttccagcgccgctccttcccccgcttgggcagggagggggcattgatcttcgatcgcgaagatggctgctggctgcctgctggccttgactctgacacttttccaatctttgctcatcggcccctcgtcggaggagccgttcccttcggccgtcactatcaaatcatgggtggataagatgcaagaagaccttgtcacactggcaaaaacagcaagtggagtcaatcagcttgttgatatttatgagaaatatcaagatttgtatactgtggaaccaaataatgcacgccagctggtagaaattgcagccagggatattgagaaacttctgagcaacagatctaaagccctggtgaagatgaaaatgaagctgaaagaaaaaatatatctcaggagctcaacatggaacagaaaaatccaaagaaataaaagattttctgtagtgtttttgaaaagtttgcagcttatgtaatagcagataaaatttctaattgtaaaatgttaaattgtaaaatctaatttgcaaaatgtctcaataaagncngatcggccgaaaattattttaactatacacacacacgcattaacagaaaaaactaa

SEQ ID NO: 295972 - DNA, 865 bp, Homo sapiens
ggcggccgcggcgcggagcagccgacgcacgctagtgggtccgcccgccaccgccccttcctcggcgtccgctcccgcccttgccgtcccccgcgcggctccgcgcctcgggccccgggcgcagccagccctccagacgcccgcggtcccggcggcgtgtgctgctcttcctccgcccgcggtttccagcgccgctccttcccccgcttgggcagggagggggcattgatcttcgatcgcgaagatggctgctggctgcctgctggccttgactctgacacttttccaatctttgctcatcggcccctcgtcggaggagccgttcccttcggccgtcactatcaaatcatgggtggataagatgcaagaagaccttgtcacactggcaaaaacagcaagtggagtcaatcagcttgttgatatttatgagaaatatcaagatttgtatactgtggaaccaaataatgcacgccagctggtagaaattgcagccagggatattgagaaacttctgagcaacagatctaaagccctggtggaagctactggaggaagtgctccaacaaaacaaggaaacaaacagtaaaaggaatacatggattgttttaaagaaacaggaaattggaaacgaagaagcaaggcaattactgatgtcagcagagcagcaagcaaggagtttaatcccatcaaataggtgcagggtgatggagttatccaggacttatgtctccaaggaaaacatgaggcagatggattgctgaatatatttgatcctgttgaagtgactaagttttcctttagagaacctgagaatgtataactccagggaaatcaataagttgtaaaataaaggaagtgtcacagc

SEQ ID NO: 295973 - DNA, 411 bp, Homo sapiens
ggaagcggcggcaggcgccatgtccggccgcgaaggtggcaagaagaagccactgaaacagcccaagaagtcaggccaaggagatggacgaggaagataaggctttcaagcagaaacaaaaagaggagcagaagaaactcgaggagctaaaagcgaaggccgcggggaagggcgccttggccacaggtggaattaagaaatctggcaaaaagtaagctgttccttgtgcctgaggagatggtgaccctttatttcatctgtatttaaacctctctattccctgccataacatcttttgccacgtatagctggaattaagtgttgtcttggagctgttgtacatttaagaataaacttttgtaaaaataaataaataaataaaaaataaacttaacttcctagtaaagcaac

SEQ ID NO: 295974 - DNA, 356 bp, Homo sapiens
agagacaaggtcttgctaagttgccagcctgaaactcctgggctcaagcagtcctcccaactcagccccccgagtagttgggattacaggtacatgccactgcacctggctaagagaactttttataaaaacatccaggaccatttatctcagtttaactaattcctagggaaatctacttttcattttgtttccatctcaatttacatttacatcagaagtctgttgccataacatcttttgccacgtatagctggaattaagtgttgtcttggagctgttgtacatttaagaataaacttttgtaaaaataaataaataaataaaaaataaacttaacttcctagtaaagcaac

SEQ ID NO: 295975 - DNA, 364 bp, Homo sapiens
ggaagcggcggcaggcgccatgtccggccgcgaaggtggcaagaagaagccactgaaacagcccaagaagtcaggccaaggagatggacgaggaagataaggctttcaagcagaaacaaaaagaggagcagaagaaactcgaggagctaaaagcgaaggccgcggggaagggcgccttggccacaggtggaattaagaaatctggcaaaaagtaagctgttccttgtgcctgaggagatggtgaccctttatttcatctgtatttaaacctctctattccctgccataacatcttttgccacgtatagctggaattaagtgttgtcttggcctgccatatgcaagggatcctctagatcacctg

SEQ ID NO: 295976 - DNA, 448 bp, Homo sapiens
cctttcaaatgagttggtttaatttcaggtgatacaaagtttagggtagaacaaggaccaaagaacagactctggcaagattctgagctggttttactttaaattcacagttatggtaggaatgacttagtgaaaacaactaaagagatgatgagccactgtaagatttttctttttttacaaaagtgttgtcttggagctgttgtacatttaagaataaacttaattccagctaaatctggcaaaaagtaagctgttccttgtgcctgaggagatggtgaccctttatttcatctgtatttaaacctctctattccctgccataacatcttttgccacgtatagctggaattaagtgttgtcttggagctgttgtacatttaagaataaacttttgtaaaaataaataaataaataaaaaataaacttaacttcctagtaaagcaac

SEQ ID NO: 295977 - DNA, 426 bp, Homo sapiens
gagatcagaggaatgcttctagaaactgaaaaacataaagattaatagccaaccaccagaagttaatgaagaggcatgaagagattctttctcacagagaaggaaccaactccgctgacccctccatcttggacttctagcctccaaaattgtgatacaccattcctctcttctgagctcctctctggccaactttaactcatcgattggttctgccacccgcaacgttggctccaaaggcctgtagcgttgttctaatacttcggtgatatctcggaagggcccctgacaagacaggatgaggaacatattttatatggaagatttttttgaggttatcactaacaagacacagctggagttactgcaagcactgagtgaagactgtggggctaataaaaagaaatgattcacgcctcatttatg

SEQ ID NO: 295978 - DNA, 287 bp, Homo sapiens
attcgcggccgcgtcgacgggagtagtcctgtttgtggtttgctgatgtgtaaatttatgtctttccgatgatttggaagtttactgctatgatttcttcaagatttttttctttccaatcttagccttatactgattcctacacagaattaagctagcctttcttctgcttttttcccccactataagatttcccccttactctcccaaaaagatgagggtttttttttttaggagttttatctaccaatgctgatgttctcctctgtgactaaaacctctcattg

SEQ ID NO: 295979 - DNA, 890 bp, Homo sapiens
gcacactgacccgacgcgaccttcggtcaggggccgccagcctgggccacctatacaacgacagcctgctccggggcttcctgaggaggtgcctgccccgccgaggttcaacagctttggagagcaggacatcttttcctctcagcctggccctctgcaatggaggccataaataggccagtagtggaagctacagaacacgtgagcatggcaggggctgagctccatttcaagatatgggtaagaggagggatgctgttgccttggagctgccaggctgcatggcagacaagcaggattcctgctgcctcccatggagactatactggaacgcaggtcttgccctgtcatccaggctggagtgcaatggatcttggatcactgcaacctccaccttccaggctcaagtgatcctcctgcctcaacctcccaagtagctgggactacagttcaaggaaagaagcaaacttattatttaagagcaatgcaaaatgaaagccaaggccaaggacttactttcccggatctggcatctgagtgcacagcaaccgcagagactgaaaactcctccgaatagaatgaatgtttgccatccccataaacacaacttcacagtttgggtaatactctggagagagtaacaataaagagaacacaaatacgttgaacttaaagcccacatggccaaatttaaaagcaaactggctataaaacaaacccactgcagcttctgattaacgaaactgaaatgttttgaaatgcttaactattagcccaatcctttataataagaggaacacactgaattttagctatcttttcaaaaagcgtgaaaagggaaggttagatttgtaaagaagatactgacataaaataaaagctattatttt

SEQ ID NO: 295980 - DNA, 811 bp, Homo sapiens
gcacactgacccgacgcgaccttcggtcaggggccgccagcctgggccacctatacaacgacagcctgctccggggcttcctgaggaggtgcctgccccgccgaggttcaacagctttggagagcaggacatcttttcctctcagcctggccctctgcaatggaggccataaataggccagtagtggaagctacagaacacgtgagcatggcaggggctgagctccatttcaagatatgggtaagaggagggatgctgttgccttggagctgccaggctgcatggcagacaagcaggattcctgctgcctcccatggagactatactggaacgcaggtcttgccctgtcatccaggctggagtgcaatggatcttggatcactgcaacctccaccttccaggctcaagtgatcctcctgcctcaacctcccaagtagctgggactacaggtatgtgccaccacgcttggttagtttttgcattttgggtagaaacagagtttcaacacattgcccaggctggtctggaactcctgggctcaagcgatcctcccaccttggcctcccaaagtgctgggattacaggcatgagccaccaagcctggccccaaagcaaaattttctgtcatctgacagcatctgccttttaagcctcagaagacaaatcatggcaaataggcaggagcacagagcactggggaaaacacaaaccagggggtcacagaaaaactggaggatttgctctatcactgaggagcggctcagtgtatgcaaaacaacatgaagcaacagggcctaactcactcccagaa

SEQ ID NO: 295981 - DNA, 378 bp, Homo sapiens
tgagttgactttaagtgaagttgacacaagtggaagggtaactttattatagttccaccgtgcttctcacttccgtttgacaaatgaagaagtggatacttgcactcgtcaagagggtatccattgtttctaagattacccacaaaataatttggtgcattattttgatacttcataatatagtcatataaaagtacaagtgtattctgagttaattcttgataaattacaaacaagaaatagaaatactgcatggatatttgaagtaattagctcaattatatttagctttgggatgcattcatcaagatccatcatttttctttgggtcattgtgcactgtgagaaaaattgagctagggacgatggctaagattt

SEQ ID NO: 295982 - DNA, 1299 bp, Homo sapiens
gatgatagacgggggtcccacaaatgtgtagttgtgtatatgtcatagtatacgaaggccagggaaatacatagtgccacctgacctaaccagctgttaagcataattactgtggttttgccagaaaggaattctaaatgcaggaaggtttgccattagtgggccacagaacatgaaagacttccctgcaaaccttttagaaaatttatgctagtttatatttcaggaggtaatacccattggatatactctaatttgggaaacatgggatgattaatgaattgatacaacctctagaccaggggaacagaagaaagtttggcttgcaaaatcacaggctccacctggtcagcgcttatcttctttgtttagctcaagttaggtaagtttacctagtttaaaaggagtattttaaatttatgtttgacatttaatgatttcagatagttcttggacatcaggataaacaaattcagtgtagcacatacgtagtataagaattctgttgatataatgccgcagtcatagttgtagcccattattccaggtaataatgatgctacaattagaaagttttccaattgtagttttgatttgcacagtagtaattgctgtttctattttcataggcaaggagaatccacacatgaattagaggctttccatattaggctttttggagacatagacatggtggtgatcgcatggggtgtttgagaaaatggagactaattgaatgcaaagtattctgtggggcaagcagagtaaagaatccagtcaaatgatgtcagccaaggatggcaagcccatgcccgaaaaactggcagcagctcacccataccaagccacctgagacatttcctgggctggaaacaacgttacggaaattgaacttccgtgccaaatttaccacacctcgccaaagcctgggcacctctcttattcatgggtgcctcaggagtaattacagctttatagcatatctactaagaactttagtgaaagtgaaaaggagtcggtaaccttgaattttagcaaactagagaaggaagatgtgggtgtcctttcctcacgcgttaacaaggatgctgttaggttgtctatctactctgaatccctacttaggaggaaagtcacgtatctggttgtgcaaatcaaagagctttgacagtttgttttttgtttgtttttatttgggtgcaatttttctagaagactaaataacctgtaaaagattaaaaaccatgattgagtgtgcctagaaataaagaccacccttgactgggctttttctaccca

SEQ ID NO: 295983 - DNA, 753 bp, Homo sapiens
cccggtcggcggagcccgctgcagctcccgctcgctccggacgcggaatcgggcagcagcgggaggcggcccggagagccgaggcaaggagaatccacacatgaattagaggctttccatattaggctttttggagacatagacatggtggtgatcgcatggggtgtttgagaaaatggagactaattgaatgcaaagtattctgtggggcaagcagagtaaagaatccagtcaaatgatgtcagccaaggatggcaagcccatgcccgaaaaactggcagcagctcacccataccaagccacctgagacatttcctgggctggaaacaacgttacggaaattgaacttccgtgccaaatttaccacacctcgccaaagcctgggcacctctcttattcatgggtgcctcaggagtaattacagctttatagcatatctactaagaactttagtgaaagtgaaaaggagtcggtaaccttgaattttagcaaactagagaaggaagatgtgggtgtcctttcctcacgcgttaacaaggatgctgttaggttgtctatctactctgaatccctacttaggaggaaagtcacgtatctggttgtgcaaatcaaagagctttgacagtttgttttttgtttgtttttatttgggtgcaatttttctagaagactaaataacctgtaaaagattaaaaaccatgattgagtgtgcctagaaataaagaccacccttgactgggctttttctaccca

SEQ ID NO: 295984 - DNA, 2875 bp, Homo sapiens
  misc_feature (3)..(3): n is a, c, g, or t
  misc_feature (23)..(23): n is a, c, g, or t
agntccaaataggagtgaattangctggccacatagtgttacttccacagacttgtaagaaccagttctgaggagaacaggtgattttctcccaaaagcacttttcctttttttctgaacttctaggccttctctttccagaactggtggaagacaaatgaaacggccaagatggtaaggtgagtagttcctgggaacgcttgtgctctaaccccaagttatgtgggatggacactcgaggggtgatggcattcctcattttacaagttacttgcttggctgcggctgctccaccaagatagcaaacattctcgatcttttgaacttcatgagactgacatttctgagtctgtttgcgaacaggacactagagggctcccaggggttaaaaataagtggaaatttatttgaatgaaaactgattctctacggcatttcttttttccgaatttaaaattaaagtttattttgttaactattgtttttaaaagctttgtatctcttaaaaccatgcagcagtcagtttccaagttttgctttgcaatcagtagttttcaagggagcttttaaagctgaactgaaatgtttgaaatgtggaacactcttgaccatgaaatatgttctacttacatgcctcagcctttaaaagttctttgcattagagtcaaggattacattcttcctggagccaagcatggggccagctgtgtaagaaacaagccgcatttctccttggggagactgataatttaaaaggtttgttgtgtcagaaacattcccagcttcatcaccaaccctttccttccacctctgcccactggagaccacttatatcccgaagcggacgcggcagctgaagtcaggaaaccatgcatcacattagcaggagccaactgcagactttaaactccgttcaacatgtggatgcggcagagaaatgacctgtccagacaagccggggcagctcataaactggttcatctgctccctgtgcgtcccgcgggtgcgtaagctctggagcagccggcgtccaaggacccggagaaaccttctgctgggcactgcgtgtgccatctacttgggcttcctggtgagccaggtggggagggcctctctccagcatggacaggcggctgagaaggggccacatcgcagccgcgacaccgccgagccatccttccctgagatacccctggatggtaccctggcccctccagagtcccagggcaatgggtccactctgcagcccaatgtggtgtacattaccctacgctccaagcgcagcaagccggccaatatccgtggcaccgtgaagcccaagcgcaggaaaaagcatgcagtggcatcggctgccccagggcaggaggctttggtcggaccatcccttcagccgcaggaagcggcaagggaagctgatgctgtagcacctgggtacgctcagggagcaaacctggttaagattggagagcgaccctggaggttggtgcggggtccgggagtgcgagccgggggcccagacttcctgcagcccagctccagggagagcaacattaggatctacagcgagagcacccctcctggctgagcaaagatgacatccgaagaatgcgactcttggcggacagcgcagtggcagggctccggcctgtgtcctctaggagcggagcccgtttgctggtgctggaggggggcgcacctggcgctgtgctccgctgtggccctagcccctgtgggcttctcaagcagcccttggacatgagtgaggtgtttgccttccacctagacaggatcctggggctcaacaggaccctgccgtctgtgagcaggaaagcagagttcatccaagatggccgcccatgccccatcattctttgggatgcatctttatcttcagcaagtaatgacacccattcttctgttaagctcacctggggaacttatcagcagttgctgaaacagaaatgctggcagaatggccgagtacccaagcctgaatcaggttgtactgaaatacatcatcatgagtggtccaagatggcactctttgattttttgttacagatttataatcgcttagatacaaattgctgtggattcagacctcgcaaggaagatgcctgtgtacagaatggattgaggccaaaatgtgatgaccaaggttctgcggctctagcacacattatccagcgaaagcatgacccaaggcatttggtttttatagacaacaagggtttctttgacaggagtgaagataacttaaacttcaaattgttagaaggcatcaaagagtttccagcttctgcagtttctgttttgaagagccagcacttacggcagaaacttcttcagtctctgtttcttgataaagtgtattgggaaagtcaaggaggtagacaaggaattgaaaagcttatcgatgtaatagaacacagagccaaaattcttatcacctatatcaatgcacacggggtcaaagtattacctatgaatgaatgacaaaagaatcttctggctagggtgttagatatatttatgcatttttggttttgtttttaaatcaagcacatcaacctcaagcccgtttagcaatgaggcagtgtagatgaatacgtaaaataaatgactttaaccaagtagctataatgggacttagcactgtatgcatacttaaaaaggttttgaaaaacaaactacttgagaaatatttgtttatatttttctctaacatcatgctatgtgtcagtctgaacatctgacaacagaaatttcagttattattctagctaagttttgaaaacatttgtcatgctgtttaatagaaaactgcaaaccagagatactgactccattaataaaccatattttgtgccgtttt

SEQ ID NO: 295985 - DNA, 2350 bp, Homo sapiens
cttttgtgaactgttgcaccgtgcaattgcacactataaatgtctttccttatctgtgtgtactcttatctcactgttctattttttctcctcatttatattaactctttcttacctttttttctgaacttctaggccttctctttccagaactggtggaagacaaatgaaacggccaagatggtaagaaacaagccgcatttctccttggggagactgataatttaaaaggtttgttgtgtcagaaacattcccagcttcatcaccaaccctttccttccacctctgcccactggagaccacttatatcccgaagcggacgcggcagctgaagtcaggaaaccatgcatcacattagcaggagccaactgcagactttaaactccgttcaacatgtggatgcggcagagaaatgacctgtccagacaagccggggcagctcataaactggttcatctgctccctgtgcgtcccgcgggtgcgtaagctctggagcagccggcgtccaaggacccggagaaaccttctgctgggcactgcgtgtgccatctacttgggcttcctggtgagccaggtggggagggcctctctccagcatggacaggcggctgagaaggggccacatcgcagccgcgacaccgccgagccatccttccctgagatacccctggatggtaccctggcccctccagagtcccagggcaatgggtccactctgcagcccaatgtggtgtacattaccctacgctccaagcgcagcaagccggccaatatccgtggcaccgtgaagcccaagcgcaggaaaaagcatgcagtggcatcggctgccccagggcaggaggctttggtcggaccatcccttcagccgcaggaagcggcaagggaagctgatgctgtagcacctgggtacgctcagggagcaaacctggttaagattggagagcgaccctggaggttggtgcggggtccgggagtgcgagccgggggcccagacttcctgcagcccagctccagggagagcaacattaggatctacagcgagagcacccctcctggctgagcaaagatgacatccgaagaatgcgactcttggcggacagcgcagtggcagggctccggcctgtgtcctctaggagcggagcccgtttgctggtgctggaggggggcgcacctggcgctgtgctccgctgtggccctagcccctgtgggcttctcaagcagcccttggacatgagtgaggtgtttgccttccacctagacaggatcctggggctcaacaggaccctgccgtctgtgagcaggaaagcagagttcatccaagatggccgcccatgccccatcattctttgggatgcatctttatcttcagcaagtaatgacacccattcttctgttaagctcacctggggaacttatcagcagttgctgaaacagaaatgctggcagaatggccgagtacccaagcctgaatcaggttgtactgaaatacatcatcatgagtggtccaagatggcactctttgattttttgttacagatttataatcgcttagatacaaattgctgtggattcagacctcgcaaggaagatgcctgtgtacagaatggattgaggccaaaatgtgatgaccaaggttctgcggctctagcacacattatccagcgaaagcatgacccaaggcatttggtttttatagacaacaagggtttctttgacaggagtgaagataacttaaacttcaaattgttagaaggcatcaaagagtttccagcttctgcagtttctgttttgaagagccagcacttacggcagaaacttcttcagtctctgtttcttgataaagtgtattgggaaagtcaaggaggtagacaaggaattgaaaagcttatcgatgtaatagaacacagagccaaaattcttatcacctatatcaatgcacacggggtcaaagtattacctatgaatgaatgacaaaagaatcttctggctagggtgttagatatatttatgcatttttggttttgtttttaaatcaagcacatcaacctcaagcccgtttagcaatgaggcagtgtagatgaatacgtaaaataaatgactttaaccaagtagctataatgggacttagcactgtatgcatacttaaaaaggttttgaaaaacaaactacttgagaaatatttgtttatatttttctctaacatcatgctatgtgtcagtctgaacatctgacaacagaaatttcagttattattctagctaagttttgaaaacatttgtcatgctgtttaatagaaaactgcaaaccagagatactgactccattaataaaccatattttgtgccgtttt

SEQ ID NO: 295986 - DNA, 2994 bp, Homo sapiens
  misc_feature (3)..(3): n is a, c, g, or t
  misc_feature (23)..(23): n is a, c, g, or t
agntccaaataggagtgaattangctggccacatagtgttacttccacagacttgtaagaaccagttctgaggagaacaggtgattttctcccaaaagcacttttcctttttttctgaacttctaggccttctctttccagaactggtggaagacaaatgaaacggccaagatggtaaggtgagtagttcctgggaacgcttgtgctctaaccccaagttatgtgggatggacactcgaggggtgatggcattcctcattttacaagttacttgcttggctgcggctgctccaccaagatagcaaacattctcgatcttttgaacttcatgagactgacatttctgagtctgtttgcgaacaggacactagagggctcccaggggttaaaaataagtggaaatttatttgaatgaaaactgattctctacggcatttcttttttccgaatttaaaattaaagtttattttgttaactattgtttttaaaagctttgtatctcttaaaaccatgcagcagtcagtttccaagttttgctttgcaatcagtagttttcaagggagcttttaaagctgaactgaaatgtttgaaatgtggaacactcttgaccatgaaatatgttctacttacatgcctcagcctttaaaagttctttgcattagagtcaaggattacattcttcctggagccaagcatggggccagctgtgtaagaaacaagccgcatttctccttggggagactgataatttaaaaggtttgttgtgtcagaaacattcccagcttcatcaccaaccctttccttccacctctgcccactggagaccacttatatcccgaagcggacgcggcagctgaagtcaggaaaccatgcatcacattagcaggagccaactgcagactttaaactccgttcaacatgtggatgcggcagagaaatgacctgtccagacaagccggggcagctcataaactggttcatctgctccctgtgcgtcccgcgggtgcgtaagctctggagcagccggcgtccaaggacccggagaaaccttctgctgggcactgcgtgtgccatctacttgggcttcctggtgagccaggtggggagggcctctctccagcatggacaggcggctgagaaggggccacatcgcagccgcgacaccgccgagccatccttccctgagatacccctggatggtaccctggcccctccagagtcccagggcaatgggtccactctgcagcccaatgtggtgtacattaccctacgctccaagcgcagcaagccggccaatatccgtggcaccgtgaagcccaagcgcaggaaaaagcatgcagtggcatcggctgccccagggcaggaggctttggtcggaccatcccttcagccgcaggaagcggcaagggaagctgatgctgtagcacctgggtacgctcagggagcaaacctggttaagattggagagcgaccctggaggttggtgcggggtccgggagtgcgagccgggggcccagacttcctgcagcccagctccagggagagcaacattaggatctacagcgagagcacccctcctggctgagcaaagatgacatccgaagaatgcgactcttggcggacagcgcagtggcagggctccggcctgtgtcctctaggagcggagcccgtttgctggtgctggaggggggcgcacctggcgctgtgctccgctgtggccctagcccctgtgggcttctcaagcagcccttggacatgagtgaggtgtttgccttccacctagacaggatcctggggctcaacaggaccctgccgtctgtgagcaggaaagcagagttcatccaagatggccgcccatgccccatcattctttgggatgcatctttatcttcagcaagtaatgacacccattcttctgttaagctcacctggggaacttatcagcagttgctgaaacagaaatgctggcagaatggccgagtacccaagcctgaatcaggttgtactgaaatacatcatcatgagtggtccaagatggcactctttgattttttgttacagatttataatcgcttagatacaaattgctgtggattcagacctcgcaaggaagatgcctgtgtacagaatggattgaggccaaaatgtgatgaccaaggttctgcggctctagcacacattatccagcgaaagcatgacccaaggcatttggtttttatagacaacaagggtttctttgacaggagtgaagataacttaaacttcaaattgttagaaggcatcaaagagtttccagcttctgcagtttctgttttgaagagccagcacttacggcagaaacttcttcagtctctgtttcttgataaagtgtattgggaaagtcaaggaggtagacaaggaattgaaaagcttatcgatgtaatagaacacagagccaaaattcttatcacctatatcaatgcacacggggtcaaagtattacctatgaatgaatgacaaaagaatcttctggctagggtgttagatatatttatgcatttttggttttgtttttaaatcaagcacatcaacctcaagcccgtttagcaatgaggcagtgtagatgaatacgtaaaataaatgactttaaccaagtagctataatgggacttagcactgtatgcatacttaaaaaggttttgaaaaacaaactacttgagaaatatttgtttatatttttctctaacatcatgctatgtgtcagtctgaacatctgacaacagaaatttcagttattattctagctaagttttgaaaacatttgtcatgctgtttaatagaaaactgcaaaccagagatactgactccattaataaaccatattttgtgccgttttgactgttctgaccaaatactaatgggaacaattcttgacgtttttctgttgctgattgttaacatagagcagtctctacactaccctgaggcaactctacattgcaacacggtctctca

SEQ ID NO: 295987 - DNA, 2940 bp, Homo sapiens
  misc_feature (3)..(3): n is a, c, g, or t
  misc_feature (23)..(23): n is a, c, g, or t
agntccaaataggagtgaattangctggccacatagtgttacttccacagacttgtaagaaccagttctgaggagaacaggtgattttctcccaaaagcacttttcctttttttctgaacttctaggccttctctttccagaactggtggaagacaaatgaaacggccaagatggtaaggtgagtagttcctgggaacgcttgtgctctaaccccaagttatgtgggatggacactcgaggggtgatggcattcctcattttacaagttacttgcttggctgcggctgctccaccaagatagcaaacattctcgatcttttgaacttcatgagactgacatttctgagtctgtttgcgaacaggacactagagggctcccaggggttaaaaataagtggaaatttatttgaatgaaaactgattctctacggcatttcttttttccgaatttaaaattaaagtttattttgttaactattgtttttaaaagctttgtatctcttaaaaccatgcagcagtcagtttccaagttttgctttgcaatcagtagttttcaagggagcttttaaagctgaactgaaatgtttgaaatgtggaacactcttgaccatgaaatatgttctacttacatgcctcagcctttaaaagttctttgcattagagtcaaggattacattcttcctggagccaagcatggggccagctgtgtaagaaacaagccgcatttctccttggggagactgataatttaaaaggtttgttgtgtcagaaacattcccagcttcatcaccaaccctttccttccacctctgcccactggagaccacttatatcccgaagcggacgcggcagctgaagtcaggaaaccatgcatcacattagcaggagccaactgcagactttaaactccgttcaacatgtggatgcggcagagaaatgacctgtccagacaagccggggcagctcataaactggttcatctgctccctgtgcgtcccgcgggtgcgtaagctctggagcagccggcgtccaaggacccggagaaaccttctgctgggcactgcgtgtgccatctacttgggcttcctggtgagccaggtggggagggcctctctccagcatggacaggcggctgagaaggggccacatcgcagccgcgacaccgccgagccatccttccctgagatacccctggatggtaccctggcccctccagagtcccagggcaatgggtccactctgcagcccaatgtggtgtacattaccctacgctccaagcgcagcaagccggccaatatccgtggcaccgtgaagcccaagcgcaggaaaaagcatgcagtggcatcggctgccccagggcaggaggctttggtcggaccatcccttcagccgcaggaagcggcaagggaagctgatgctgtagcacctgggtacgctcagggagcaaacctggttaagattggagagcgaccctggaggttggtgcggggtccgggagtgcgagccgggggcccagacttcctgcagcccagctccagggagagcaacattaggatctacagcgagagcacccctcctggctgagcaaagatgacatccgaagaatgcgactcttggcggacagcgcagtggcagggctccggcctgtgtcctctaggagcggagcccgtttgctggtgctggaggggggcgcacctggcgctgtgctccgctgtggccctagcccctgtgggcttctcaagcagcccttggacatgagtgaggtgtttgccttccacctagacaggatcctggggctcaacaggaccctgccgtctgtgagcaggaaagcagagttcatccaagatggccgcccatgccccatcattctttgggatgcatctttatcttcagcaagtaatgacacccattcttctgttaagctcacctggggaacttatcagcagttgctgaaacagaaatgctggcagaatggccgagtacccaagcctgaatcaggttgtactgaaatacatcatcatgagtggtccaagatggcactctttgattttttgttacagatttataatcgcttagatacaaattgctgtggattcagacctcgcaaggaagatgcctgtgtacagaatggattgaggcctgacccaaggcatttggtttttatagacaacaagggtttctttgacaggagtgaagataacttaaacttcaaattgttagaaggcatcaaagagtttccagcttctgcagtttctgttttgaagagccagcacttacggcagaaacttcttcagtctctgtttcttgataaagtgtattgggaaagtcaaggaggtagacaaggaattgaaaagcttatcgatgtaatagaacacagagccaaaattcttatcacctatatcaatgcacacggggtcaaagtattacctatgaatgaatgacaaaagaatcttctggctagggtgttagatatatttatgcatttttggttttgtttttaaatcaagcacatcaacctcaagcccgtttagcaatgaggcagtgtagatgaatacgtaaaataaatgactttaaccaagtagctataatgggacttagcactgtatgcatacttaaaaaggttttgaaaaacaaactacttgagaaatatttgtttatatttttctctaacatcatgctatgtgtcagtctgaacatctgacaacagaaatttcagttattattctagctaagttttgaaaacatttgtcatgctgtttaatagaaaactgcaaaccagagatactgactccattaataaaccatattttgtgccgttttgactgttctgaccaaatactaatgggaacaattcttgacgtttttctgttgctgattgttaacatagagcagtctctacactaccctgaggcaactctacattgcaacacggtctctca

SEQ ID NO: 295988 - DNA, 1319 bp, Homo sapiens
agcggaattcacatgaacacccacatatcttttaaaacccgctttctcaccactgtgacagaattttatctcttcacttgttgagatttctctagagagtccagtactgcatcattttgacaaacctgaatgtggagagatgaatgcttctcatctctgaaacacttcaggatggccgcccatgccccatcattctttgggatgcatctttatcttcagcaagtaatgacacccattcttctgttaagctcacctggggaacttatcagcagttgctgaaacagaaatgctggcagaatggccgagtacccaagcctgaatcaggttgtactgaaatacatcatcatgagtggtccaagatggcactctttgattttttgttacagatttataatcgcttagatacaaattgctgtggattcagacctcgcaaggaagatgcctgtgtacagaatggattgaggccaaaatgtgatgaccaaggttctgcggctctagcacacattatccagcgaaagcatgacccaaggcatttggtttttatagacaacaagggtttctttgacaggagtgaagataacttaaacttcaaattgttagaaggcatcaaagagtttccagcttctgcagtttctgttttgaagagccagcacttacggcagaaacttcttcagtctctgtttcttgataaagtgtattgggaaagtcaaggaggtagacaaggaattgaaaagcttatcgatgtaatagaacacagagccaaaattcttatcacctatatcaatgcacacggggtcaaagtattacctatgaatgaatgacaaaagaatcttctggctagggtgttagatatatttatgcatttttggttttgtttttaaatcaagcacatcaacctcaagcccgtttagcaatgaggcagtgtagatgaatacgtaaaataaatgactttaaccaagtagctataatgggacttagcactgtatgcatacttaaaaaggttttgaaaaacaaactacttgagaaatatttgtttatatttttctctaacatcatgctatgtgtcagtctgaacatctgacaacagaaatttcagttattattctagctaagttttgaaaacatttgtcatgctgtttaatagaaaactgcaaaccagagatactgactccattaataaaccatattttgtgccgttttgactgttctgaccaaatactaatgggaacaattcttgacgtttttctgttgctgattgttaacatagagcagtctctacactaccctgaggcaactctacattgcaacacggtctctca

SEQ ID NO: 295989 - DNA, 1231 bp, Homo sapiens
cccggtcggcggagcccgctgcagctcccgctcgctccggacgcggaatcgggcagcagcgggaggcggcccggagagccgagatggccgcccatgccccatcattctttgggatgcatctttatcttcagcaagtaatgacacccattcttctgttaagctcacctggggaacttatcagcagttgctgaaacagaaatgctggcagaatggccgagtacccaagcctgaatcaggttgtactgaaatacatcatcatgagtggtccaagatggcactctttgattttttgttacagatttataatcgcttagatacaaattgctgtggattcagacctcgcaaggaagatgcctgtgtacagaatggattgaggccaaaatgtgatgaccaaggttctgcggctctagcacacattatccagcgaaagcatgacccaaggcatttggtttttatagacaacaagggtttctttgacaggagtgaagataacttaaacttcaaattgttagaaggcatcaaagagtttccagcttctgcagtttctgttttgaagagccagcacttacggcagaaacttcttcagtctctgtttcttgataaagtgtattgggaaagtcaaggaggtagacaaggaattgaaaagcttatcgatgtaatagaacacagagccaaaattcttatcacctatatcaatgcacacggggtcaaagtattacctatgaatgaatgacaaaagaatcttctggctagggtgttagatatatttatgcatttttggttttgtttttaaatcaagcacatcaacctcaagcccgtttagcaatgaggcagtgtagatgaatacgtaaaataaatgactttaaccaagtagctataatgggacttagcactgtatgcatacttaaaaaggttttgaaaaacaaactacttgagaaatatttgtttatatttttctctaacatcatgctatgtgtcagtctgaacatctgacaacagaaatttcagttattattctagctaagttttgaaaacatttgtcatgctgtttaatagaaaactgcaaaccagagatactgactccattaataaaccatattttgtgccgttttgactgttctgaccaaatactaatgggaacaattcttgacgtttttctgttgctgattgttaacatagagcagtctctacactaccctgaggcaactctacattgcaacacggtctctca

SEQ ID NO: 295990 - DNA, 174 bp, Homo sapiens
tctgttaagctcacctggggaacttatcagcagttgctgaaacagaaatgctggcagaatggccgagtacccaagcctgaatcaggttgtactgaaatacatcatcatgagtggtccaagatggcactctttgattttttgttacaggtaagtttatcaaatcaagcaaatagt

SEQ ID NO: 295991 - DNA, 918 bp, Homo sapiens
ttagtgattgtatcacataggtgccacagggaagtccgggaagatggttgttatgggccatcaagagcaggctatcattcctggggctctcggagacaagggctgacccagggccgcctccctccactctgtgtctgccaggcctttggagcagcaggcctgagcagcgactacccactggctcagttcttcacctgggcccgagccctgcgctttgccgacggccctgacgaggtgcaccgggccacggtggccaagctagagctgaagcaccgcatttagagccttggggctgcagtggctcaatgtcctggctggtccagctgtgcccagatctgtcactgatgtgcctcgaaagatccggtgtttgtggctcctgcaccctgctcagcagctctgtcccgggacagtcagggtggactcaatctttctggttctccacagaagacgtctctgcaagaagcctggagtctgtttcaggccaggaggaggggatttgctgagggccaagggggttctgggacagagtctggaaagctggtcttcaggctctcagtcccaggctgggcaggcacggtcacttcacttcagcctttcagtccctctctctctgcctgtgggaatctggacacattttgggaggcctcccaaggctgtgggacgtgcttgctctggcagctgcagggttcctgtctggcctccctggtgagcagaggggcggccacggcgggcggtggcctagagacccaggacctgggcgcctgggaaaatggaatgcaacccacattgtaaagccactggcatctgattatctccatttgaacacacagcacagaacaatcatttaaatgttattttggaaaggggttttggggacacagaagaataagtaaacacatctcggaggcaatgtggaat

SEQ ID NO: 295992 - DNA, 2820 bp, Homo sapiens
  misc_feature (5)..(7): n is a, c, g, or t
  misc_feature (13)..(14): n is a, c, g, or t
  misc_feature (19)..(19): n is a, c, g, or t
  misc_feature (21)..(21): n is a, c, g, or t
  misc_feature (23)..(23): n is a, c, g, or t
  misc_feature (28)..(28): n is a, c, g, or t
  misc_feature (30)..(31): n is a, c, g, or t
  misc_feature (34)..(34): n is a, c, g, or t
  misc_feature (43)..(44): n is a, c, g, or t
  misc_feature (46)..(46): n is a, c, g, or t
  misc_feature (51)..(51): n is a, c, g, or t
  misc_feature (64)..(64): n is a, c, g, or t
  misc_feature (68)..(70): n is a, c, g, or t
  misc_feature (75)..(75): n is a, c, g, or t
  misc_feature (82)..(84): n is a, c, g, or t
  misc_feature (86)..(86): n is a, c, g, or t
  misc_feature (108)..(108): n is a, c, g, or t
  misc_feature (131)..(132): n is a, c, g, or t
  misc_feature (138)..(138): n is a, c, g, or t
  misc_feature (171)..(172): n is a, c, g, or t
  misc_feature (177)..(177): n is a, c, g, or t
  misc_feature (187)..(187): n is a, c, g, or t
  misc_feature (198)..(198): n is a, c, g, or t
  misc_feature (201)..(201): n is a, c, g, or t
  misc_feature (205)..(205): n is a, c, g, or t
  misc_feature (213)..(213): n is a, c, g, or t
  misc_feature (225)..(225): n is a, c, g, or t
gagannnagtctnnctctntngnccagncnngantgcagtggnncnatctnggctcactgcaanctcnnnctccngggttcnnncnattctcctgcctcagcctcccnagtagctgggactacaggcgccnngctaantttttgtatttttagtagagacggggtttcacnntgttngccaggatgntctcgatctcntgncctngtgatccncccaccttggcntcccaaagtgctgggattacaggcgtgagccaccacgcctggctggtttgctctttagagtaatgaaaatgtcctaaaattgatggcagtgatggttgcacaactttgtaaatatattaaaaaccattgaattgtactctttaaataggtgacttgcatggcatgtgaattagagttcagtaaagctgttctaaaatctgtgtgtgtatatgtatatataaaacagcagacttgcctttgcagattttgaaatgtgataatataagagttttctttctttctttctttctttctttttttttttttttttgagacggagtcttgctctgttgcccaggctggagtgcagtggcatgatcttggctcactgcaacctccgtctcctgggttcaagcaattctcctgcctcagcctccccagtagctgggactacaggtgcgtgccaccacgcctggctaattttttgcatttttagtagataaggggtttcaccatgttagccaggatggtctcgatctcctgacctcgtgatctgcctgcctcagcctcccaaagtgctgggattacaggtgtgagccactgcgcccagccttataagagttttcaaaacccacacagattgaatttaaaaacaagaaaaaaattgatcagaaactaaagttcataatggtgatactgaggcaatataaaaagcattaaatgacttctcaatcattaaaaattaaattacatatacttcatatacttttagatttcactgtatcctcttatgatatgctgttttttttttcaactagcaatccatgagcagaataaagaactcatttaattgtaatattgatataaatagctccattccctactgtgttgctcaggctagagtgcaatggcttgatcatagctcactgcagctccaatctcccaggctcaagccatcctcccacctcagcctcctgagtagctgggaccacaggtatgtgccaccaagcctagctaagttaaaaaaaaattttttttagatctcactttgttgcccaggctggtgtcaaaatcctgagctcaagcagtcttcccacctcagcctcccacagtgctgggattacaggtgtgagccactgtgcccagcctataactctagtcctggataacttttaaaaaccttatatgagagttcagcacaggggctgaggaacacagttcctgcaggcagcaagctatgagcctgggctcttgtagcagagagcagaaggacgccaggaataagcattttttttttctgttggccatgagtgtttgtcactcttaatgattgctgttctcctgtgccctctcctgttcttagttaaagacctccgtgcctgtggactcatttttctctctgttgaccagtgagcgagtggcaaagcagttcccagtgatgactgaggccataactcaaattcgggcaaaaggtcttcagactgcagtcttgagcaataatttttatcttcccaaccagaaaagctttttgcccctggaccggaaacagtttgatgtgattgtggagtcctgcatggaagggatctgtaagccagaccctaggatctacaagctgtgcttggagcagctcggcctgcagccctctgagtccatctttcttgatgaccttggaacaaatctaaaagaagctgccagacttggtattcacaccattaaggtaatagtcactaatttttgaactccctcccatgcaccagccactaatgcaatgtttctctgtaatctttttacatttgtagctctagctttccttagggtttccccctgtgtttccatagtcatcttattttgtgttaattatgaaatctatgtgactagctgcttgtattttcaatgggaagcaagacaaacaggtactgcgaaggcaggttgagaaaagagatgggaaaggaggtgaatggcaggcttaagacctttgtgggggtgttcacactgtcctcatgatccagtgatgctgccttaagtggggagccagtggccaccagccatgcaggccatgcagctcactgctgtaaagcacgagaagccatgtgagggggtctcatgccaacttttttctattctttttttttttttttctcatacagggtcttgttatgtcacccaggctggagtgcagtggtgcaatcatagctcactgtagcctcaacctcctgggcttaagtgatcctcctacctcagtctcctgagtagctgaccagaggcatacaccaccacacccgactaatttttgtattttttgtagagacagggttttgccgtgttgcccaagctggtgtcaaactcctgggctcatgcctgtaatcctaccactttgtgaggctgaggtgggcagatcacttgaggccaggagtttgagaccagcctggtcaacatggcgaaactccatctctactaaaaatacaaaaattagccgagtgtggtggcgcatgcctgtagtcccagctactggggaggctaaggcagaatcgcttgatcccaggaagcagaggttgcagtgagctgagatcacgccactgcactccagcctggacgacagagggagagtccatctca

SEQ ID NO: 295993 - DNA, 1241 bp, Homo sapiens
actgctcttccggacgcaattttgaggaggtcggagcggaaggacgtcgtggagattgcttgcgctggggtgccacacttaggctgagctgcaggttttcgcacagtcgcgagttaacctctgcttgctccagaggcctcgtcctaatccacctcggctgacggcgcgggatccctggctccgcgagcctcagcctcaccatgtgtgtcaggagctgtttccagtccccccgtctccagtgggtgtggagaacagccttcctgaaacacacccagcgcaggcaccaggggtcccaccgatggacacaccttggaggcagcacctacagagcggtgattttcgacatgggcggagttctcattccttctccagggagagtcgctgcagaatgggaggtacagaatcgtatcccttctggaactatattaaaggccttgatggaaggtggtgaaaatgggccctggatgagatttatgagagcagaaataacagcagagggttttttacgagaatttgggagactttgctctgaaatgttaaagacctccgtgcctgtggactcatttttctctctgttgaccagtgagcgagtggcaaagcagttcccagtgatgactgaggccataactcaaattcgggcaaaaggtcttcagactgcagtcttgagcaataatttttatcttcccaaccagaaaagctttttgcccctggaccggaaacagtttgatgtgattgtggagtcctgcatggaagggatctgtaagccagaccctaggatctacaagctgtgcttggagcagctcggcctgcagccctctgagtccatctttcttgatgaccttggaacaaatctaaaagaagctgccagacttggtattcacaccattaaggttaatgacccagagactgcagtaaaggaattagaagctctcttgggttttacattgagagtaggtgttccaaacactcggcctgtgaaaaagacgatggaaattccgaaagattccttgcagaagtacctcaaagacttactgggtatccagaccacaggattatgaaagcccttgcaaatgctggagtacctgtccctaacgttcttgatctctgtgaagattcaaggtaaagttcagatgtttttgctattgcactttcaagctacaggagagaaaagcccatatgctaacacaaattccaatttgttaaagacaaataaaatttgggtaggagggaaaagaaacttt

SEQ ID NO: 295994 - DNA, 567 bp, Homo sapiens
ccacagcacatccagaaaactttattcggccataatcctaccacccccaaagtttggaaacctaggttaaaagacagctgcttccaggacaggaattcaaattggtgattatcaatttcagaaaggtgacgcaaaccctgagaccaaaaccagtgtctcacaagaactgctattgaaagaacagaggcagtctgaattttttattaccgagcaaacctgtgatttacacccttttgagttaagactgaccagttattttttctttctaagtaaaacgctcctgtctatggactcaggtatggtgcttcagccccacatggaattaaattcagccttctggcagaataattggactgaatgagtcagacagaagtctccagaaagtgcatagcatgaacatggcacctccactgaagacttggttggagtaattaggaatctacaaaagatttgctacaaggaggttcaccacagtgcttattgaaatagcaaaattctgaacaacctataaggctaacaatgactgttggccaaataaaacacaagatggcatacagtgagacttta

SEQ ID NO: 295995 - DNA, 641 bp, Homo sapiens
ccacagcacatccagaaaactttattcggccataatcctaccacccccaaagtttggaaacctaggttaaaagacagctgcttccaggacaggaattcaaattggtgattatcaatttcagaaaggtgacgcaaaccctgagaccaaaaccagtgtctcacaagaactgctattgaaagaacagaggcagtctgaattttttattaccgagcaaacctgtgatttacacccttttgagttaagactgaccagttattttttctttctaagtaaaacgctcctgtctatggactcaggtatggtgcttcagccccacatggaattaaattcagccttctggcagaataattggactgaatgagtcagacagaagtctccagaaagtgcatagcatgaacatggcacctccactgaagacttggttggagtaattaggaatctacaaaagatttgctacaaggaggttcaccacagtgcttattgaaatagcaaaattctgaacaacctataaggctaacaatgactgttggccaaataaaacacaagatggcatacagtgagactttaaatgatgctgtggaaatctattccttaacatggagaaattgctcactatatacacttaaatttaaaaaaaaaaa

SEQ ID NO: 295996 - DNA, 324 bp, Homo sapiens
ctccctaaaccccagcatgtatcaatgtattccacttttgcatattttgcttcctatagaatgggaggtacagaatcgtatcccttctggaactatattaaaggccttgatggaaggtggtgaaaatgggccctggatgagatttatgagagcagaaataacagcagagggttttttacgagaatttgggagactttgctctgaaatgttaaagacctccgtgcctgtggactcatttttctctctgttgaccagtgagcgagtggcaaagcagttcccagtgatgactgaggccatgatcacgcctgtttgtagctgctacac

SEQ ID NO: 295997 - DNA, 3713 bp, Homo sapiens
actgctcttccggacgcaattttgaggaggtcggagcggaaggacgtcgtggagattgcttgcgctggggtgccacacttaggctgagctgcaggttttcgcacagtcgcgagttaacctctgcttgctccagaggcctcgtcctaatccacctcggctgacggcgcgggatccctggctccgcgagcctcagcctcaccatgtgtgtcaggagctgtttccagtccccccgtctccagtgggtgtggagaacagccttcctgaaacacacccagcgcaggcaccaggggtcccaccgatggacacaccttggaggcagcacctacagagcggtgattttcgacatgggcggagttctcattccttctccagggagagtcgctgcagaatgggaggtacagaatcgtatcccttctggaactatattaaaggccttgatggaaggtggtgaaaatgggccctggatgagatttatgagagcagaaataacagcagagggttttttacgagaatttgggagactttgctctgaaatgttaaagacctccgtgcctgtggactcatttttctctctgttgaccagtgagcgagtggcaaagcagttcccagtgatgactgaggccataactcaaattcgggcaaaaggtcttcagactgcagtcttgagcaataatttttatcttcccaaccagaaaagctttttgcccctggaccggaaacagtttgatgtgattgtggagtcctgcatggaagggatctgtaagccagaccctaggatctacaagctgtgcttggagcagctcggcctgcagccctctgagtccatctttcttgatgaccttggaacaaatctaaaagaagctgccagacttggtattcacaccattaaggttaatgacccagagactgcagtaaaggaattagaagctctcttgggttttacattgagagtaggtgttccaaacactcggcctgtgaaaaagacgatggaaattccgaaagattccttgcagaagtacctcaaagacttactgggtatccagaccacaggcccattggaactacttcagtttgatcacgggcagtcaaatccaacttactacatcaggctggctaatcgtgatctagttctgaggaagaagcccccagggacactccttccatctgcccatgccatagagagggagttcaggattatgaaagcccttgcaaatgctggagtacctgtccctaacgttcttgatctctgtgaagattcaagtgtcattggcacccccttctatgtgatggagtactgcccaggtctcatctacaaagacccttccctgccaggcttggagcccagccacagacgagccatatacactgccatgaacacagtcctgtgcaaaattcacagtgtggatctgcaggctgtgggacttgaagactatgggaagcaaggggactatattccacgccaggtacgaacctgggttaagcagtatcgagcttccgaaactagcaccatcccagccatggagaggctgatcgaatggctgcccctccatcttccccgtcagcagaggaccacagtggtgcacggggacttcaggctcgacaacctggtgtttcatccagaagagccagaggtgcttgctgtccttgactgggaactttctaccttgggcgacccccttgctgatgtggcctacagctgcctggctcattacctgccatccagttttcccgtgctgagaggtattaatgactgtgacttgacacagctgggaatccctgctgcagaggagtatttcaggatgtactgtctccaaatggggctccctcccactgagaactggaacttctatatggctttttcctttttccgtgtggctgcaatcctacagggagtctacaagcgatcactcacagggcaagcaagctccacatatgcggaacaaactggaaagctgaccgaatttgtgtctaacctggcgtgggatttcgcagtcaaagaagggttccgggttttcaaagagatgcccttcacaaatccgttaacaaggtcctaccacacgtgggccaggccccagtcccagtggtgccccacaggcagcaggagttatagctccgttccagaagcttccccagctcatacctcaaggggaggtctggttatctctccagagagcctctctccacctgtcagagagctgtatcaccggctgaagcacttcatggagcaacgtgtgtaccctgcagagccagagctgcagagtcaccaggcctcagcagccaggtggagcccctccccactgatcgaagacctcaaggagaaagccaaagctgaaggactttggaaccttttcctacccttagaggctgatcccgagaaaaaatacggagcaggactgaccaatgtggaatatgcacatctgtgtgagctcatgggcacgtccctgtatgcccccgaggtatgtaactgctctgcgcctgacacgggcaacatggagctgctggtgaggtatggcaccgaagcgcagaaggctcgctggctgattcctctgctggaggggaaagcccgctcctgttttgctatgaccgagccccaggttgcctcttcagatgccaccaacattgaggcttccatcagagaggaggacagcttctatgtcataaacggtcacaaatggtggatcacaggcatcctggatcctcgttgccaactctgtgtgtttatgggaaaaacagacccacatgcaccaagacaccggcagcagtctgtgctcttggttcccatggataccccagggataaaaatcatccggcctctgacggtgtatggactggaagatgcaccaggtggccatggtgaagtccgatttgagcacgtgcgtgtgcccaaagagaacatggtcctgggccctggccgaggctttgagatcgcccagggcagactgggccccggcaggatccatcactgcatgaggctgatcgggttctcagagagggccctggcactcatgaaggcccgcgtgaagtcccgcttggcttttgggaagcccctggtggagcagggcacagtgctggcggacatcgcacagtcgcgcgtggagattgagcaggcacggctgctggtgctgagagctgcccacctcatggacctggcaggaaacaaggctgcagccttggatatagccatgattaaaatggtcgccccgtccatggcctcccgagtgattgatcgtgcgattcagaagacgtctctgcaagaagcctggagtctgtttcaggccaggaggaggggatttgctgagggccaagggggttctgggacagagtctggaaagctggtcttcaggctctcagtcccaggctgggcaggcacggtcacttcacttcagcctttcagtccctctctctctgcctgtgggaatctggacacattttgggaggcctcccaaggctgtgggacgtgcttgctctggcagctgcagggttcctgtctggcctccctggtgagcagaggggcggccacggcgggcggtggcctagagacccaggacctgggcgcctgggaaaatggaatgcaacccacattgtaaagccactggcatctgattatctccatttgaacacacagcacagaacaatcatttaaatgttattttggaaaggggttttggggacacagaagaataagtaaacacatctcggaggcaatgtggaat

SEQ ID NO: 295998 - DNA, 4016 bp, Homo sapiens
actgctcttccggacgcaattttgaggaggtcggagcggaaggacgtcgtggagattgcttgcgctggggtgccacacttaggctgagctgcaggttttcgcacagtcgcgagttaacctctgcttgctccagaggcctcgtcctaatccacctcggctgacggcgcgggatccctggctccgcgagcctcagcctcaccatgtgtgtcaggagctgtttccagtccccccgtctccagtgggtgtggagaacagccttcctgaaacacacccagcgcaggcaccaggggtcccaccgatggacacaccttggaggcagcacctacagagcggtgattttcgacatgggcggagttctcattccttctccagggagagtcgctgcagaatgggaggtacagaatcgtatcccttctggaactatattaaaggccttgatggaaggtggtgaaaatgggccctggatgagatttatgagagcagaaataacagcagagggttttttacgagaatttgggagactttgctctgaaatgttaaagacctccgtgcctgtggactcatttttctctctgttgaccagtgagcgagtggcaaagcagttcccagtgatgactgaggccataactcaaattcgggcaaaaggtcttcagactgcagtcttgagcaataatttttatcttcccaaccagaaaagctttttgcccctggaccggaaacagtttgatgtgattgtggagtcctgcatggaagggatctgtaagccagaccctaggatctacaagctgtgcttggagcagctcggcctgcagccctctgagtccatctttcttgatgaccttggaacaaatctaaaagaagctgccagacttggtattcacaccattaaggttaatgacccagagactgcagtaaaggaattagaagctctcttgggttttacattgagagtaggtgttccaaacactcggcctgtgaaaaagacgatggaaattccgaaagattccttgcagaagtacctcaaagacttactgggtatccagaccacaggcccattggaactacttcagtttgatcacgggcagtcaaatccaacttactacatcaggctggctaatcgtgatctagttctgaggaagaagcccccagggacactccttccatctgcccatgccatagagagggagttcaggattatgaaagcccttgcaaatgctggagtacctgtccctaacgttcttgatctctgtgaagattcaagtgtcattggcacccccttctatgtgatggagtactgcccaggtctcatctacaaagacccttccctgccaggcttggagcccagccacagacgagccatatacactgccatgaacacagtcctgtgcaaaattcacagtgtggatctgcaggctgtgggacttgaagactatgggaagcaaggggactatattccacgccaggtacgaacctgggttaagcagtatcgagcttccgaaactagcaccatcccagccatggagaggctgatcgaatggctgcccctccatcttccccgtcagcagaggaccacagtggtgcacggggacttcaggctcgacaacctggtgtttcatccagaagagccagaggtgcttgctgtccttgactgggaactttctaccttgggcgacccccttgctgatgtggcctacagctgcctggctcattacctgccatccagttttcccgtgctgagaggtattaatgactgtgacttgacacagctgggaatccctgctgcagaggagtatttcaggatgtactgtctccaaatggggctccctcccactgagaactggaacttctatatggctttttcctttttccgtgtggctgcaatcctacagggagtctacaagcgatcactcacagggcaagcaagctccacatatgcggaacaaactggaaagctgaccgaatttgtgtctaacctggcgtgggatttcgcagtcaaagaagggttccgggttttcaaagagatgcccttcacaaatccgttaacaaggtcctaccacacgtgggccaggccccagtcccagtggtgccccacaggcagcaggagttatagctccgttccagaagcttccccagctcatacctcaaggggaggtctggttatctctccagagagcctctctccacctgtcagagagctgtatcaccggctgaagcacttcatggagcaacgtgtgtaccctgcagagccagagctgcagagtcaccaggcctcagcagccaggtggagcccctccccactgatcgaagacctcaaggagaaagccaaagctgaaggactttggaaccttttcctacccttagaggctgatcccgagaaaaaatacggagcaggactgaccaatgtggaatatgcacatctgtgtgagctcatgggcacgtccctgtatgcccccgaggtatgtaactgctctgcgcctgacacgggcaacatggagctgctggtgaggtatggcaccgaagcgcagaaggctcgctggctgattcctctgctggaggggaaagcccgctcctgttttgctatgaccgagccccaggttgcctcttcagatgccaccaacattgaggcttccatcagagaggaggacagcttctatgtcataaacggtcacaaatggtggatcacaggcatcctggatcctcgttgccaactctgtgtgtttatgggaaaaacagacccacatgcaccaagacaccggcagcagtctgtgctcttggttcccatggataccccagggataaaaatcatccggcctctgacggtgtatggactggaagatgcaccaggtggccatggtgaagtccgatttgagcacgtgcgtgtgcccaaagagaacatggtcctgggccctggccgaggctttgagatcgcccagggcagactgggccccggcaggatccatcactgcatgaggctgatcgggttctcagagagggccctggcactcatgaaggcccgcgtgaagtcccgcttggcttttgggaagcccctggtggagcagggcacagtgctggcggacatcgcacagtcgcgcgtggagattgagcaggcacggctgctggtgctgagagctgcccacctcatggacctggcaggaaacaaggctgcagccttggatatagccatgattaaaatggtcgccccgtccatggcctcccgagtgattgatcgtgcgattcaggcctttggagcagcaggcctgagcagcgactacccactggctcagttcttcacctgggcccgagccctgcgctttgccgacggccctgacgaggtgcaccgggccacggtggccaagctagagctgaagcaccgcatttagagccttggggctgcagtggctcaatgtcctggctggtccagctgtgcccagatctgtcactgatgtgcctcgaaagatccggtgtttgtggctcctgcaccctgctcagcagctctgtcccgggacagtcagggtggactcaatctttctggttctccacagaagacgtctctgcaagaagcctggagtctgtttcaggccaggaggaggggatttgctgagggccaagggggttctgggacagagtctggaaagctggtcttcaggctctcagtcccaggctgggcaggcacggtcacttcacttcagcctttcagtccctctctctctgcctgtgggaatctggacacattttgggaggcctcccaaggctgtgggacgtgcttgctctggcagctgcagggttcctgtctggcctccctggtgagcagaggggcggccacggcgggcggtggcctagagacccaggacctgggcgcctgggaaaatggaatgcaacccacattgtaaagccactggcatctgattatctccatttgaacacacagcacagaacaatcatttaaatgttattttggaaaggggttttggggacacagaagaataagtaaacacatctcggaggcaatgtggaat

SEQ ID NO: 295999 - DNA, 3242 bp, Homo sapiens
actgctcttccggacgcaattttgaggaggtcggagcggaaggacgtcgtggagattgcttgcgctggggtgccacacttaggctgagctgcaggttttcgcacagtcgcgagttaacctctgcttgctccagaggcctcgtcctaatccacctcggctgacggcgcgggatccctggctccgcgagcctcagcctcaccatgtgtgtcaggagctgtttccagtccccccgtctccagtgggtgtggagaacagccttcctgaaacacacccagcgcaggcaccaggggtcccaccgatggacacaccttggaggcagcacctacagagcggtgattttcgacatgggcggagttctcattccttctccagggagagtcgctgcagaatgggaggtacagaatcgtatcccttctggaactatattaaaggccttgatggaaggtggtgaaaatgggccctggatgagatttatgagagcagaaataacagcagagggttttttacgagaatttgggagactttgctctgaaatgttaaagacctccgtgcctgtggactcatttttctctctgttgaccagtgagcgagtggcaaagcagttcccagtgatgactgaggccataactcaaattcgggcaaaaggtcttcagactgcagtcttgagcaataatttttatcttcccaaccagaaaagctttttgcccctggaccggaaacagtttgatgtgattgtggagtcctgcatggaagggatctgtaagccagaccctaggatctacaagctgtgcttggagcagctcggcctgcagccctctgagtccatctttcttgatgaccttggaacaaatctaaaagaagctgccagacttggtattcacaccattaaggttaatgacccagagactgcagtaaaggaattagaagctctcttgggttttacattgagagtaggtgttccaaacactcggcctgtgaaaaagacgatggaaattccgaaagattccttgcagaagtacctcaaagacttactgggtatccagaccacaggcccattggaactacttcagtttgatcacgggcagtcaaatccaacttactacatcaggctggctaatcgtgatctagttctgaggaagaagcccccagggacactccttccatctgcccatgccatagagagggagttcaggattatgaaagcccttgcaaatgctggagtacctgtccctaacgttcttgatctctgtgaagattcaagtgtcattggcacccccttctatgtgatggagtactgcccaggtctcatctacaaagacccttccctgccaggcttggagcccagccacagacgagccatatacactgccatgaacacagtcctgtgcaaaattcacagtgtggatctgcaggctgtgggacttgaagactatgggaagcaagggcaagcaagctccacatatgcggaacaaactggaaagctgaccgaatttgtgtctaacctggcgtgggatttcgcagtcaaagaagggttccgggttttcaaagagatgcccttcacaaatccgttaacaaggtcctaccacacgtgggccaggccccagtcccagtggtgccccacaggcagcaggagttatagctccgttccagaagcttccccagctcatacctcaaggggaggtctggttatctctccagagagcctctctccacctgtcagagagctgtatcaccggctgaagcacttcatggagcaacgtgtgtaccctgcagagccagagctgcagagtcaccaggcctcagcagccaggtggagcccctccccactgatcgaagacctcaaggagaaagccaaagctgaaggactttggaaccttttcctacccttagaggctgatcccgagaaaaaatacggagcaggactgaccaatgtggaatatgcacatctgtgtgagctcatgggcacgtccctgtatgcccccgaggtatgtaactgctctgcgcctgacacgggcaacatggagctgctggtgaggtatggcaccgaagcgcagaaggctcgctggctgattcctctgctggaggggaaagcccgctcctgttttgctatgaccgagccccaggttgcctcttcagatgccaccaacattgaggcttccatcagagaggaggacagcttctatgtcataaacggtcacaaatggtggatcacaggcatcctggatcctcgttgccaactctgtgtgtttatgggaaaaacagacccacatgcaccaagacaccggcagcagtctgtgctcttggttcccatggataccccagggataaaaatcatccggcctctgacggtgtatggactggaagatgcaccaggtggccatggtgaagtccgatttgagcacgtgcgtgtgcccaaagagaacatggtcctgggccctggccgaggctttgagatcgcccagggcagactgggccccggcaggatccatcactgcatgaggctgatcgggttctcagagagggccctggcactcatgaaggcccgcgtgaagtcccgcttggcttttgggaagcccctggtggagcagggcacagtgctggcggacatcgcacagtcgcgcgtggagattgagcaggcacggctgctggtgctgagagctgcccacctcatggacctggcaggaaacaaggctgcagccttggatatagccatgattaaaatggtcgccccgtccatggcctcccgagtgattgatcgtgcgattcagaagacgtctctgcaagaagcctggagtctgtttcaggccaggaggaggggatttgctgagggccaagggggttctgggacagagtctggaaagctggtcttcaggctctcagtcccaggctgggcaggcacggtcacttcacttcagcctttcagtccctctctctctgcctgtgggaatctggacacattttgggaggcctcccaaggctgtgggacgtgcttgctctggcagctgcagggttcctgtctggcctccctggtgagcagaggggcggccacggcgggcggtggcctagagacccaggacctgggcgcctgggaaaatggaatgcaacccacattgtaaagccactggcatctgattatctccatttgaacacacagcacagaacaatcatttaaatgttattttggaaaggggttttggggacacagaagaataagtaaacacatctcggaggcaatgtggaat

SEQ ID NO: 296000 - DNA, 2966 bp, Homo sapiens
actgctcttccggacgcaattttgaggaggtcggagcggaaggacgtcgtggagattgcttgcgctggggtgccacacttaggctgagctgcaggttttcgcacagtcgcgagttaacctctgcttgctccagaggcctcgtcctaatccacctcggctgacggcgcgggatccctggctccgcgagcctcagcctcaccatgtgtgtcaggagctgtttccagtccccccgtctccagtgggtgtggagaacagccttcctgaaacacacccagcgcaggcaccaggggtcccaccgatggacacaccttggaggcagcacctacagagcggtgattttcgacatgggcggagttctcattccttctccagggagagtcgctgcagaatgggaggtacagaatcgtatcccttctggaactatattaaaggccttgatggaaggtggtgaaaatgggccctggatgagatttatgagagcagaaataacagcagagggttttttacgagaatttgggagactttgctctgaaatgttaaagacctccgtgcctgtggactcatttttctctctgttgaccagtgagcgagtggcaaagcagttcccagtgatgactgaggccataactcaaattcgggcaaaaggtcttcagactgcagtcttgagcaataatttttatcttcccaaccagaaaagctttttgcccctggaccggaaacagtttgatgtgattgtggagtcctgcatggaagggatctgtaagccagaccctaggatctacaagctgtgcttggagcagctcggcctgcagccctctgagtccatctttcttgatgaccttggaacaaatctaaaagaagctgccagacttggtattcacaccattaaggttaatgacccagagactgcagtaaaggaattagaagctctcttgggttttacattgagagtaggtgttccaaacactcggcctgtgaaaaagacgatggaaattccgaaagattccttgcagaagtacctcaaagacttactgggtatccagaccacaggcccattggaactacttcagtttgatcacgggcagtcaaatccaacttactacatcaggctggctaatcgtgatctagttctgaggaagaagcccccagggacactccttccatctgcccatgccatagagagggagttcaggattatgaaagcccttgcaaatgctggagtacctgtccctaacgttcttgatctctgtgaagattcaagtgtcattggcacccccttctatgtgatggagtactgcccaggtctcatctacaaagacccttccctgccaggcttggagcccagccacagacgagccatatacactgccatgaacacagtcctgtgcaaaattcacagtgtggatctgcaggctgtgggacttgaagactatgggaagcaaggggactatattccacgccaggtacgaacctgggttaagcagtatcgagcttccgaaactagcaccatcccagccatggagaggctgatcgaatggctgcccctccatcttccccgtcagcagaggaccacagtggtgcacggggacttcagatcacgccactgcactccagcctgcgcaacaaagtgagaccccgtctccaaaaaaataataaaaaaaagaaggaaaaagaataaataaaacaagaaaaaaaaaggaatacttagaaccttttctgatgccttgtgactttcagaatttaaaatcccccttgcagataaggccacccacggcggaaggccgggagcgagacggggctgaggggaccttgctcccattggagctgcagggcaggaaggggtgctgcggtcagcagagggcacccttcgcctgcgccgtgtgcagtgcctgcagtcactccctcattcccaggagtagccttgggtcagatgctggctcagatctataactgctcctgtctggtagccaggcctgcccagatgtgcaatggctggaataaagggttcttggaagcaatttgttacaggcaccctgtgggctgtggctggctgtggcacacgtgaaggttgtgtgtcagacctactccctggacatggcgcatggctgcacacaggcaccttggctgagaagatgcacagtcctggtttcactctcctcccctgccctgtcctgtctgcttccacccagctctgcaggccaccagcccccgcctctcgtggccacccccagcccagcatgtcctcagccgcacatctcctgtgtcgacaggtgaagtcccgcttggcttttgggaagcccctggtggagcagggcacagtgctggcggacatcgcacagtcgcgcgtggagattgagcaggcacggctgctggtgctgagagctgcccacctcatggacctggcaggaaacaaggctgcagccttggatatagccatgattaaaatggtcgccccgtccatggcctcccgagtgattgatcgtgcgattcagaagacgtctctgcaagaagcctggagtctgtttcaggccaggaggaggggatttgctgagggccaagggggttctgggacagagtctggaaagctggtcttcaggctctcagtcccaggctgggcaggcacggtcacttcacttcagcctttcagtccctctctctctgcctgtgggaatctggacacattttgggaggcctcccaaggctgtgggacgtgcttgctctggcagctgcagggttcctgtctggcctccctggtgagcagaggggcggccacggcgggcggtggcctagagacccaggacctgggcgcctgggaaaatggaatgcaacccacattgtaaagccactggcatctgattatctccatttgaacacacagcacagaacaatcatttaaatgttattttggaaaggggttttggggacacagaagaataagtaaacacatctcggaggcaatgtggaat

SEQ ID NO: 296001 - DNA, 2307 bp, Homo sapiens
caaatagtgagctgagtgatgctggtgttgattccctccagagacagtggtgtctagaagttggctcttcctttagtcagttgtggcattgctgttatcaattttgtagcaagggtggtctaggatgcaggacttcttatagcccactggcaacggcagaggtgatctggggtgttactgattaaatgtagtcttttaggaaagcagagatcaagagcagggagcaggcagacctaagttggactctggcccccagccccctaacttccagctcgtccaagtcacctccttctctaagactcagttttcttgcgtgcaaagtgcaggtgaaagcagttgtattgctttggggattcagtgagctatagtggctcttagcacagtgtttggtacttagcaagtgctcagcaaatggcaatagctgctgaagtgacagtgtcatcacatgttaacatccctatgatgggtcgtgtgggagtaatcactgtttttctttgattctgcttagggcaagcaagctccacatatgcggaacaaactggaaagctgaccgaatttgtgtctaacctggcgtgggatttcgcagtcaaagaagggttccgggttttcaaagagatgcccttcacaaatccgttaacaaggtcctaccacacgtgggccaggccccagtcccagtggtgccccacaggcagcaggagttatagctccgttccagaagcttccccagctcatacctcaaggggaggtctggttatctctccagagagcctctctccacctgtcagagagctgtatcaccggctgaagcacttcatggagcaacgtgtgtaccctgcagagccagagctgcagagtcaccaggcctcagcagccaggtggagcccctccccactgatcgaagacctcaaggagaaagccaaagctgaaggactttggaaccttttcctacccttagaggctgatcccgagaaaaaatacggagcaggactgaccaatgtggaatatgcacatctgtgtgagctcatgggcacgtccctgtatgcccccgaggtatgtaactgctctgcgcctgacacgggcaacatggagctgctggtgaggtatggcaccgaagcgcagaaggctcgctggctgattcctctgctggaggggaaagcccgctcctgttttgctatgaccgagccccaggttgcctcttcagatgccaccaacattgaggcttccatcagagaggaggacagcttctatgtcataaacggtcacaaatggtggatcacaggcatcctggatcctcgttgccaactctgtgtgtttatgggaaaaacagacccacatgcaccaagacaccggcagcagtctgtgctcttggttcccatggataccccagggataaaaatcatccggcctctgacggtgtatggactggaagatgcaccaggtggccatggtgaagtccgatttgagcacgtgcgtgtgcccaaagagaacatggtcctgggccctggccgaggctttgagatcgcccagggcagactgggccccggcaggatccatcactgcatgaggctgatcgggttctcagagagggccctggcactcatgaaggcccgcgtgaagtcccgcttggcttttgggaagcccctggtggagcagggcacagtgctggcggacatcgcacagtcgcgcgtggagattgagcaggcacggctgctggtgctgagagctgcccacctcatggacctggcaggaaacaaggctgcagccttggatatagccatgattaaaatggtcgccccgtccatggcctcccgagtgattgatcgtgcgattcagaagacgtctctgcaagaagcctggagtctgtttcaggccaggaggaggggatttgctgagggccaagggggttctgggacagagtctggaaagctggtcttcaggctctcagtcccaggctgggcaggcacggtcacttcacttcagcctttcagtccctctctctctgcctgtgggaatctggacacattttgggaggcctcccaaggctgtgggacgtgcttgctctggcagctgcagggttcctgtctggcctccctggtgagcagaggggcggccacggcgggcggtggcctagagacccaggacctgggcgcctgggaaaatggaatgcaacccacattgtaaagccactggcatctgattatctccatttgaacacacagcacagaacaatcatttaaatgttattttggaaaggggttttggggacacagaagaataagtaaacacatctcggaggcaatgtggaat

SEQ ID NO: 296002 - DNA, 1440 bp, Homo sapiens
cagctactcaggtggctgaggtaggaagattgcttgagcccgggaggcggaggttgcagtgagccaagatcacgccactgcactccagcctgcgcaacaaagtgagaccccgtctccaaaaaaataataaaaaaaagaaggaaaaagaataaataaaacaagaaaaaaaaaggaatacttagaaccttttctgatgccttgtgactttcagaatttaaaatcccccttgcagataaggccacccacggcggaaggccgggagcgagacggggctgaggggaccttgctcccattggagctgcagggcaggaaggggtgctgcggtcagcagagggcacccttcgcctgcgccgtgtgcagtgcctgcagtcactccctcattcccaggagtagccttgggtcagatgctggctcagatctataactgctcctgtctggtagccaggcctgcccagatgtgcaatggctggaataaagggttcttggaagcaatttgttacaggcaccctgtgggctgtggctggctgtggcacacgtgaaggttgtgtgtcagacctactccctggacatggcgcatggctgcacacaggcaccttggctgagaagatgcacagtcctggtttcactctcctcccctgccctgtcctgtctgcttccacccagctctgcaggccaccagcccccgcctctcgtggccacccccagcccagcatgtcctcagccgcacatctcctgtgtcgacaggtgaagtcccgcttggcttttgggaagcccctggtggagcagggcacagtgctggcggacatcgcacagtcgcgcgtggagattgagcaggcacggctgctggtgctgagagctgcccacctcatggacctggcaggaaacaaggctgcagccttggatatagccatgattaaaatggtcgccccgtccatggcctcccgagtgattgatcgtgcgattcagaagacgtctctgcaagaagcctggagtctgtttcaggccaggaggaggggatttgctgagggccaagggggttctgggacagagtctggaaagctggtcttcaggctctcagtcccaggctgggcaggcacggtcacttcacttcagcctttcagtccctctctctctgcctgtgggaatctggacacattttgggaggcctcccaaggctgtgggacgtgcttgctctggcagctgcagggttcctgtctggcctccctggtgagcagaggggcggccacggcgggcggtggcctagagacccaggacctgggcgcctgggaaaatggaatgcaacccacattgtaaagccactggcatctgattatctccatttgaacacacagcacagaacaatcatttaaatgttattttggaaaggggttttggggacacagaagaataagtaaacacatctcggaggcaatgtggaat

SEQ ID NO: 296003 - DNA, 1296 bp, Homo sapiens
caggaagtggaccccaaacctactcttccaggccccagtgtgaacagctgacctctaggccacagccctggtttggtccgctcccagtttggttctctgctaatagtgttcacatttttactttcagtgttttcataggatcactacattgtcacaaaccactaggagcttcagcttaaggtggcattattatgtttttataaaaggaatcacagaatagtcatttgccattataaatcagtgattcattttctgtgtttaacaggctgtttcctgccgtccttttccctttaaccatgtcccagtaagaaggctaaataaagggcagggacattgccagcagataacccagactgaggtgaggaataaacacatccaaggaaaatgactatggctattgctcacagtgatcgtttgggtctttcaggtggccatggtgaagtccgatttgagcacgtgcgtgtgcccaaagagaacatggtcctgggccctggccgaggctttgagatcgcccagggcagactgggccccggcaggatccatcactgcatgaggctgatcgggttctcagagagggccctggcactcatgaaggcccgcgtgaagtcccgcttggcttttgggaagcccctggtggagcagggcacagtgctggcggacatcgcacagtcgcgcgtggagattgagcaggcacggctgctggtgctgagagctgcccacctcatggacctggcaggaaacaaggctgcagccttggatatagccatgattaaaatggtcgccccgtccatggcctcccgagtgattgatcgtgcgattcagaagacgtctctgcaagaagcctggagtctgtttcaggccaggaggaggggatttgctgagggccaagggggttctgggacagagtctggaaagctggtcttcaggctctcagtcccaggctgggcaggcacggtcacttcacttcagcctttcagtccctctctctctgcctgtgggaatctggacacattttgggaggcctcccaaggctgtgggacgtgcttgctctggcagctgcagggttcctgtctggcctccctggtgagcagaggggcggccacggcgggcggtggcctagagacccaggacctgggcgcctgggaaaatggaatgcaacccacattgtaaagccactggcatctgattatctccatttgaacacacagcacagaacaatcatttaaatgttattttggaaaggggttttggggacacagaagaataagtaaacacatctcggaggcaatgtggaat

SEQ ID NO: 296004 - DNA, 3314 bp, Homo sapiens
actgctcttccggacgcaattttgaggaggtcggagcggaaggacgtcgtggagattgcttgcgctggggtgccacacttaggctgagctgcaggttttcgcacagtcgcgagttaacctctgcttgctccagaggcctcgtcctaatccacctcggctgacggcgcgggatccctggctccgcgagcctcagcctcaccatgtgtgtcaggagctgtttccagtccccccgtctccagtgggtgtggagaacagccttcctgaaacacacccagcgcaggcaccaggggtcccaccgatggacacaccttggaggcagcacctacagagcggtgattttcgacatgggcggagttctcattccttctccagggagagtcgctgcagaatgggaggtacagaatcgtatcccttctggaactatattaaaggccttgatggaaggtggtgaaaatgggccctggatgagatttatgagagcagaaataacagcagagggttttttacgagaatttgggagactttgctctgaaatgttaaagacctccgtgcctgtggactcatttttctctctgttgaccagtgagcgagtggcaaagcagttcccagtgatgactgaggccataactcaaattcgggcaaaaggtcttcagactgcagtcttgagcaataatttttatcttcccaaccagaaaagctttttgcccctggaccggaaacagtttgatgtgattgtggagtcctgcatggaagggatctgtaagccagaccctaggatctacaagctgtgcttggagcagctcggcctgcagccctctgagtccatctttcttgatgaccttggaacaaatctaaaagaagctgccagacttggtattcacaccattaaggttaatgacccagagactgcagtaaaggaattagaagctctcttgggttttacattgagagtaggtgttccaaacactcggcctgtgaaaaagacgatggaaattccgaaagattccttgcagaagtacctcaaagacttactgggtatccagaccacaggcccattggaactacttcagtttgatcacgggcagtcaaatccaacttactacatcaggctggctaatcgtgatctagttctgaggaagaagcccccagggacactccttccatctgcccatgccatagagagggagttcaggattatgaaagcccttgcaaatgctggagtacctgtccctaacgttcttgatctctgtgaagattcaagtgtcattggcacccccttctatgtgatggagtactgcccaggtctcatctacaaagacccttccctgccaggcttggagcccagccacagacgagccatatacactgccatgaacacagtcctgtgcaaaattcacagtgtggatctgcaggctgtgggacttgaagactatgggaagcaaggggactatattccacgccaggtacgaacctgggttaagcagtatcgagcttccgaaactagcaccatcccagccatggagaggctgatcgaatggctgcccctccatcttccccgtcagcagaggaccacagtggtgcacggggacttcaggctcgacaacctggtgtttcatccagaagagccagaggtgcttgctgtccttgactgggaactttctaccttgggcgacccccttgctgatgtggcctacagctgcctggctcattacctgccatccagttttcccgtgctgagaggtattaatgactgtgacttgacacagctgggaatccctgctgcagaggagtatttcaggatgtactgtctccaaatggggctccctcccactgagaactggaacttctatatggctttttcctttttccgtgtggctgcaatcctacagggagtctacaagcgatcactcacagggcaagcaagctccacatatgcggaacaaactggaaagctgaccgaatttgtgtctaacctggcgtgggatttcgcagtcaaagaagggttccgggttttcaaagagatgcccttcacaaatccgttaacaaggtcctaccacacgtgggccaggccccagtcccagtggtgccccacaggcagcaggagttatagctccgttccagaagcttccccagctcatacctcaaggggaggtctggttatctctccagagagcctctctccacctgtcagagagctgtatcaccggctgaagcacttcatggagcaacgtgtgtaccctgcagagccagagctgcagagtcaccaggcctcagcagccaggtggagcccctccccactgatcgaagacctcaaggagaaagccaaagctgaaggactttggaaccttttcctacccttagaggctgatcccgagaaaaaatacggagcaggactgaccaatgtggaatatgcacatctgtgtgagctcatgggcacgtccctgtatgcccccgaggtatgtaactgctctgcgcctgacacgggcaacatggagctgctggtgaggtatggcaccgaagcgcagaaggctcgctggctgattcctctgctggaggggaaagcccgctcctgttttgctatgaccgagccccaggttgcctcttcagatgccaccaacattgaggcttccatcagagaggaggacagcttctatgtcataaacggtcacaaatggtggatcacaggcatcctggatcctcgttgccaactctgtgtgtttatgggaaaaacagacccacatgcaccaagacaccggcagcagtctgtgctcttggttcccatggataccccagggataaaaatcatccggcctctgacggtgtatggactggaagatgcaccaggtggccatggtgaagtccgatttgagcacgtgcgtgtgcccaaagagaacatggtcctgggccctggccgaggctttgagatcgcccagggcagactgggccccggcaggatccatcactgcatgaggctgatcgggttctcagagagggccctggcactcatgaaggcccgctaaaacgctcctgtctatggactcaggtatggtgcttcagccccacatggaattaaattcagccttctggcagaataattggactgaatgagtcagacagaagtctccagaaagtgcatagcatgaacatggcacctccactgaagacttggttggagtaattaggaatctacaaaagatttgctacaaggaggttcaccacagtgcttattgaaatagcaaaattctgaacaacctataaggctaacaatgactgttggccaaataaaacacaagatggcatacagtgagacttta

SEQ ID NO: 296005 - DNA, 2814 bp, Homo sapiens
actgctcttccggacgcaattttgaggaggtcggagcggaaggacgtcgtggagattgcttgcgctggggtgccacacttaggctgagctgcaggttttcgcacagtcgcgagttaacctctgcttgctccagaggcctcgtcctaatccacctcggctgacggcgcgggatccctggctccgcgagcctcagcctcaccatgtgtgtcaggagctgtttccagtccccccgtctccagtgggtgtggagaacagccttcctgaaacacacccagcgcaggcaccaggggtcccaccgatggacacaccttggaggcagcacctacagagcggtgattttcgacatgggcggagttctcattccttctccagggagagtcgctgcagaatgggaggtacagaatcgtatcccttctggaactatattaaaggccttgatggaaggtggtgaaaatgggccctggatgagatttatgagagcagaaataacagcagagggttttttacgagaatttgggagactttgctctgaaatgttaaagacctccgtgcctgtggactcatttttctctctgttgaccagtgagcgagtggcaaagcagttcccagtgatgactgaggccataactcaaattcgggcaaaaggtcttcagactgcagtcttgagcaataatttttatcttcccaaccagaaaagctttttgcccctggaccggaaacagtttgatgtgattgtggagtcctgcatggaagggatctgtaagccagaccctaggatctacaagctgtgcttggagcagctcggcctgcagccctctgagtccatctttcttgatgaccttggaacaaatctaaaagaagctgccagacttggtattcacaccattaaggttaatgacccagagactgcagtaaaggaattagaagctctcttgggttttacattgagagtaggtgttccaaacactcggcctgtgaaaaagacgatggaaattccgaaagattccttgcagaagtacctcaaagacttactgggtatccagaccacaggcccattggaactacttcagtttgatcacgggcagtcaaatccaacttactacatcaggctggctaatcgtgatctagttctgaggaagaagcccccagggacactccttccatctgcccatgccatagagagggagttcaggattatgaaagcccttgcaaatgctggagtacctgtccctaacgttcttgatctctgtgaagattcaagtgtcattggcacccccttctatgtgatggagtactgcccaggtctcatctacaaagacccttccctgccaggcttggagcccagccacagacgagccatatacactgccatgaacacagtcctgtgcaaaattcacagtgtggatctgcaggctgtgggacttgaagactatgggaagcaaggggactatattccacgccaggtacgaacctgggttaagcagtatcgagcttccgaaactagcaccatcccagccatggagaggctgatcgaatggctgcccctccatcttccccgtcagcagaggaccacagtggtgcacggggacttcaggctcgacaacctggtgtttcatccagaagagccagaggtgcttgctgtccttgactgggaactttctaccttgggcgacccccttgctgatgtggcctacagctgcctggctcattacctgccatccagttttcccgtgctgagaggtattaatgactgtgacttgacacagctgggaatccctgctgcagaggagtatttcaggatgtactgtctccaaatggggctccctcccactgagaactggaacttctatatggctttttcctttttccgtgtggctgcaatcctacagggagtctacaagcgatcactcacagggcaagcaagctccacatatgcggaacaaactggaaagctgaccgaatttgtgtctaacctggcgtgggatttcgcagtcaaagaagggttccgggttttcaaagagatgcccttcacaaatccgttaacaaggtcctaccacacgtgggccaggccccagtcccagtggtgccccacaggcagcaggagttatagctccgttccagaagcttccccagctcatacctcaaggggaggtctggttatctctccagagagcctctctccacctgtcagagagctgtatcaccggctgaagcacttcatggagcaacgtgtgtaccctgcagagccagagctgcagagtcaccaggcctcagcagccaggtggagcccctccccactgatcgaagacctcaaggtaaagcagccatggtgaggtggtaagaccccaataccatggcataccctccccgaccccaccgggctcacctgaaccatcccaggcagtgaagatacaggagctccgagttgaatgatctttgcttccatcgtctcagaaagagccagctcttcatgactcagtttccatctcttgctcttgctgtgcctgtgtcacaggcagatggctcaggtgtgactgcacagcccaggcagtggaatgcttggccttagaaagccagggcaggttaggcctatctgatgggtatttgaattatgtaaatttgaaacagtgctgtatcagctaataaatctctctctagagaacccgtaatatcacagctagagggccagatccactgtgagctgagtttctgtgttgtctcccagtgctgtcacttcagctgataaacagaaacacccgctgttccttatcacgtgaaccttggattgtgttagttttgaaattacttgagatc

SEQ ID NO: 296006 - DNA, 3671 bp, Homo sapiens
actgctcttccggacgcaattttgaggaggtcggagcggaaggacgtcgtggagattgcttgcgctggggtgccacacttaggctgagctgcaggttttcgcacagtcgcgagttaacctctgcttgctccagaggcctcgtcctaatccacctcggctgacggcgcgggatccctggctccgcgagcctcagcctcaccatgtgtgtcaggagctgtttccagtccccccgtctccagtgggtgtggagaacagccttcctgaaacacacccagcgcaggcaccaggggtcccaccgatggacacaccttggaggcagcacctacagagcggtgattttcgacatgggcggagttctcattccttctccagggagagtcgctgcagaatgggaggtacagaatcgtatcccttctggaactatattaaaggccttgatggaaggtggtgaaaatgggccctggatgagatttatgagagcagaaataacagcagagggttttttacgagaatttgggagactttgctctgaaatgttaaagacctccgtgcctgtggactcatttttctctctgttgaccagtgagcgagtggcaaagcagttcccagtgatgactgaggccataactcaaattcgggcaaaaggtcttcagactgcagtcttgagcaataatttttatcttcccaaccagaaaagctttttgcccctggaccggaaacagtttgatgtgattgtggagtcctgcatggaagggatctgtaagccagaccctaggatctacaagctgtgcttggagcagctcggcctgcagccctctgagtccatctttcttgatgaccttggaacaaatctaaaagaagctgccagacttggtattcacaccattaaggttaatgacccagagactgcagtaaaggaattagaagctctcttgggttttacattgagagtaggtgttccaaacactcggcctgtgaaaaagacgatggaaattccgaaagattccttgcagaagtacctcaaagacttactgggtatccagaccacaggcccattggaactacttcagtttgatcacgggcagtcaaatccaacttactacatcaggctggctaatcgtgatctagttctgaggaagaagcccccagggacactccttccatctgcccatgccatagagagggagttcaggattatgaaagcccttgcaaatgctggagtacctgtccctaacgttcttgatctctgtgaagattcaagtgtcattggcacccccttctatgtgatggagtactgcccaggtctcatctacaaagacccttccctgccaggcttggagcccagccacagacgagccatatacactgccatgaacacagtcctgtgcaaaattcacagtgtggatctgcaggctgtgggacttgaagactatgggaagcaaggggactatattccacgccaggtacgaacctgggttaagcagtatcgagcttccgaaactagcaccatcccagccatggagaggctgatcgaatggctgcccctccatcttccccgtcagcagaggaccacagtggtgcacggggacttcaggctcgacaacctggtgtttcatccagaagagccagaggtgcttgctgtccttgactgggaactttctaccttgggcgacccccttgctgatgtggcctacagctgcctggctcattacctgccatccagttttcccgtgctgagaggtattaatgactgtgacttgacacagctgggaatccctgctgcagaggagtatttcaggatgtactgtctccaaatggggctccctcccactgagaactggaacttctatatggctttttcctttttccgtgtggctgcaatcctacagggagtctacaagcgatcactcacagggcaagcaagctccacatatgcggaacaaactggaaagctgaccgaatttgtgtctaacctggcgtgggatttcgcagtcaaagaagggttccgggttttcaaagagatgcccttcacaaatccgttaacaaggtcctaccacacgtgggccaggccccagtcccagtggtgccccacaggcagcaggagttatagctccgttccagaagcttccccagctcatacctcaaggggaggtctggttatctctccagagagcctctctccacctgtcagagagctgtatcaccggctgaagcacttcatggagcaacgtgtgtaccctgcagagccagagctgcagagtcaccaggcctcagcagccaggtggagcccctccccactgatcgaagacctcaaggagaaagccaaagctgaaggactttggaaccttttcctacccttagaggctgatcccgagaaaaaatacggagcaggactgaccaatgtggaatatgcacatctgtgtgagctcatgggcacgtccctgtatgcccccgaggtatgtaactgctctgcgcctgacacgggcaacatggagctgctggtgaggtatggcaccgaagcgcagaaggctcgctggctgattcctctgctggaggggaaagcccgctcctgttttgctatgaccgagccccaggttgcctcttcagatgccaccaacattgaggcttccatcagagaggaggacagcttctatgtcataaacggtcacaaatggtggatcacaggcatcctggatcctcgttgccaactctgtgtgtttatgggaaaaacagacccacatgcaccaagacaccggcagcagtctgtgctcttggttcccatggataccccagggataaaaatcatccggcctctgacggtgtatggactggaagatgcaccaggtggccatggtgaagtccgatttgagcacgtgcgtgtgcccaaagagaacatggtcctgggccctggccgaggctttgagatcgcccagggcagactgggccccggcaggatccatcactgcatgaggctgatcgggttctcagagagggccctggcactcatgaaggcccgcgtgaagtcccgcttggcttttgggaagcccctggtggagcagggcacagtgctggcggacatcgcacagtcgcgcgtggagattgagcaggcacggctgctggtgctgagagctgcccacctcatggacctggcaggaaacaaggctgcagccttggatatagccatgattaaaatggtcgccccgtccatggcctcccgagtgattgatcgtgcgattcaggtgagcacagaccagacagttggcttatttgaaccatcaatactagatgccaaactctcctatcttcagccgcccagcctcccatagaccctggcagatgccctgtgtcacccactcaccatgcatgcaactttccttttcctcttcagaatgacccagcaaggtgggaggtgccatcgtacccccattttgaatgtgaggaaacaggcacagaaaagtgaagtgacttgtccaggtcactgagcttgcaagtagctgacctcaaattcacatgaacttgggttttcataagcccagagcccaggctctttcccatgcaggggggccgcctccttagatcctaacccccggccccagcacagggcagaaggcacctgcagagtgggcctggggagtctggaggccgtgggatggcaggtgtggccccatgga

SEQ ID NO: 296007 - DNA, 3388 bp, Homo sapiens
actgctcttccggacgcaattttgaggaggtcggagcggaaggacgtcgtggagattgcttgcgctggggtgccacacttaggctgagctgcaggttttcgcacagtcgcgagttaacctctgcttgctccagaggcctcgtcctaatccacctcggctgacggcgcgggatccctggctccgcgagcctcagcctcaccatgtgtgtcaggagctgtttccagtccccccgtctccagtgggtgtggagaacagccttcctgaaacacacccagcgcaggcaccaggggtcccaccgatggacacaccttggaggcagcacctacagagcggtgattttcgacatgggcggagttctcattccttctccagggagagtcgctgcagaatgggaggtacagaatcgtatcccttctggaactatattaaaggccttgatggaaggtggtgaaaatgggccctggatgagatttatgagagcagaaataacagcagagggttttttacgagaatttgggagactttgctctgaaatgttaaagacctccgtgcctgtggactcatttttctctctgttgaccagtgagcgagtggcaaagcagttcccagtgatgactgaggccataactcaaattcgggcaaaaggtcttcagactgcagtcttgagcaataatttttatcttcccaaccagaaaagctttttgcccctggaccggaaacagtttgatgtgattgtggagtcctgcatggaagggatctgtaagccagaccctaggatctacaagctgtgcttggagcagctcggcctgcagccctctgagtccatctttcttgatgaccttggaacaaatctaaaagaagctgccagacttggtattcacaccattaaggttaatgacccagagactgcagtaaaggaattagaagctctcttgggttttacattgagagtaggtgttccaaacactcggcctgtgaaaaagacgatggaaattccgaaagattccttgcagaagtacctcaaagacttactgggtatccagaccacaggcccattggaactacttcagtttgatcacgggcagtcaaatccaacttactacatcaggctggctaatcgtgatctagttctgaggaagaagcccccagggacactccttccatctgcccatgccatagagagggagttcaggattatgaaagcccttgcaaatgctggagtacctgtccctaacgttcttgatctctgtgaagattcaagtgtcattggcacccccttctatgtgatggagtactgcccaggtctcatctacaaagacccttccctgccaggcttggagcccagccacagacgagccatatacactgccatgaacacagtcctgtgcaaaattcacagtgtggatctgcaggctgtgggacttgaagactatgggaagcaaggggactatattccacgccaggtacgaacctgggttaagcagtatcgagcttccgaaactagcaccatcccagccatggagaggctgatcgaatggctgcccctccatcttccccgtcagcagaggaccacagtggtgcacggggacttcaggctcgacaacctggtgtttcatccagaagagccagaggtgcttgctgtccttgactgggaactttctaccttgggcgacccccttgctgatgtggcctacagctgcctggctcattacctgccatccagttttcccgtgctgagaggtattaatgactgtgacttgacacagctgggaatccctgctgcagaggagtatttcaggatgtactgtctccaaatggggctccctcccactgagaactggaacttctatatggctttttcctttttccgtgtggctgcaatcctacagggagtctacaagcgatcactcacagggcaagcaagctccacatatgcggaacaaactggaaagctgaccgaatttgtgtctaacctggcgtgggatttcgcagtcaaagaagggttccgggttttcaaagagatgcccttcacaaatccgttaacaaggtcctaccacacgtgggccaggccccagtcccagtggtgccccacaggcagcaggagttatagctccgttccagaagcttccccagctcatacctcaaggggaggtctggttatctctccagagagcctctctccacctgtcagagagctgtatcaccggctgaagcacttcatggagcaacgtgtgtaccctgcagagccagagctgcagagtcaccaggcctcagcagccaggtggagcccctccccactgatcgaagacctcaaggagaaagccaaagctgaaggactttggaaccttttcctacccttagaggctgatcccgagaaaaaatacggagcaggactgaccaatgtggaatatgcacatctgtgtgagctcatgggcacgtccctgtatgcccccgaggtatgtaactgctctgcgcctgacacgggcaacatggagctgctggtgaggtatggcaccgaagcgcagaaggctcgctggctgattcctctgctggaggggaaagcccgctcctgttttgctatgaccgagccccaggttgcctcttcagatgccaccaacattgaggcttccatcagagaggaggacagcttctatgtcataaacggtcacaaatggtggatcacaggcatcctggatcctcgttgccaactctgtgtgtttatgggaaaaacagacccacatgcaccaagacaccggcagcagtctgtgctcttggttcccatggataccccagggataaaaatcatccggcctctgacggtgtatggactggaagatgcaccaggtggccatggtgaagtccgatttgagcacgtgcgtgtgcccaaagagaacatggtcctgggccctggccgaggctttgagatcgcccagggcagactgggccccggcaggatccatcactgcatgaggctgatcgggttctcagagagggccctggcactcatgaaggcccgctaaaacgctcctgtctatggactcaggtatggtgcttcagccccacatggaattaaattcagccttctggcagaataattggactgaatgagtcagacagaagtctccagaaagtgcatagcatgaacatggcacctccactgaagacttggttggagtaattaggaatctacaaaagatttgctacaaggaggttcaccacagtgcttattgaaatagcaaaattctgaacaacctataaggctaacaatgactgttggccaaataaaacacaagatggcatacagtgagactttaaatgatgctgtggaaatctattccttaacatggagaaattgctcactatatacacttaaatttaaaaaaaaaaa

SEQ ID NO: 296008 - DNA, 2924 bp, Homo sapiens
actgctcttccggacgcaattttgaggaggtcggagcggaaggacgtcgtggagattgcttgcgctggggtgccacacttaggctgagctgcaggttttcgcacagtcgcgagttaacctctgcttgctccagaggcctcgtcctaatccacctcggctgacggcgcgggatccctggctccgcgagcctcagcctcaccatgtgtgtcaggagctgtttccagtccccccgtctccagtgggtgtggagaacagccttcctgaaacacacccagcgcaggcaccaggggtcccaccgatggacacaccttggaggcagcacctacagagcggtgattttcgacatgggcggagttctcattccttctccagggagagtcgctgcagaatgggaggtacagaatcgtatcccttctggaactatattaaaggccttgatggaaggtggtgaaaatgggccctggatgagatttatgagagcagaaataacagcagagggttttttacgagaatttgggagactttgctctgaaatgttaaagacctccgtgcctgtggactcatttttctctctgttgaccagtgagcgagtggcaaagcagttcccagtgatgactgaggccataactcaaattcgggcaaaaggtcttcagactgcagtcttgagcaataatttttatcttcccaaccagaaaagctttttgcccctggaccggaaacagtttgatgtgattgtggagtcctgcatggaagggatctgtaagccagaccctaggatctacaagctgtgcttggagcagctcggcctgcagccctctgagtccatctttcttgatgaccttggaacaaatctaaaagaagctgccagacttggtattcacaccattaaggttaatgacccagagactgcagtaaaggaattagaagctctcttgggttttacattgagagtaggtgttccaaacactcggcctgtgaaaaagacgatggaaattccgaaagattccttgcagaagtacctcaaagacttactgggtatccagaccacaggcccattggaactacttcagtttgatcacgggcagtcaaatccaacttactacatcaggctggctaatcgtgatctagttctgaggaagaagcccccagggacactccttccatctgcccatgccatagagagggagttcaggattatgaaagcccttgcaaatgctggagtacctgtccctaacgttcttgatctctgtgaagattcaagtgtcattggcacccccttctatgtgatggagtactgcccaggtctcatctacaaagacccttccctgccaggcttggagcccagccacagacgagccatatacactgccatgaacacagtcctgtgcaaaattcacagtgtggatctgcaggctgtgggacttgaagactatgggaagcaaggggactatattccacgccaggtacgaacctgggttaagcagtatcgagcttccgaaactagcaccatcccagccatggagaggctgatcgaatggctgcccctccatcttccccgtcagcagaggaccacagtggtgcacggggacttcagatcacgccactgcactccagcctgcgcaacaaagtgagaccccgtctccaaaaaaataataaaaaaaagaaggaaaaagaataaataaaacaagaaaaaaaaaggaatacttagaaccttttctgatgccttgtgactttcagaatttaaaatcccccttgcagataaggccacccacggcggaaggccgggagcgagacggggctgaggggaccttgctcccattggagctgcagggcaggaaggggtgctgcggtcagcagagggcacccttcgcctgcgccgtgtgcagtgcctgcagtcactccctcattcccaggagtagccttgggtcagatgctggctcagatctataactgctcctgtctggtagccaggcctgcccagatgtgcaatggctggaataaagggttcttggaagcaatttgttacaggcaccctgtgggctgtggctggctgtggcacacgtgaaggttgtgtgtcagacctactccctggacatggcgcatggctgcacacaggcaccttggctgagaagatgcacagtcctggtttcactctcctcccctgccctgtcctgtctgcttccacccagctctgcaggccaccagcccccgcctctcgtggccacccccagcccagcatgtcctcagccgcacatctcctgtgtcgacaggtgaagtcccgcttggcttttgggaagcccctggtggagcagggcacagtgctggcggacatcgcacagtcgcgcgtggagattgagcaggcacggctgctggtgctgagagctgcccacctcatggacctggcaggaaacaaggctgcagccttggatatagccatgattaaaatggtcgccccgtccatggcctcccgagtgattgatcgtgcgattcaggtgagcacagaccagacagttggcttatttgaaccatcaatactagatgccaaactctcctatcttcagccgcccagcctcccatagaccctggcagatgccctgtgtcacccactcaccatgcatgcaactttccttttcctcttcagaatgacccagcaaggtgggaggtgccatcgtacccccattttgaatgtgaggaaacaggcacagaaaagtgaagtgacttgtccaggtcactgagcttgcaagtagctgacctcaaattcacatgaacttgggttttcataagcccagagcccaggctctttcccatgcaggggggccgcctccttagatcctaacccccggccccagcacagggcagaaggcacctgcagagtgggcctggggagtctggaggccgtgggatggcaggtgtggccccatgga

SEQ ID NO: 296009 - DNA, 2066 bp, Homo sapiens
actgctcttccggacgcaattttgaggaggtcggagcggaaggacgtcgtggagattgcttgcgctggggtgccacacttaggctgagctgcaggttttcgcacagtcgcgagttaacctctgcttgctccagaggcctcgtcctaatccacctcggctgacggcgcgggatccctggctccgcgagcctcagcctcaccatgtgtgtcaggagctgtttccagtccccccgtctccagtgggtgtggagaacagccttcctgaaacacacccagcgcaggcaccaggggtcccaccgatggacacaccttggaggcagcacctacagagcggtgattttcgacatgggcggagttctcattccttctccagggagagtcgctgcagaatgggaggtacagaatcgtatcccttctggaactatattaaaggccttgatggaaggtggtgaaaatgggccctggatgagatttatgagagcagaaataacagcagagggttttttacgagaatttgggagactttgctctgaaatgttaaagacctccgtgcctgtggactcatttttctctctgttgaccagtgagcgagtggcaaagcagttcccagtgatgactgaggccataactcaaattcgggcaaaaggtcttcagactgcagtcttgagcaataatttttatcttcccaaccagaaaagctttttgcccctggaccggaaacagtttgatgtgattgtggagtcctgcatggaagggatctgtaagccagaccctaggatctacaagctgtgcttggagcagctcggcctgcagccctctgagtccatctttcttgatgaccttggaacaaatctaaaagaagctgccagacttggtattcacaccattaaggttaatgacccagagactgcagtaaaggaattagaagctctcttgggttttacattgagagtaggtgttccaaacactcggcctgtgaaaaagacgatggaaattccgaaagattccttgcagaagtacctcaaagacttactgggtatccagaccacaggcccattggaactacttcagtttgatcacgggcagtcaaatccaacttactacatcaggctggctaatcgtgatctagttctgaggaagaagcccccagggacactccttccatctgcccatgccatagagagggagttcaggattatgaaagcccttgcaaatgctggagtacctgtccctaacgttcttgatctctgtgaagattcaagtgtcattggcacccccttctatgtgatggagtactgcccaggtctcatctacaaagacccttccctgccaggcttggagcccagccacagacgagccatatacactgccatgaacacagtcctgtgcaaaattcacagtgtggatctgcaggctgtgggacttgaagactatgggaagcaaggggactatattccacgccaggtacgaacctgggttaagcagtatcgagcttccgaaactagcaccatcccagccatggagaggctgatcgaatggctgcccctccatcttccccgtcagcagaggaccacagtggtgcacggggacttcagatcacgccactgcactccagcctgcgcaacaaagtgagaccccgtctccaaaaaaataataaaaaaaagttgcatgattttaaaacgcaacaaattgtctccatttcttggagacaagttttctctttcctccttcacattcccccctcagaaaaccaggtgccttgtgtgctttagaggacacttttgggccaggagtggtggctcatgcctgtaatcccagcattttgggaggccgagatgggcagatcacttgaggtcaggagttcgagaccagcctggtcaacatggtgaaaccccatctctactaaaaatgcaaaaattggccaggctggtggcatgtgtctgtggtcccagctgcttgggaggctgagacaagagttgcctgaacccgggaggtggaggttgcagtgagctgagatcgcgccactgtactccagcctgggcaacagagcaagactctgtctcaaaa

SEQ ID NO: 296010 - DNA, 1486 bp, Homo sapiens
actgctcttccggacgcaattttgaggaggtcggagcggaaggacgtcgtggagattgcttgcgctggggtgccacacttaggctgagctgcaggttttcgcacagtcgcgagttaacctctgcttgctccagaggcctcgtcctaatccacctcggctgacggcgcgggatccctggctccgcgagcctcagcctcaccatgtgtgtcaggagctgtttccagtccccccgtctccagtgggtgtggagaacagccttcctgaaacacacccagcgcaggcaccaggggtcccaccgatggacacaccttggaggcagcacctacagagcggtgattttcgacatgggcggagttctcattccttctccagggagagtcgctgcagaatgggaggtacagaatcgtatcccttctggaactatattaaaggccttgatggaaggtggtgaaaatgggccctggatgagatttatgagagcagaaataacagcagagggttttttacgagaatttgggagactttgctctgaaatgttaaagacctccgtgcctgtggactcatttttctctctgttgaccagtgagcgagtggcaaagcagttcccagtgatgactgaggccataactcaaattcgggcaaaaggtcttcagactgcagtcttgagcaataatttttatcttcccaaccagaaaagctttttgcccctggaccggaaacagtttgatgtgattgtggagtcctgcatggaagggatctgtaagccagaccctaggatctacaagctgtgcttggagcagctcggcctgcagccctctgagtccatctttcttgatgaccttggaacaaatctaaaagaagctgccagacttggtattcacaccattaaggttaatgacccagagactgcagtaaaggaattagaagctctcttgggttttacattgagagtaggtgttccaaacactcggcctgtgaaaaagacgatggaaattccgaaagattccttgcagaagtacctcaaagacttactgggtatccagaccacaggcccattggaactacttcagtttgatcacgggcagtcaaatccaacttactacatcaggctggctaatcgtgatctagttctgaggaagaagcccccagggacactccttccatctgcccatgccatagagagggagttcaggattatgaaagcccttgcaaatgctggagtacctgtccctaacgttcttgatctctgtgaagattcaaggtaaagttcagatgtttttgctattgcactttcaagctacaggagagaaaagcccatatgctaacacaaattccaatttgttaaagacaaataaaatttgggtaggagggaaaagaaactttatcacaacctctcccagaagttctcagatatttaagttatcctgcaagataagtatatgcctgctttagggataattggtagaaaacatcttttttaacattc

SEQ ID NO: 296011 - DNA, 382 bp, Homo sapiens
ctcatctacaaagacccttccctgccaggcttggagcccagccacagacgagccatatacactgccatgaacacagtcctgtgcaaaattcacagtgtggatctgcaggctgtgggacttgaagactatgggaagcaaggtgagcaggaggccacgtctcccatgctggttgtttcatcactagtgcttctgcttttaggatctgaatcgttttgggtcgttttgagtattagcacaccaagcgtaaggcagacttagcttcttccttggaaatccagtttagttttaatggaggtgttgctgacttaggcatttgggccttcaataaatccctttatgaactacacagtctttcttccctgcaacttttttttttcatttt

SEQ ID NO: 296012 - DNA, 637 bp, Homo sapiens
ccttatatgagagttcagcacaggggctgaggaacacagttcctgcaggcagcaagctatgagcctgggctcttgtagcagagagcagaaggacgccaggaataagcattttttttttctgttggccatgagtgtttgtcactcttaatgattgctgttctcctgtgccctctcctgttcttagttaaagacctccgtgcctgtggactcatttttctctctgttgaccagtgagcgagtggcaaagcagttcccagtgatgactgaggccataactcaaattcgggcaaaaggtcttcagactgcagtcttgagcaataatttttatcttcccaaccagaaaagctttttgcccctggaccggaaacagtttgatgtggtaagcttgagctaattgaaaaccattggaacagaatctgtgccctcgcttcagggtgcaatgttaaatgctatcttccagcaggtcttgagtgagggagtttttccttcagccacttgactaagttaggtttaaatgcaatatgttgaaaacagaccctttaagatatcactgtgttcttagcaaggtcagacatttatggcatttgattactggttgacacttcagctttacattctaaattcgaaccttagtctt

SEQ ID NO: 296013 - DNA, 3316 bp, Homo sapiens
gtttttgtgttgctagccggggccagcggcggtggcggcggcggcggaggcgtcggtggaggaggggaggcggcgaggaggcgcagctcccgctgcaccgcgatcgacgctgcggagcgagcccacccgccccgggagctcgcctccccggtgctcccccgccctccccgcccccccagcggcgctgcctcctccaaatgagcgattcgcccgctggatctaacccaaggacacccgaaagcagcggcagcggcagcggcggcggcgggaagaggccggcggtgccggcagcggtgtccctcttgccaccggcggaccccctgcgccaggcgaaccggctcccgatcagggtcctgaagatgctgagcgctcacaccggtcacctcctgcacccggagtacctgcagccgctgtcctccactcccgtcagccccattgagctggacgccaagaagagccccttggcgctgctggctcagacctgctcgcagatcggcaagccggacccgccgccctcctccaaactcaactcggtggcggcggcggccaacgggctgggagcggagaaggaccccggccgctcagccccgggcgccgcctccgcagccgcggccctgaagcagctgggggactcaccggccgaggacaagtccagcttcaagccctactccaagggctccggcggcggcgactcccgcaaagacagcggctcctcctcggtgtcttccacctcctcctcgtcctcctcgtccccgggagacaaggcgggcttcagggtccccagcgccgcctgcccgccctttcccccgcatggagcgccggtctccgcatcctcgtcctcgtcgtcgcccggcggctcccgcggcggctccccgcaccactctgactgcaagaacggcggcggggttggcggcggggagctggacaagaaagaccaggagcccaagcccagcccggagccggcagccgtgagccgcggcggcggtggggagcccggggcgcacggtggcgccgagtccggggcctccgggcgcaagtccgagccgccctcggcgctggtgggggccggccacgtggcgccggtgtctccctacaagccgggccactcggtgttcccgctgccgccctccagcattggctaccacggctccatcgtgggcgcctacgccggctacccgtctcagttcgtgcctggcctggatcctagcaagtccggcctcgtgggaggccagctgtctgggggcctgggcctgccgccgggcaagccccccagctccagcccgctcaccggggcctccccgccctccttcctgcagggattatgccgcgacccctattgcttgggaggttaccacggcgcctcgcacctcggcggctccagctgctccacctgcagcgcgcacgaccctgccgggcccagcctgaaggcggggggctacccgctggtgtaccccgggcacccgctgcagcccgccgcgctctcgtccagcgccgcccaggccgcgctccccggccacccgctctacacctacggcttcatgctgcagaacgaaccgctgccgcacagctgcaactgggtggcagccagtgggccgtgcgacaagcgcttcgccacctcggaggagctgctcagccacctacggacccacacggccctgccgggagccgagaaacttctggccgcctaccccggggcctcgggcctgggcagcgccgccgccgccgccgccgccgccgcctcctgccatctgcacctccccccgcccgccgccccggcagccccgggtcgctgtccttgcggaatccacacactttgggcctaagccggtaccacccctatggcaagagccacttatccacagcggggggcctggccgtgccgtccctccccacagccggaccctactattcgccatacgcgctgtatggacagagactagcttcagcctcggcgctgggataccagtaactacagctcttcctccaccccagccccctcaccctcctccctctccctcctcctccctccccacctgccgtcgccgctgcaacctccactactgcttgaccctgccgggattccccacccagcccttccccaccggactgtgtatttatttactataatgttagcttacaagctgggaatataagtgcattaacggcccacatgagtcaatggtatgcaaaaagtctgtgttctcccaaataataatattaatcccacaaataacgacatgatccccgcccctgttcctttctgttattttttcttagatataagttttacattttttattccttttcctctttttttggttttgattggtttggtttgagggagagttggggtctttgggttcttctagacgttttgttttcccttcctggggagtttcttgcatgagtcttaacttaaaactacgtttccgccttctctttttccctcttcccccttcattccctcttgtttccttccatttgcggttctgtttttgttttttgttttgttttgttttgttttttcctttgttgtacaagtaacagagaggaggttttttttgtaactcattttgggggtggagggggccacctgggtggcaggggccctggagctctattgacctggtacactgctccgggactcctcccccgccaccctccgcgcatagggtccttggtctggaccctgccccccaaaagtagggccttgctcctctaccttgctctgagcacggagagccctgaccccaccagtaggctcgcccccagaagggcccaagtggccgtctaccgtcaccttccagactcccgcccctaacacccagtggctacagtgcgcctgtcggggcacctggagcgctcacctggttgaattcaaagtcccagaaggccccgctggcgtgaagccggccccttacattttgcgaagtgcattatagtccttgtttttctctccctcgtgggggcaacgacccctcccctggcagtaggggtggggtaggtgactctcgctagatccctccaaagcagaccggtggcgatgtcagcggatgtcacgagctcgttagctgcgttcggggaaggttggggcgtcagggagctctcggatcacagcagcccccgccctctcctaggcctggcccggcagagcccccagagtggaccccccagcgactggggtcttctccccactcctccctccttctggtctgatgcggcagcgcgggggctgcggggcctgtttgggacgaacagagctctcccttggtaagacttattttgttaataaatggaatacttggctataatcaaa

SEQ ID NO: 296014 - DNA, 3695 bp, Homo sapiens
gtttttgtgttgctagccggggccagcggcggtggcggcggcggcggaggcgtcggtggaggaggggaggcggcgaggaggcgcagctcccgctgcaccgcgatcgacgctgcggagcgagcccacccgccccgggagctcgcctccccggtgctcccccgccctccccgcccccccagcggcgctgcctcctccaaatgagcgattcgcccgctggatctaacccaaggacacccgaaagcagcggcagcggcagcggcggcggcgggaagaggccggcggtgccggcagcggtgtccctcttgccaccggcggaccccctgcgccaggcgaaccggctcccgatcagggtcctgaagatgctgagcgctcacaccggtcacctcctgcacccggagtacctgcagccgctgtcctccactcccgtcagccccattgagctggacgccaagaagagccccttggcgctgctggctcagacctgctcgcagatcggcaagccggacccgccgccctcctccaaactcaactcggtggcggcggcggccaacgggctgggagcggagaaggaccccggccgctcagccccgggcgccgcctccgcagccgcggccctgaagcagctgggggactcaccggccgaggacaagtccagcttcaagccctactccaagggctccggcggcggcgactcccgcaaagacagcggctcctcctcggtgtcttccacctcctcctcgtcctcctcgtccccgggagacaaggcgggcttcagggtccccagcgccgcctgcccgccctttcccccgcatggagcgccggtctccgcatcctcgtcctcgtcgtcgcccggcggctcccgcggcggctccccgcaccactctgactgcaagaacggcggcggggttggcggcggggagctggacaagaaagaccaggagcccaagcccagcccggagccggcagccgtgagccgcggcggcggtggggagcccggggcgcacggtggcgccgagtccggggcctccgggcgcaagtccgagccgccctcggcgctggtgggggccggccacgtggcgccggtgtctccctacaagccgggccactcggtgttcccgctgccgccctccagcattggctaccacggctccatcgtgggcgcctacgccggctacccgtctcagttcgtgcctggcctggatcctagcaagtccggcctcgtgggaggccagctgtctgggggcctgggcctgccgccgggcaagccccccagctccagcccgctcaccggggcctccccgccctccttcctgcagggattatgccgcgacccctattgcttgggaggttaccacggcgcctcgcacctcggcggctccagctgctccacctgcagcgcgcacgaccctgccgggcccagcctgaaggcggggggctacccgctggtgtaccccgggcacccgctgcagcccgccgcgctctcgtccagcgccgcccaggccgcgctccccggccacccgctctacacctacggcttcatgctgcagaacgaaccgctgccgcacagctgcaactgggtggcagccagtgggccgtgcgacaagcgcttcgccacctcggaggagctgctcagccacctacggacccacacggccctgccgggagccgagaaacttctggccgcctaccccggggcctcgggcctgggcagcgccgccgccgccgccgccgccgccgcctcctgccatctgcacctccccccgcccgccgccccggcagccccgggtcgctgtccttgcggaatccacacactttgggcctaagccggtaccacccctatggcaagagccacttatccacagcggggggcctggccgtgccgtccctccccacagccggaccctactattcgccatacgcgctgtatggacagagactagcttcagcctcggcgctgggataccagtaactacagctcttcctccaccccagccccctcaccctcctccctctccctcctcctccctccccacctgccgtcgccgctgcaacctccactactgcttgaccctgccgggattccccacccagcccttccccaccggactgtgtatttatttactataatgttagcttacaagctgggaatataagtgcattaacggcccacatgagtcaatggtatgcaaaaagtctgtgttctcccaaataataatattaatcccacaaataacgacatgatccccgcccctgttcctttctgttattttttcttagatataagttttacattttttattccttttcctctttttttggttttgattggtttggtttgagggagagttggggtctttgggttcttctagacgttttgttttcccttcctggggagtttcttgcatgagtcttaacttaaaactacgtttccgccttctctttttccctcttcccccttcattccctcttgtttccttccatttgcggttctgtttttgttttttgttttgttttgttttgttttttcctttgttgtacaagtaacagagaggaggttttttttgtaactcattttgggggtggagggggccacctgggtggcaggggccctggagctctattgacctggtacactgctccgggactcctcccccgccaccctccgcgcatagggtccttggtctggaccctgccccccaaaagtagggccttgctcctctaccttgctctgagcacggagagccctgaccccaccagtaggctcgcccccagaagggcccaagtggccgtctaccgtcaccttccagactcccgcccctaacacccagtggctacagtgcgcctgtcggggcacctggagcgctcacctggttgaattcaaagtcccagaaggccccgctggcgtgaagccggccccttacattttgcgaagtgcattatagtccttgtttttctctccctcgtgggggcaacgacccctcccctggcagtaggggtggggtaggtgactctcgctagatccctccaaagcagaccggtggcgatgtcagcggatgtcacgagctcgttagctgcgttcggggaaggttggggcgtcagggagctctcggatcacagcagcccccgccctctcctaggcctggcccggcagagcccccagagtggaccccccagcgactggggtcttctccccactcctccctccttctggtctgatgcggcagcgcgggggctgcggggcctgtttgggacgaacagagctctcccttggtaagacttattttgttaataaatggaatacttggctataatcaaaaaaaaaaaaaagcaaaacacaacaagagagacacaacaacaagagaaaaacgaagcaaagaaagacacaagaagcaaacgccaacaggcacagcggacgaggcacagaacgcaaggaagcgaaaggagaaagagcacacagcgcgcgcgagcgaggggggagaggagggggcaccaagagggagcacgccccgcggcgaagcgagagcgagaagacggcaggaacgtcgctcgcggcagccagggcagccaccgagagacagagcagcggcaaagagaagaagggggtgaggggcgcggcagacagccagagggtcggaagcgagcgccacacgcacgagggggcggcgcggcgagggaagagaacgaggcaggagaac

SEQ ID NO: 296015 - DNA, 2958 bp, Homo sapiens
gccagaaacccgtcccaagcgaagttcccccaaactaaaggaataagttttttcctgggcctggaggagggggacattagagctggacgccaagaagagccccttggcgctgctggctcagacctgctcgcagatcggcaagccggacccgccgccctcctccaaactcaactcggtggcggcggcggccaacgggctgggagcggagaaggaccccggccgctcagccccgggcgccgcctccgcagccgcggccctgaagcagctgggggactcaccggccgaggacaagtccagcttcaagccctactccaagggctccggcggcggcgactcccgcaaagacagcggctcctcctcggtgtcttccacctcctcctcgtcctcctcgtccccgggagacaaggcgggcttcagggtccccagcgccgcctgcccgccctttcccccgcatggagcgccggtctccgcatcctcgtcctcgtcgtcgcccggcggctcccgcggcggctccccgcaccactctgactgcaagaacggcggcggggttggcggcggggagctggacaagaaagaccaggagcccaagcccagcccggagccggcagccgtgagccgcggcggcggtggggagcccggggcgcacggtggcgccgagtccggggcctccgggcgcaagtccgagccgccctcggcgctggtgggggccggccacgtggcgccggtgtctccctacaagccgggccactcggtgttcccgctgccgccctccagcattggctaccacggctccatcgtgggcgcctacgccggctacccgtctcagttcgtgcctggcctggatcctagcaagtccggcctcgtgggaggccagctgtctgggggcctgggcctgccgccgggcaagccccccagctccagcccgctcaccggggcctccccgccctccttcctgcagggattatgccgcgacccctattgcttgggaggttaccacggcgcctcgcacctcggcggctccagctgctccacctgcagcgcgcacgaccctgccgggcccagcctgaaggcggggggctacccgctggtgtaccccgggcacccgctgcagcccgccgcgctctcgtccagcgccgcccaggccgcgctccccggccacccgctctacacctacggcttcatgctgcagaacgaaccgctgccgcacagctgcaactgggtggcagccagtgggccgtgcgacaagcgcttcgccacctcggaggagctgctcagccacctacggacccacacggccctgccgggagccgagaaacttctggccgcctaccccggggcctcgggcctgggcagcgccgccgccgccgccgccgccgccgcctcctgccatctgcacctccccccgcccgccgccccggcagccccgggtcgctgtccttgcggaatccacacactttgggcctaagccggtaccacccctatggcaagagccacttatccacagcggggggcctggccgtgccgtccctccccacagccggaccctactattcgccatacgcgctgtatggacagagactagcttcagcctcggcgctgggataccagtaactacagctcttcctccaccccagccccctcaccctcctccctctccctcctcctccctccccacctgccgtcgccgctgcaacctccactactgcttgaccctgccgggattccccacccagcccttccccaccggactgtgtatttatttactataatgttagcttacaagctgggaatataagtgcattaacggcccacatgagtcaatggtatgcaaaaagtctgtgttctcccaaataataatattaatcccacaaataacgacatgatccccgcccctgttcctttctgttattttttcttagatataagttttacattttttattccttttcctctttttttggttttgattggtttggtttgagggagagttggggtctttgggttcttctagacgttttgttttcccttcctggggagtttcttgcatgagtcttaacttaaaactacgtttccgccttctctttttccctcttcccccttcattccctcttgtttccttccatttgcggttctgtttttgttttttgttttgttttgttttgttttttcctttgttgtacaagtaacagagaggaggttttttttgtaactcattttgggggtggagggggccacctgggtggcaggggccctggagctctattgacctggtacactgctccgggactcctcccccgccaccctccgcgcatagggtccttggtctggaccctgccccccaaaagtagggccttgctcctctaccttgctctgagcacggagagccctgaccccaccagtaggctcgcccccagaagggcccaagtggccgtctaccgtcaccttccagactcccgcccctaacacccagtggctacagtgcgcctgtcggggcacctggagcgctcacctggttgaattcaaagtcccagaaggccccgctggcgtgaagccggccccttacattttgcgaagtgcattatagtccttgtttttctctccctcgtgggggcaacgacccctcccctggcagtaggggtggggtaggtgactctcgctagatccctccaaagcagaccggtggcgatgtcagcggatgtcacgagctcgttagctgcgttcggggaaggttggggcgtcagggagctctcggatcacagcagcccccgccctctcctaggcctggcccggcagagcccccagagtggaccccccagcgactggggtcttctccccactcctccctccttctggtctgatgcggcagcgcgggggctgcggggcctgtttgggacgaacagagctctcccttggtaagacttattttgttaataaatggaatacttggctataatcaaa

SEQ ID NO: 296016 - DNA, 3078 bp, Homo sapiens
aggggccactgcgttcagctctggcggtccacagcccgaagcgcggcttaggaagttcgtgtcagcgctgcctgagctcgtcccctggatgtccgggtctccccaggcggccacccgccggctcccatcgtgacctccagccgcagcgcctcccacgccggccgccgcgcgaggggagcgctcgggcgcgccgggtgtggttgggggaaggggttgtgccgcgcgcgggctgcgtgctgtgcccactcaaaaggttccgggcgcgcaggagggaagaggcagtgcccgccactcccactgagattgagagacgcggcaaggaggcagcctgtggaggaactgggtaggatttaggaacgcaccgtgcacatgcttggtggtcttgttaagtggaaactgctgctttagagtttgtttggaaggtccgggtgactcatcccaacatttacatccttaattgttaaagcgctgcctccgagcgcacgcatcctgagatcctgagcctttggttaagaccgagctctattaagctgaaaagataaaaactctccagatgtcttccagtaatgtcgaagtttttatcccagtgtcacaaggaaacaccaatggcttccccgcgacagcttccaatgacctgaaggcatttactgaaggagctgtgttaagttttcataacatctgctatcgagtaaaactgaagagtggctttctaccttgtcgaaaaccagttgagaaagaaatattatcgaatatcaatgggatcatgaaacctggtctcaacgccatcctgggacccacaggtggaggcaaatcttcgttattagatgtcttagctgcaaggaaagatccaagtggattatctggagatgttctgataaatggagcaccgcgacctgccaatttcaaatgtaattcaggttacgtggtacaagatgatgttgtgatgggcactctgacggtgagagaaaacttacagttctcagcagctcttcggcttgcaacaactatgacgaatcatgaaaaaaacgaacggattaacagggtcattcaagagttaggtctggataaagtggcagactccaaggttggaactcagtttatccgtggtgtgtctggaggagaaagaaaaaggactagtataggaatggagcttatcactgatccttccatcttgttcttggatgagcctacaactggcttagactcaagcacagcaaatgctgtccttttgctcctgaaaaggatgtctaagcagggacgaacaatcatcttctccattcatcagcctcgatattccatcttcaagttgtttgatagcctcaccttattggcctcaggaagacttatgttccacgggcctgctcaggaggccttgggatactttgaatcagctggttatcactgtgaggcctataataaccctgcagacttcttcttggacatcattaatggagattccactgctgtggcattaaacagagaagaagactttaaagccacagagatcatagagccttccaagcaggataagccactcatagaaaaattagcggagatttatgtcaactcctccttctacaaagagacaaaagctgaattacatcaactttccgggggtgagaagaagaagaagatcacagtcttcaaggagatcagctacaccacctccttctgtcatcaactcagatgggtttccaagcgttcattcaaaaacttgctgggtaatccccaggcctctatagctcagatcattgtcacagtcgtactgggactggttataggtgccatttactttgggctaaaaaatgattctactggaatccagaacagagctggggttctcttcttcctgacgaccaaccagtgtttcagcagtgtttcagccgtggaactctttgtggtagagaagaagctcttcatacatgaatacatcagcggatactacagagtgtcatcttatttccttggaaaactgttatctgatttattacccatgaggatgttaccaagtattatatttacctgtatagtgtacttcatgttaggattgaagccaaaggcagatgccttcttcgttatgatgtttacccttatgatggtggcttattcagccagttccatggcactggccatagcagcaggtcagagtgtggtttctgtagcaacacttctcatgaccatctgttttgtgtttatgatgattttttcaggtctgttggtcaatctcacaaccattgcatcttggctgtcatggcttcagtacttcagcattccacgatatggatttacggctttgcagcataatgaatttttgggacaaaacttctgcccaggactcaatgcaacaggaaacaatccttgtaactatgcaacatgtactggcgaagaatatttggtaaagcagggcatcgatctctcaccctggggcttgtggaagaatcacgtggccttggcttgtatgattgttattttcctcacaattgcctacctgaaattgttatttcttaaaaaatattcttaaatttccccttaattcagtatgatttatcctcacataaaaaagaagcactttgattgaagtattcaatcaagtttttttgttgttttctgttcccttgccatcacactgttgcacagcagcaattgttttaaagagatacatttttagaaatcacaacaaactgaattaaacatgaaagaacccaagacatcatgtatcgcatattagttaatctcctcagacagtaaccatggggaagaaatctggtctaatttattaatctaaaaaaggagaattgaattctggaaactcctgacaagttattactgtctctggcatttgtttcctcatctttaaaatgaataggtaggttagtagcccttcagtcttaatactttatgatgctatggtttgccattatttaataaatgacaaatgtattaatgctatactggaaatgtaaaattgaaaatatgttggaaaaaagattctgtcttatagggtaaaaaaagccaccggtgatagaaaaaaaatctttttgataagcacattaaagttaatagaacttaaaaatattc

SEQ ID NO: 296017 - DNA, 3067 bp, Homo sapiens
aggggccactgcgttcagctctggcggtccacagcccgaagcgcggcttaggaagttcgtgtcagcgctgcctgagctcgtcccctggatgtccgggtctccccaggcggccacccgccggctcccatcgtgacctccagccgcagcgcctcccacgccggccgccgcgcgaggggagcgctcgggcgcgccgggtgtggttgggggaaggggttgtgccgcgcgcgggctgcgtgctgtgcccactcaaaaggttccgggcgcgcaggagggaagaggcagtgcccgccactcccactgagattgagagacgcggcaaggaggcagcctgtggaggaactgggtaggatttaggaacgcaccgtgcacatgcttggtggtcttgttaagtggaaactgctgctttagagtttgtttggaaggtccgggtgactcatcccaacatttacatccttaattgttaaagcgctgcctccgagcgcacgcatcctgagatcctgagcctttggttaagaccgagctctattaagctgaaaagataaaaactctccagatgtcttccagtaatgtcgaagtttttatcccagtgtcacaaggaaacaccaatggcttccccgcgacagcttccaatgacctgaaggcatttactgaaggagctgtgttaagttttcataacatctgctatcgagtaaaactgaagagtggctttctaccttgtcgaaaaccagttgagaaagaaatattatcgaatatcaatgggatcatgaaacctggtctcaacgccatcctgggacccacaggtggaggcaaatcttcgttattagatgtcttagctgcaaggaaagatccaagtggattatctggagatgttctgataaatggagcaccgcgacctgccaatttcaaatgtaattcaggttacgtggtacaagatgatgttgtgatgggcactctgacggtgagagaaaacttacagttctcagcagctcttcggcttgcaacaactatgacgaatcatgaaaaaaacgaacggattaacagggtcattcaagagttaggtctggataaagtggcagactccaaggttggaactcagtttatccgtggtgtgtctggaggagaaagaaaaaggactagtataggaatggagcttatcactgatccttccatcttgttcttggatgagcctacaactggcttagactcaagcacagcaaatgctgtccttttgctcctgaaaaggatgtctaagcagggacgaacaatcatcttctccattcatcagcctcgatattccatcttcaagttgtttgatagcctcaccttattggcctcaggaagacttatgttccacgggcctgctcaggaggccttgggatactttgaatcagctggttatcactgtgaggcctataataaccctgcagacttcttcttggacatcattaatggagattccactgctgtggcattaaacagagaagaagactttaaagccacagagatcatagagccttccaagcaggataagccactcatagaaaaattagcggagatttatgtcaactcctccttctacaaagagacaaaagctgaattacatcaactttccgggggtgagaagaagaagaagatcacagtcttcaaggagatcagctacaccacctccttctgtcatcaactcagatgggtttccaagcgttcattcaaaaacttgctgggtaatccccaggcctctatagctcagatcattgtcacagtcgtactgggactggttataggtgccatttactttgggctaaaaaatgattctactggaatccagaacagagctggggttctcttcttcctgacgaccaaccagtgtttcagcagtgtttcagccgtggaactctttgtggtagagaagaagctcttcatacatgaatacatcagcggatactacagagtgtcatcttatttccttggaaaactgttatctgatttattacccatgaggatgttaccaagtattatatttacctgtatagtgtacttcatgttaggattgaagccaaaggcagatgccttcttcgttatgatgtttacccttatgatggtggcttattcagccagttccatggcactggccatagcagcaggtcagagtgtggtttctgtagcaacacttctcatgaccatctgttttgtgtttatgatgattttttcaggtctgttggtcaatctcacaaccattgcatcttggctgtcatggcttcagtacttcagcattccacgatatggatttacggctttgcagcataatgaatttttgggacaaaacttctgcccaggactcaatgcaacaggaaacaatccttgtaactatgcaacatgtactggcgaagaatatttggtaaagcagggcatcgatctctcaccctggggcttgtggaagaatcacgtggccttggcttgtatgattgttattttcctcacaattgcctacctgaaattgttatttcttaaaaaatattcttaaatttccccttaattcagtatgatttatcctcacataaaaaagaagcactttgattgaagtattcaatcaagtttttttgttgttttctgttcccttgccatcacactgttgcacagcagcaattgttttaaagagatacatttttagaaatcacaacaaactgaattaaacatgaaagaacccaagacatcatgtatcgcatattagttaatctcctcagacagtaaccatggggaagaaatctggtctaatttattaatctaaaaaaggagaattgaattctggaaactcctgacaagttattactgtctctggcatttgtttcctcatctttaaaatgaataggtaggttagtagcccttcagtcttaatactttatgatgctatggtttgccattatttaataaatgacaaatgtattaatgctatactggaaatgtaaaattgaaaatatgttggaaaaaagattctgtcttatagggtaaaaaaagccaccggtgatagaaagtataatatctcaggaatcttggctgagggtttggaact

SEQ ID NO: 296018 - DNA, 2592 bp, Homo sapiens
aggggccactgcgttcagctctggcggtccacagcccgaagcgcggcttaggaagttcgtgtcagcgctgcctgagctcgtcccctggatgtccgggtctccccaggcggccacccgccggctcccatcgtgacctccagccgcagcgcctcccacgccggccgccgcgcgaggggagcgctcgggcgcgccgggtgtggttgggggaaggggttgtgccgcgcgcgggctgcgtgctgtgcccactcaaaaggttccgggcgcgcaggagggaagaggcagtgcccgccactcccactgagattgagagacgcggcaaggaggcagcctgtggaggaactgggtaggatttaggaacgcaccgtgcacatgcttggtggtcttgttaagtggaaactgctgctttagagtttgtttggaaggtccgggtgactcatcccaacatttacatccttaattgttaaagcgctgcctccgagcgcacgcatcctgagatcctgagcctttggttaagaccgagctctattaagctgaaaagataaaaactctccagatgtcttccagtaatgtcgaagtttttatcccagtgtcacaaggaaacaccaatggcttccccgcgacagcttccaatgacctgaaggcatttactgaaggagctgtgttaagttttcataacatctgctatcgagtaaaactgaagagtggctttctaccttgtcgaaaaccagttgagaaagaaatattatcgaatatcaatgggatcatgaaacctggtctcaacgccatcctgggacccacaggtggaggcaaatcttcgttattagatgtcttagctgcaaggaaagatccaagtggattatctggagatgttctgataaatggagcaccgcgacctgccaatttcaaatgtaattcaggttacgtggtacaagatgatgttgtgatgggcactctgacggtgagagaaaacttacagttctcagcagctcttcggcttgcaacaactatgacgaatcatgaaaaaaacgaacggattaacagggtcattcaagagttaggtctggataaagtggcagactccaaggttggaactcagtttatccgtggtgtgtctggaggagaaagaaaaaggactagtataggaatggagcttatcactgatccttccatcttgttcttggatgagcctacaactggcttagactcaagcacagcaaatgctgtccttttgctcctgaaaaggatgtctaagcagggacgaacaatcatcttctccattcatcagcctcgatattccatcttcaagttgtttgatagcctcaccttattggcctcaggaagacttatgttccacgggcctgctcaggaggccttgggatactttgaatcagctggttatcactgtgaggcctataataaccctgcagacttcttcttggacatcattaatggagattccactgctgtggcattaaacagagaagaagactttaaagccacagagatcatagagccttccaagcaggataagccactcatagaaaaattagcggagatttatgtcaactcctccttctacaaagagacaaaagctgaattacatcaactttccgggggtgagaagaagaagaagatcacagtcttcaaggagatcagctacaccacctccttctgtcatcaactcagatgggtttccaagcgttcattcaaaaacttgctgggtaatccccaggcctctatagctcagatcattgtcacagtcgtactgggactggttataggtgccatttactttgggctaaaaaatgattctactggaatccagaacagagctggggttctcttcttcctgacgaccaaccagtgtttcagcagtgtttcagccgtggaactctttgtggtagagaagaagctcttcatacatgaatacatcagcggatactacagagtgtcatcttatttccttggaaaactgttatctgatttattacccatgaggatgttaccaagtattatatttacctgtatagtgtacttcatgttaggattgaagccaaaggcagatgccttcttcgttatgatgtttacccttatgatggtggcttattcagccagttccatggcactggccatagcagcaggtcagagtgtggtttctgtagcaacacttctcatgaccatctgttttgtgtttatgatgattttttcaggtctgttggtcaatctcacaaccattgcatcttggctgtcatggcttcagtacttcagcattccacgatatggatttacggctttgcagcataatgaatttttgggacaaaacttctgcccaggactcaatgcaacaggaaacaatccttgtaactatgcaacatgtactggcgaagaatatttggtaaagcagggcatcgatctctcaccctggggcttgtggaagaatcacgtggccttggcttgtatgattgttattttcctcacaattgcctacctgaaattgttatttcttaaaaaatattcttaaatttccccttaattcagtatgatttatcctcacataaaaaagaagcactttgattgaagtattcaatcaag

SEQ ID NO: 296019 - DNA, 2781 bp, Homo sapiens
cgcggataatgttagtcacagagtataagtttcagtcagacaggaggaagaagttttagtcatctcgtgcacatgcttggtggtcttgttaagtggaaactgctgctttagagtttgtttggaaggtccgggtgactcatcccaacatttacatccttaattgttaaagcgctgcctccgagcgcacgcatcctgagatcctgagcctttggttaagaccgagctctattaagctgaaaagataaaaactctccagatgtcttccagtaatgtcgaagtttttatcccagtgtcacaaggaaacaccaatggcttccccgcgacagcttccaatgacctgaaggcatttactgaaggagctgtgttaagttttcataacatctgctatcgagtaaaactgaagagtggctttctaccttgtcgaaaaccagttgagaaagaaatattatcgaatatcaatgggatcatgaaacctggtctcaacgccatcctgggacccacaggtggaggcaaatcttcgttattagatgtcttagctgcaaggaaagatccaagtggattatctggagatgttctgataaatggagcaccgcgacctgccaatttcaaatgtaattcaggttacgtggtacaagatgatgttgtgatgggcactctgacggtgagagaaaacttacagttctcagcagctcttcggcttgcaacaactatgacgaatcatgaaaaaaacgaacggattaacagggtcattcaagagttaggtctggataaagtggcagactccaaggttggaactcagtttatccgtggtgtgtctggaggagaaagaaaaaggactagtataggaatggagcttatcactgatccttccatcttgttcttggatgagcctacaactggcttagactcaagcacagcaaatgctgtccttttgctcctgaaaaggatgtctaagcagggacgaacaatcatcttctccattcatcagcctcgatattccatcttcaagttgtttgatagcctcaccttattggcctcaggaagacttatgttccacgggcctgctcaggaggccttgggatactttgaatcagctggttatcactgtgaggcctataataaccctgcagacttcttcttggacatcattaatggagattccactgctgtggcattaaacagagaagaagactttaaagccacagagatcatagagccttccaagcaggataagccactcatagaaaaattagcggagatttatgtcaactcctccttctacaaagagacaaaagctgaattacatcaactttccgggggtgagaagaagaagaagatcacagtcttcaaggagatcagctacaccacctccttctgtcatcaactcagatgggtttccaagcgttcattcaaaaacttgctgggtaatccccaggcctctatagctcagatcattgtcacagtcgtactgggactggttataggtgccatttactttgggctaaaaaatgattctactggaatccagaacagagctggggttctcttcttcctgacgaccaaccagtgtttcagcagtgtttcagccgtggaactctttgtggtagagaagaagctcttcatacatgaatacatcagcggatactacagagtgtcatcttatttccttggaaaactgttatctgatttattacccatgaggatgttaccaagtattatatttacctgtatagtgtacttcatgttaggattgaagccaaaggcagatgccttcttcgttatgatgtttacccttatgatggtggcttattcagccagttccatggcactggccatagcagcaggtcagagtgtggtttctgtagcaacacttctcatgaccatctgttttgtgtttatgatgattttttcaggtctgttggtcaatctcacaaccattgcatcttggctgtcatggcttcagtacttcagcattccacgatatggatttacggctttgcagcataatgaatttttgggacaaaacttctgcccaggactcaatgcaacaggaaacaatccttgtaactatgcaacatgtactggcgaagaatatttggtaaagcagggcatcgatctctcaccctggggcttgtggaagaatcacgtggccttggcttgtatgattgttattttcctcacaattgcctacctgaaattgttatttcttaaaaaatattcttaaatttccccttaattcagtatgatttatcctcacataaaaaagaagcactttgattgaagtattcaatcaagtttttttgttgttttctgttcccttgccatcacactgttgcacagcagcaattgttttaaagagatacatttttagaaatcacaacaaactgaattaaacatgaaagaacccaagacatcatgtatcgcatattagttaatctcctcagacagtaaccatggggaagaaatctggtctaatttattaatctaaaaaaggagaattgaattctggaaactcctgacaagttattactgtctctggcatttgtttcctcatctttaaaatgaataggtaggttagtagcccttcagtcttaatactttatgatgctatggtttgccattatttaataaatgacaaatgtattaatgctatactggaaatgtaaaattgaaaatatgttggaaaaaagattctgtcttatagggtaaaaaaagccaccggtgatagaaaaaaaatctttttgataagcacattaaagttaatagaacttaaaaatattc

SEQ ID NO: 296020 - DNA, 2887 bp, Homo sapiens
aggggccactgcgttcagctctggcggtccacagcccgaagcgcggcttaggaagttcgtgtcagcgctgcctgagctcgtcccctggatgtccgggtctccccaggcggccacccgccggctcccatcgtgacctccagccgcagcgcctcccacgccggccgccgcgcgaggggagcgctcgggcgcgccgggtgtggttgggggaaggggttgtgccgcgcgcgggctgcgtgctgtgcccactcaaaaggttccgggcgcgcaggagggaagaggcagtgcccgccactcccactgagattgagagacgcggcaaggaggcagcctgtggaggaactggaaagataaaaactctccagatgtcttccagtaatgtcgaagtttttatcccagtgtcacaaggaaacaccaatggcttccccgcgacagcttccaatgacctgaaggcatttactgaaggagctgtgttaagttttcataacatctgctatcgagtaaaactgaagagtggctttctaccttgtcgaaaaccagttgagaaagaaatattatcgaatatcaatgggatcatgaaacctggtctcaacgccatcctgggacccacaggtggaggcaaatcttcgttattagatgtcttagctgcaaggaaagatccaagtggattatctggagatgttctgataaatggagcaccgcgacctgccaatttcaaatgtaattcaggttacgtggtacaagatgatgttgtgatgggcactctgacggtgagagaaaacttacagttctcagcagctcttcggcttgcaacaactatgacgaatcatgaaaaaaacgaacggattaacagggtcattcaagagttaggtctggataaagtggcagactccaaggttggaactcagtttatccgtggtgtgtctggaggagaaagaaaaaggactagtataggaatggagcttatcactgatccttccatcttgttcttggatgagcctacaactggcttagactcaagcacagcaaatgctgtccttttgctcctgaaaaggatgtctaagcagggacgaacaatcatcttctccattcatcagcctcgatattccatcttcaagttgtttgatagcctcaccttattggcctcaggaagacttatgttccacgggcctgctcaggaggccttgggatactttgaatcagctggttatcactgtgaggcctataataaccctgcagacttcttcttggacatcattaatggagattccactgctgtggcattaaacagagaagaagactttaaagccacagagatcatagagccttccaagcaggataagccactcatagaaaaattagcggagatttatgtcaactcctccttctacaaagagacaaaagctgaattacatcaactttccgggggtgagaagaagaagaagatcacagtcttcaaggagatcagctacaccacctccttctgtcatcaactcagatgggtttccaagcgttcattcaaaaacttgctgggtaatccccaggcctctatagctcagatcattgtcacagtcgtactgggactggttataggtgccatttactttgggctaaaaaatgattctactggaatccagaacagagctggggttctcttcttcctgacgaccaaccagtgtttcagcagtgtttcagccgtggaactctttgtggtagagaagaagctcttcatacatgaatacatcagcggatactacagagtgtcatcttatttccttggaaaactgttatctgatttattacccatgaggatgttaccaagtattatatttacctgtatagtgtacttcatgttaggattgaagccaaaggcagatgccttcttcgttatgatgtttacccttatgatggtggcttattcagccagttccatggcactggccatagcagcaggtcagagtgtggtttctgtagcaacacttctcatgaccatctgttttgtgtttatgatgattttttcaggtctgttggtcaatctcacaaccattgcatcttggctgtcatggcttcagtacttcagcattccacgatatggatttacggctttgcagcataatgaatttttgggacaaaacttctgcccaggactcaatgcaacaggaaacaatccttgtaactatgcaacatgtactggcgaagaatatttggtaaagcagggcatcgatctctcaccctggggcttgtggaagaatcacgtggccttggcttgtatgattgttattttcctcacaattgcctacctgaaattgttatttcttaaaaaatattcttaaatttccccttaattcagtatgatttatcctcacataaaaaagaagcactttgattgaagtattcaatcaagtttttttgttgttttctgttcccttgccatcacactgttgcacagcagcaattgttttaaagagatacatttttagaaatcacaacaaactgaattaaacatgaaagaacccaagacatcatgtatcgcatattagttaatctcctcagacagtaaccatggggaagaaatctggtctaatttattaatctaaaaaaggagaattgaattctggaaactcctgacaagttattactgtctctggcatttgtttcctcatctttaaaatgaataggtaggttagtagcccttcagtcttaatactttatgatgctatggtttgccattatttaataaatgacaaatgtattaatgctatactggaaatgtaaaattgaaaatatgttggaaaaaagattctgtcttatagggtaaaaaaagccaccggtgatagaaaaaaaatctttttgataagcacattaaagttaatagaacttaaaaatattc

SEQ ID NO: 296021 - DNA, 2624 bp, Homo sapiens
gggcaacctgtgcgtcagcgtccccggtgcttcggcgctccggccagtgacggcgaccaaacccagctaggtcagacgagaaagataaaaactctccagatgtcttccagtaatgtcgaagtttttatcccagtgtcacaaggaaacaccaatggcttccccgcgacagcttccaatgacctgaaggcatttactgaaggagctgtgttaagttttcataacatctgctatcgagtaaaactgaagagtggctttctaccttgtcgaaaaccagttgagaaagaaatattatcgaatatcaatgggatcatgaaacctggtctcaacgccatcctgggacccacaggtggaggcaaatcttcgttattagatgtcttagctgcaaggaaagatccaagtggattatctggagatgttctgataaatggagcaccgcgacctgccaatttcaaatgtaattcaggttacgtggtacaagatgatgttgtgatgggcactctgacggtgagagaaaacttacagttctcagcagctcttcggcttgcaacaactatgacgaatcatgaaaaaaacgaacggattaacagggtcattcaagagttaggtctggataaagtggcagactccaaggttggaactcagtttatccgtggtgtgtctggaggagaaagaaaaaggactagtataggaatggagcttatcactgatccttccatcttgttcttggatgagcctacaactggcttagactcaagcacagcaaatgctgtccttttgctcctgaaaaggatgtctaagcagggacgaacaatcatcttctccattcatcagcctcgatattccatcttcaagttgtttgatagcctcaccttattggcctcaggaagacttatgttccacgggcctgctcaggaggccttgggatactttgaatcagctggttatcactgtgaggcctataataaccctgcagacttcttcttggacatcattaatggagattccactgctgtggcattaaacagagaagaagactttaaagccacagagatcatagagccttccaagcaggataagccactcatagaaaaattagcggagatttatgtcaactcctccttctacaaagagacaaaagctgaattacatcaactttccgggggtgagaagaagaagaagatcacagtcttcaaggagatcagctacaccacctccttctgtcatcaactcagatgggtttccaagcgttcattcaaaaacttgctgggtaatccccaggcctctatagctcagatcattgtcacagtcgtactgggactggttataggtgccatttactttgggctaaaaaatgattctactggaatccagaacagagctggggttctcttcttcctgacgaccaaccagtgtttcagcagtgtttcagccgtggaactctttgtggtagagaagaagctcttcatacatgaatacatcagcggatactacagagtgtcatcttatttccttggaaaactgttatctgatttattacccatgaggatgttaccaagtattatatttacctgtatagtgtacttcatgttaggattgaagccaaaggcagatgccttcttcgttatgatgtttacccttatgatggtggcttattcagccagttccatggcactggccatagcagcaggtcagagtgtggtttctgtagcaacacttctcatgaccatctgttttgtgtttatgatgattttttcaggtctgttggtcaatctcacaaccattgcatcttggctgtcatggcttcagtacttcagcattccacgatatggatttacggctttgcagcataatgaatttttgggacaaaacttctgcccaggactcaatgcaacaggaaacaatccttgtaactatgcaacatgtactggcgaagaatatttggtaaagcagggcatcgatctctcaccctggggcttgtggaagaatcacgtggccttggcttgtatgattgttattttcctcacaattgcctacctgaaattgttatttcttaaaaaatattcttaaatttccccttaattcagtatgatttatcctcacataaaaaagaagcactttgattgaagtattcaatcaagtttttttgttgttttctgttcccttgccatcacactgttgcacagcagcaattgttttaaagagatacatttttagaaatcacaacaaactgaattaaacatgaaagaacccaagacatcatgtatcgcatattagttaatctcctcagacagtaaccatggggaagaaatctggtctaatttattaatctaaaaaaggagaattgaattctggaaactcctgacaagttattactgtctctggcatttgtttcctcatctttaaaatgaataggtaggttagtagcccttcagtcttaatactttatgatgctatggtttgccattatttaataaatgacaaatgtattaatgctatactggaaatgtaaaattgaaaatatgttggaaaaaagattctgtcttatagggtaaaaaaagccaccggtgatagaaaaaaaatctttttgataagcacattaaagttaatagaacttaaaaatattc

SEQ ID NO: 296022 - DNA, 2840 bp, Homo sapiens
aggggccactgcgttcagctctggcggtccacagcccgaagcgcggcttaggaagttcgtgtcagcgctgcctgagctcgtcccctggatgtccgggtctccccaggcggccacccgccggctcccatcgtgacctccagccgcagcgcctcccacgccggccgccgcgcgaggggagcgctcgggcgcgccgggtgtggttgggggaaggggttgtgccgcgcgcgggctgcgtgctgtgcccactcaaaaggttccgggcgcgcaggagggaagaggcagtgcccgccactcccactgagattgagagacgcggcaaggaggcagcctgtggaggaactgggtaggatttaggaacgcaccgtgcacatgcttggtggtcttgttaagtggaaactgctgctttagagtttgtttggaaggtccgggtgactcatcccaacatttacatccttaattgttaaagcgctgcctccgagcgcacgcatcctgagatcctgagcctttggttaagaccgagctctattaagctgaaaagataaaaactctccagatgtcttccagtaatgtcgaagtttttatcccagtgtcacaaggaaacaccaatggcttccccgcgacagcttccaatgacctgaaggcatttactgaaggagctgtgttaagttttcataacatctgctatcgagtaaaactgaagagtggctttctaccttgtcgaaaaccagttgagaaagaaatattatcgaatatcaatgggatcatgaaacctggtctcaacgccatcctgggacccacaggtggaggcaaatcttcgttattagatgtcttagctgcaaggaaagatccaagtggattatctggagatgttctgataaatggagcaccgcgacctgccaatttcaaatgtaattcaggttacgtggtacaagatgatgttgtgatgggcactctgacggtgagagaaaacttacagttctcagcagctcttcggcttgcaacaactatgacgaatcatgaaaaaaacgaacggattaacagggtcattcaagagttaggtctggataaagtggcagactccaaggttggaactcagtttatccgtggtgtgtctggaggagaaagaaaaaggactagtataggaatggagcttatcactgatccttccatcttgttcttggatgagcctacaactggcttagactcaagcacagcaaatgctgtccttttgctcctgaaaaggatgtctaagcagggacgaacaatcatcttctccattcatcagcctcgatattccatcttcaagttgtttgatagcctcaccttattggcctcaggaagacttatgttccacgggcctgctcaggaggccttgggatactttgaatcagctggttatcactgtgaggcctataataaccctgcagacttcttcttggacatcattaatggagattccactgctgtggcattaaacagagaagaagactttaaagccacagagatcatagagccttccaagcaggataagccactcatagaaaaattagcggagatttatgtcaactcctccttctacaaagagacaaaagctgaattacatcaactttccgggggtgagaagaagaagaagatcacagtcttcaaggagatcagctacaccacctccttctgtcatcaactcagatgggtttccaagcgttcattcaaaaacttgctgggtaatccccaggcctctatagctcagatcattgtcacagtcgtactgggactggttataggtgccatttactttgggctaaaaaatgattctactggaatccagaacagagctggggttctcttcttcctgacgaccaaccagtgtttcagcagtgtttcagccgtggaactctttgtggtagagaagaagctcttcatacatgaatacatcagcggatactacagagtgtcatcttatttccttggaaaactgttatctgatttattacccatgaggatgttaccaagtattatatttacctgtatagtgtacttcatgttaggattgaagccaaaggcagatgccttcttcgttatgatgtttacccttatgatggtggcttattcagccagttccatggcactggccatagcagcaggtcagagtgtggtttctgtagcaacacttctcatgaccatctgttttgtgtttatgatgattttttcaggtctgttggtcaatctcacaaccattgcatcttggctgtcatggcttcagtacttcagcattccacgatatggatttacggctttgcagcataatgaatttttgggacaaaacttctgcccaggactcaatgcaacaggaaacatttttttgttgttttctgttcccttgccatcacactgttgcacagcagcaattgttttaaagagatacatttttagaaatcacaacaaactgaattaaacatgaaagaacccaagacatcatgtatcgcatattagttaatctcctcagacagtaaccatggggaagaaatctggtctaatttattaatctaaaaaaggagaattgaattctggaaactcctgacaagttattactgtctctggcatttgtttcctcatctttaaaatgaataggtaggttagtagcccttcagtcttaatactttatgatgctatggtttgccattatttaataaatgacaaatgtattaatgctatactggaaatgtaaaattgaaaatatgttggaaaaaagattctgtcttatagggtaaaaaaagccaccggtgatagaaaaaaaatctttttgataagcacattaaagttaatagaacttaaaaatattc

SEQ ID NO: 296023 - DNA, 2509 bp, Homo sapiens
aggggccactgcgttcagctctggcggtccacagcccgaagcgcggcttaggaagttcgtgtcagcgctgcctgagctcgtcccctggatgtccgggtctccccaggcggccacccgccggctcccatcgtgacctccagccgcagcgcctcccacgccggccgccgcgcgaggggagcgctcgggcgcgccgggtgtggttgggggaaggggttgtgccgcgcgcgggctgcgtgctgtgcccactcaaaaggttccgggcgcgcaggagggaagaggcagtgcccgccactcccactgagattgagagacgcggcaaggaggcagcctgtggaggaactgggtaggatttaggaacgcaccgtgcacatgcttggtggtcttgttaagtggaaactgctgctttagagtttgtttggaaggtccgggtgactcatcccaacatttacatccttaattgttaaagcgctgcctccgagcgcacgcatcctgagatcctgagcctttggttaagaccgagctctattaagctgaaaagataaaaactctccagatgtcttccagtaatgtcgaagtttttatcccagtgtcacaaggaaacaccaatggcttccccgcgacagcttccaatgacctgaaggcatttactgaaggagctgtgttaagttttcataacatctgctatcgagtaaaactgaagagtggctttctaccttgtcgaaaaccagttgagaaagaaatattatcgaatatcaatgggatcatgaaacctggtctcaacgccatcctgggacccacaggtggaggcaaatcttcgttattagatgtcttagctgcaaggaaagatccaagtggattatctggagatgttctgataaatggagcaccgcgacctgccaatttcaaatgtaattcaggttacgtggtacaagatgatgttgtgatgggcactctgacggtgagagaaaacttacagttctcagcagctcttcggcttgcaacaactatgacgaatcatgaaaaaaacgaacggattaacagggtcattcaagagttaggtctggataaagtggcagactccaaggttggaactcagtttatccgtggtgtgtctggaggagaaagaaaaaggactagtataggaatggagcttatcactgatccttccatcttgttcttggatgagcctacaactggcttagactcaagcacagcaaatgctgtccttttgctcctgaaaaggatgtctaagcagggacgaacaatcatcttctccattcatcagcctcgatattccatcttcaagttgtttgatagcctcaccttattggcctcaggaagacttatgttccacgggcctgctcaggaggccttgggatactttgaatcagctggttatcactgtgaggcctataataaccctgcagacttcttcttggacatcattaatggagattccactgctgtggcattaaacagagaagaagactttaaagccacagagatcatagagccttccaagcaggataagccactcatagaaaaattagcggagatttatgtcaactcctccttctacaaagagacaaaagctgaattacatcaactttccgggggtgagaagaagaagaagatcacagtcttcaaggagatcagctacaccacctccttctgtcatcaactcagatgggtttccaagcgttcattcaaaaacttgctgggtaatccccaggcctctatagctcagatcattgtcacagtcgtactgggactggttataggtgccatttactttgggctaaaaaatgattctactggaatccagaacagagctggggttctcttcttcctgacgaccaaccagtgtttcagcagtgtttcagccgtggaactctttgtggtagagaagaagctcttcatacatgaatacatcagcggatactacagagtgtcatcttatttccttggaaaactgttatctgatttattacccatgaggatgttaccaagtattatatttacctgtatagtgtacttcatgttaggattgaagccaaaggcagatgccttcttcgttatgatgtttacccttatgatggtggcttattcagccagttccatggcactggccatagcagcaggtcagagtgtggtttctgtagcaacacttctcatgaccatctgttttgtgtttatgatgattttttcaggtctgttggtcaatctcacaaccattgcatcttggctgtcatggcttcagtacttcagcattccacgatatggatttacgatgtactggcgaagaatatttggtaaagcagggcatcgatctctcaccctggggcttgtggaagaatcacgtggccttggcttgtatgattgttattttcctcacaattgcctacctgaaattgttatttcttaaaaaatattcttaaatttccccttaattcagtatgatttatcctcacataaaaaagaagcactttgattgaagtattcaatcaag

SEQ ID NO: 296024 - DNA, 1296 bp, Homo sapiens
ggccacgaccagggacgcccagcacccagtgcagggcctgccctggaagaggtcagtagtgcaaagttagggctggaactgggaggaaattcgagcatgcgtcccagccggaggctgagcttgcgggcgaagaacacggcagcgctgggaaccgggctagggctttccgtgtgggccgcgcctgccggccctctctgttgtcccacttggcacggactgggctaccgccacggtttgacttccgccaccagcaaccaagggaaccagatcccaagggaaccagcacccctgggcgctcgcggcccgaagcctgaggttcccgccccgccccggcagggcggccccgccgacacccgtagcggtcccgccccccgcggccgcaccgcctcctgcctggtctcgggtgccagcgccgccggcggagaacaggagcatggagggcgggctggggcgtgctgtgtgcttgctgaccggggcctcccgcggcttcggccggacgctggccccgctcctggcctcgctgctgtcgcccggctccgtgcttgtccttagcgcccgcaacgacgaggcactgcgccagctggaggccgagctgggcgccgagcggtctggcctgcgcgtggtgcgggtgcccgccgacctgggcgccgaggccggcttgcagcagctgctcggcgccctgcgcgagctcccccggcccaaggggctgcagcgactgctgcttatcaacaacgcgggctctcttggggatgtgtccaaaggcttcgtggacctgagtgactccactcaagtgaacaactactgggcactgaacttgacctccatgctctgcctgacttccagcgtcctgaaggccttcccggacagtcctggcctcaacagaaccgtggttaacatctcgtccctctgtgccctgcaacctttcaaaggctgggcgctgtactgtgcaggaaaggctgctcgtgatatgctgttccaggtcctggcgctggaggaacctaatgtgagggtgctgaactatgccccaggtcctctggacacagacatgcagcagttggcccgggagacctccgtggacccagacatgcgaaaagggctgcaggagctgaaggcaaaggggaagctggtggattgcaaggtgtcagcccagaaactgctgagcttactggaaaaggacgagttcaagtctggagcccacgtggacttctatgacaaataagccagttttggtcctaactttggccccttgaataccgaactgggtccaaccgcaggggcccttcactaacattcggc

SEQ ID NO: 296025 - DNA, 1841 bp, Homo sapiens
ggccacgaccagggacgcccagcacccagtgcagggcctgccctggaagaggtcagtagtgcaaagttagggctggaactgggaggaaattcgagcatgcgtcccagccggaggctgagcttgcgggcgaagaacacggcagcgctgggaaccgggctagggctttccgtgtgggccgcgcctgccggccctctctgttgtcccacttggcacggactgggctaccgccacggtttgacttccgccaccagcaaccaagggaaccagatcccaagggaaccagcacccctgggcgctcgcggcccgaagcctgaggttcccgccccgccccggcagggcggccccgccgacacccgtagcggtcccgccccccgcggccgcaccgcctcctgcctggtctcgggtgccagcgccgccggcggagaacaggagcatggagggcgggctggggcgtgctgtgtgcttgctgaccggggcctcccgcggcttcggccggacgctggccccgctcctggcctcgctgctgtcgcccggctccgtgcttgtccttagcgcccgcaacgacgaggcactgcgccagctggaggccgagctgggcgccgagcggtctggcctgcgcgtggtgcgggtgcccgccgacctgggcgccgaggccggcttgcagcagctgctcggcgccctgcgcgagctcccccggcccaaggggctgcagcgactgctgcttatcaacaacgcgggctctcttggggatgtgtccaaaggcttcgtggacctgagtgactccactcaagtgaacaactactgggcactgaacttgacctccatgctctgcctgacttccagcgtcctgaaggccttcccggacagtcctggcctcaacagaaccgtggttaacatctcgtccctctgtgccctgcaacctttcaaaggctgggcgctgtactgtgcaggaaaggctgctcgtgatatgctgttccaggtcctggcgctggaggaacctaatgtgagggtgctgaactatgccccaggtcctctggacacagacatgcagcagttggcccgggagacctccgtggacccagacatgcgaaaagggctgcaggagctgaaggcaaaggggaagctggtggattgcaaggtgtcagcccagaaactgctgagcttactggaaaaggacgagttcaagtctggagcccacgtggacttctatgacaaataagcccatgtttttggcttcctgaacctttttgcccccacttttagacataccccagagccctgtggctccccacaccctgccataggggcagtcctgccttacacatagaagcattcatgcctgctgccctgccctcaggcacagccagctgtgagctcccaggtcattggccttaccagttgtcaggagtctgtgctgtgcaccctgggttataaggaggcttaggagagaggttatgggtattggtgtctctatccccaggaatagaacttaaggggtgggaagaacaggaaaagaagctggaacacagaagagaggaggttgtgtctcttgctcatagcaagcctgtgggtagaggaaagagtgatctggtgtcgaataggaggacccatgtagattcgcagatggcctggatgggaggaagggcagacggtacatgtcccagcccacatagatgccccttgctgagggtagcaggaccttctgttgaactttgtgtcctcactctgatgtctccttccttcagaatctaccacccctcccccaggctgggagaaggggctcctgggtgtctgtatacacgccaaaggcagatacaaataaaatacagattgtcctttca

SEQ ID NO: 296026 - DNA, 1763 bp, Homo sapiens
ggccacgaccagggacgcccagcacccagtgcagggcctgccctggaagaggtcagtagtgcaaagttagggctggaactgggaggaaattcgagcatgcgtcccagccggaggctgagcttgcgggcgaagaacacggcagcgctgggaaccgggctagggctttccgtgtgggccgcgcctgccggccctctctgttgtcccacttggcacggactgggctaccgccacggtttgacttccgccaccagcaaccaagggaaccagatcccaagggaaccagcacccctgggcgctcgcggcccgaagcctgaggttcccgccccgccccggcagggcggccccgccgacacccgtagcggtcccgccccccgcggccgcaccgcctcctgcctggtctcgggtgccagcgccgccggcggagaacaggagcatggagggcgggctggggcgtgctgtgtgcttgctgaccggggcctcccgcggcttcggccggacgctggccccgctcctggcctcgctgctgtcgcccggctccgtgcttgtccttagcgcccgcaacgacgaggcactgcgccagctggaggccgagctgggcgccgagcggtctggcctgcgcgtggtgcgggtgcccgccgacctgggcgccgaggccggcttgcagcagctgctcggcgccctgcgcgagctcccccggcccaaggggctgcagcgactgctgcttatcaacaacgcgggctctcttggggatgtgtccaaaggcttcgtggacctgagtgactccactcaagtgaacaactactgggcactgaacttgacctccatgctctgcctgacttccagcgtcctgaaggccttcccggacagtcctggcctcaacagaaccgtggttaacatctcgtccctctgtgccctgcaacctttcaaaggctgggcgctgtactgtgcaggaaaggctgctcgtgatatgctgttccaggtcctggcgctggaggaacctaatgtgagggtgctgaactatgccccaggtcctctggacacagacatgcagcagttggcccgggagacctccgtggacccagacatgcgaaaagggctgcaggagctgaaggcaaaggggaagctggtggattgcaaggtgtcagcccagaaactgctgagcttactggaaaaggacgagttcaagtctggagcccacgtggacttctatgacaaataagcccatgtttttggcttcctgaacctttttgcccccacttttagacataccccagagccctgtggctccccacaccctgccataggggcagtcctgccttacacatagaagcattcatgcctgctgccctgccctcaggcacagccagctgtgagctcccaggtcattggccttaccagttgtcaggagtctgtgctgtgcaccctgggttataaggaggcttaggagagaggttatgggtattggtgtctcttgctcatagcaagcctgtgggtagaggaaagagtgatctggtgtcgaataggaggacccatgtagattcgcagatggcctggatgggaggaagggcagacggtacatgtcccagcccacatagatgccccttgctgagggtagcaggaccttctgttgaactttgtgtcctcactctgatgtctccttccttcagaatctaccacccctcccccaggctgggagaaggggctcctgggtgtctgtatacacgccaaaggcagatacaaataaaatacagattgtcctttca

SEQ ID NO: 296027 - DNA, 2418 bp, Homo sapiens
ggccacgaccagggacgcccagcacccagtgcagggcctgccctggaagaggtcagtagtgcaaagttagggctggaactgggaggaaattcgagcatgcgtcccagccggaggctgagcttgcgggcgaagaacacggcagcgctgggaaccgggctagggctttccgtgtgggccgcgcctgccggccctctctgttgtcccacttggcacggactgggctaccgccacggtttgacttccgccaccagcaaccaagggaaccagatcccaagggaaccagcacccctgggcgctcgcggcccgaagcctgaggttcccgccccgccccggcagggcggccccgccgacacccgtagcggtcccgccccccgcggccgcaccgcctcctgcctggtctcgggtgccagcgccgccggcggagaacaggagcatggagggcgggctggggcgtgctgtgtgcttgctgaccggggcctcccgcggcttcggccggacgctggccccgctcctggcctcgctgctgtcgcccggctccgtgcttgtccttagcgcccgcaacgacgaggcactgcgccagctggaggccgagctgggcgccgagcggtctggcctgcgcgtggtgcgggtgcccgccgacctgggcgccgaggccggcttgcagcagctgctcggcgccctgcgcgagctcccccggcccaaggggctgcagcgactgctgcttatcaacaacgcgggtaagaccccggggctggagcggactccccatgtgagcgcccacttcctccaccgctggggaatttaagggctactcctaggggtcagataggacgcctagaaatctaaagccctagttgttccagcttgagtagcaagtggaggcgaggtgtacaggaagactcggtgccgtcgggacaacagtctgcccccacttcctggaaaattggccagccgggttttccaaagcgcctgtagaactttcccgagccccttgctctgcgccctctggcggaggcctgagtcagggcttggagtctccaaacaagtaaactctctgcttctccaaaggaccgctagagctttccttcagccccacggcaaggcaggtgccttctcattctgcagcttgggatggctaggttccccagctgtgtctttccgcagagctggggaagagagaagcctcttcagaagcgctaggcagcttcctcctctaggtctgcatgggaagaggatatctggaggaacttgggagggctggggaagaagaaagccccgcctgcactgagttactcctaagggttggtttttcaggctctcttggggatgtgtccaaaggcttcgtggacctgagtgactccactcaagtgaacaactactgggcactgaacttgacctccatgctctgcctgacttccagcgtcctgaaggccttcccggacagtcctggcctcaacagaaccgtggttaacatctcgtccctctgtgccctgcaacctttcaaaggctgggcgctgtactgtgcaggaaaggctgctcgtgatatgctgttccaggtcctggcgctggaggaacctaatgtgagggtgctgaactatgccccaggtcctctggacacagacatgcagcagttggcccgggagacctccgtggacccagacatgcgaaaagggctgcaggagctgaaggcaaaggggaagctggtggattgcaaggtgtcagcccagaaactgctgagcttactggaaaaggacgagttcaagtctggagcccacgtggacttctatgacaaataagcccatgtttttggcttcctgaacctttttgcccccacttttagacataccccagagccctgtggctccccacaccctgccataggggcagtcctgccttacacatagaagcattcatgcctgctgccctgccctcaggcacagccagctgtgagctcccaggtcattggccttaccagttgtcaggagtctgtgctgtgcaccctgggttataaggaggcttaggagagaggttatgggtattggtgtctctatccccaggaatagaacttaaggggtgggaagaacaggaaaagaagctggaacacagaagagaggaggttgtgtctcttgctcatagcaagcctgtgggtagaggaaagagtgatctggtgtcgaataggaggacccatgtagattcgcagatggcctggatgggaggaagggcagacggtacatgtcccagcccacatagatgccccttgctgagggtagcaggaccttctgttgaactttgtgtcctcactctgatgtctccttccttcagaatctaccacccctcccccaggctgggagaaggggctcctgggtgtctgtatacacgccaaaggcagatacaaataaaatacagattgtcctttca

SEQ ID NO: 296028 - DNA, 2206 bp, Homo sapiens
ggccacgaccagggacgcccagcacccagtgcagggcctgccctggaagaggtcagtagtgcaaagttagggctggaactgggaggaaattcgagcatgcgtcccagccggaggctgagcttgcgggcgaagaacacggcagcgctgggaaccgggctagggctttccgtgtgggccgcgcctgccggccctctctgttgtcccacttggcacggactgggctaccgccacggtttgacttccgccaccagcaaccaagggaaccagatcccaagggaaccagcacccctgggcgctcgcggcccgaagcctgaggttcccgccccgccccggcagggcggccccgccgacacccgtagcggtcccgccccccgcggccgcaccgcctcctgcctggtctcgggtgccagcgccgccggcggagaacaggagcatggagggcgggctggggcgtgctgtgtgcttgctgaccggggcctcccgcggcttcggccggacgctggccccgctcctggcctcgctgctgtcgcccggctccgtgcttgtccttagcgcccgcaacgacgaggcactgcgccagctggaggccgagctgggcgccgagcggtctggcctgcgcgtggtgcgggtgcccgccgacctgggcgccgaggccggcttgcagcagctgctcggcgccctgcgcgagctcccccggcccaaggggctgcagcgactgctgcttatcaacaacgcgggtaagaccccggggctggagcggactccccatgtgagcgcccacttcctccaccgctggggaatttaagggctactcctaggggtcagataggacgcctagaaatctaaagccctagttgttccagcttgagtagcaagtggaggcgaggtgtacaggaagactcggtgccgtcgggacaacagtctgcccccacttcctggaaaattggccagccgggttttccaaagcgcctgtagaactttcccgagccccttgctctgcgccctctggcggaggcctgagtcagggcttggagtctccaaacaagtaaactctctgcttctccaaaggaccgctagagctttccttcagccccacggcaaggctctcttggggatgtgtccaaaggcttcgtggacctgagtgactccactcaagtgaacaactactgggcactgaacttgacctccatgctctgcctgacttccagcgtcctgaaggccttcccggacagtcctggcctcaacagaaccgtggttaacatctcgtccctctgtgccctgcaacctttcaaaggctgggcgctgtactgtgcaggaaaggctgctcgtgatatgctgttccaggtcctggcgctggaggaacctaatgtgagggtgctgaactatgccccaggtcctctggacacagacatgcagcagttggcccgggagacctccgtggacccagacatgcgaaaagggctgcaggagctgaaggcaaaggggaagctggtggattgcaaggtgtcagcccagaaactgctgagcttactggaaaaggacgagttcaagtctggagcccacgtggacttctatgacaaataagcccatgtttttggcttcctgaacctttttgcccccacttttagacataccccagagccctgtggctccccacaccctgccataggggcagtcctgccttacacatagaagcattcatgcctgctgccctgccctcaggcacagccagctgtgagctcccaggtcattggccttaccagttgtcaggagtctgtgctgtgcaccctgggttataaggaggcttaggagagaggttatgggtattggtgtctctatccccaggaatagaacttaaggggtgggaagaacaggaaaagaagctggaacacagaagagaggaggttgtgtctcttgctcatagcaagcctgtgggtagaggaaagagtgatctggtgtcgaataggaggacccatgtagattcgcagatggcctggatgggaggaagggcagacggtacatgtcccagcccacatagatgccccttgctgagggtagcaggaccttctgttgaactttgtgtcctcactctgatgtctccttccttcagaatctaccacccctcccccaggctgggagaaggggctcctgggtgtctgtatacacgccaaaggcagatacaaataaaatacagattgtcctttca

SEQ ID NO: 296029 - DNA, 1816 bp, Homo sapiens
ggccacgaccagggacgcccagcacccagtgcagggcctgccctggaagaggtcagtagtgcaaagttagggctggaactgggaggaaattcgagcatgcgtcccagccggaggctgagcttgcgggcgaagaacacggcagcgctgggaaccgggctagggctttccgtgtgggccgcgcctgccggccctctctgttgtcccacttggcacggactgggctaccgccacggtttgacttccgccaccagcaaccaagggaaccagatcccaagggaaccagcacccctgggcgctcgcggcccgaagcctgaggttcccgccccgccccggcagggcggccccgccgacacccgtagcggtcccgccccccgcggccgcaccgcctcctgcctggtctcgggtgccagcgccgccggcggagaacaggagcatggagggcgggctggggcgtgctgtgtgcttgctgaccggggcctcccgcggcttcggccggacgctggccccgctcctggcctcgctgctgtcgcccggctccgtgcttgtccttagcgcccgcaacgacgaggcactgcgccagctggaggccgagctgggcgccgagcggtctggcctgcgcgtggtgcgggtgcccgccgacctgggcgccgaggccggcttgcagcagctgctcggcgccctgcgcgagctcccccggcccaaggggctgcagcgactgctgcttatcaacaacgcgggctctcttggggatgtgtccaaaggcttcgtggacctgagtgactccactcaagtgaacaactactgggcactgaacttgacctccatgctctgcctgacttccagcgtcctgaaggccttcccggacagtcctggcctcaacagaaccgtggttaacatctcgtccctctgtgccctgcaacctttcaaaggctgggcgctgtactgtgcaggaaaggctgctcgtgatatgctgttccaggtcctggcgctggaggaacctaatgtcctctggacacagacatgcagcagttggcccgggagacctccgtggacccagacatgcgaaaagggctgcaggagctgaaggcaaaggggaagctggtggattgcaaggtgtcagcccagaaactgctgagcttactggaaaaggacgagttcaagtctggagcccacgtggacttctatgacaaataagcccatgtttttggcttcctgaacctttttgcccccacttttagacataccccagagccctgtggctccccacaccctgccataggggcagtcctgccttacacatagaagcattcatgcctgctgccctgccctcaggcacagccagctgtgagctcccaggtcattggccttaccagttgtcaggagtctgtgctgtgcaccctgggttataaggaggcttaggagagaggttatgggtattggtgtctctatccccaggaatagaacttaaggggtgggaagaacaggaaaagaagctggaacacagaagagaggaggttgtgtctcttgctcatagcaagcctgtgggtagaggaaagagtgatctggtgtcgaataggaggacccatgtagattcgcagatggcctggatgggaggaagggcagacggtacatgtcccagcccacatagatgccccttgctgagggtagcaggaccttctgttgaactttgtgtcctcactctgatgtctccttccttcagaatctaccacccctcccccaggctgggagaaggggctcctgggtgtctgtatacacgccaaaggcagatacaaataaaatacagattgtcctttca

SEQ ID NO: 296030 - DNA, 902 bp, Homo sapiens
cgacaggaagactcctcaggagagctggagtgctgccgtcattaacgccaggccagaacacggcgggctaacagggcgctggcctgcgtgcccacctctaggtccgctaatatgtgcccagctctaggtccgctaatgtgctacgcgataactgaaagacagcacaagccagagcggacggccgcgggatcccgttggggcgcatgcgcgagagcgaacgcggcgccgtgcgcatgcgcgcaagagagcgggaagccgagctgggcgagaagtaggggagggcggtgctccgccgcggtggcggttgctatcgcttcgcagaacctactcaggcagccagctgagaagagttgagggaaagtgctgctgctgggtctgcagacgcgatggataacgtgcagccgaaaataaaacatcgccccttctgcttcagtgtgaaaggccacgtgaagatgctgcggctggcactaactgtgacatctatgaccttttttatcatcgcacaagcccctgaaccatatattgttatcactggatttgaagtcaccgttatcttatttttcatacttttatatgtactcagacttgatcgattaatgaagtggttattttggcctttgcttgatattatcaactcactggtaacaacagtattcatgctcatcgtatctgtgttggcactgataccagaaaccacaacattgacagttggtggaggggtgtttgcacttgtgacagcagtatgctgtcttgccgacggggcccttatttaccggaagcttctgttcaatcccagcggtccttaccagaaaaagcctgtgcatgaaaaaaaagaagttttgtaattttatattactttttagtttgatactaagtattaaacatatttctgtattcttcca

SEQ ID NO: 296031 - DNA, 743 bp, Homo sapiens
cgacaggaagactcctcaggagagctggagtgctgccgtcattaacgccaggccagaacacggcgggctaacagggcgctggcctgcgtgcccacctctaggtccgctaatatgtgcccagctctaggtccgctaatgtgctacgcgataactgaaagacagcacaagccagagcggacggccgcgggatcccgttggggcgcatgcgcgagagcgaacgcggcgccgtgcgcatgcgcgcaagagagcgggaagccgagctgggcgagaagtaggggagggcggtgctccgccgcggtggcggttgctatcgcttcgcagaacctactcaggcagccagctgagaagagttgagggaaagtgctgctgctgggtctgcagacgcgatggataacgtgcagccgaaaataaaacatcgccccttctgcttcagtgtgaaaggccacgtgaagatgctgcggctggatattatcaactcactggtaacaacagtattcatgctcatcgtatctgtgttggcactgataccagaaaccacaacattgacagttggtggaggggtgtttgcacttgtgacagcagtatgctgtcttgccgacggggcccttatttaccggaagcttctgttcaatcccagcggtccttaccagaaaaagcctgtgcatgaaaaaaaagaagttttgtaattttatattactttttagtttgatactaagtattaaacatatttctgtattcttcca

SEQ ID NO: 296032 - DNA, 964 bp, Homo sapiens
cgacaggaagactcctcaggagagctggagtgctgccgtcattaacgccaggccagaacacggcgggctaacagggcgctggcctgcgtgcccacctctaggtccgctaatatgtgcccagctctaggtccgctaatgtgctacgcgataactgaaagacagcacaagccagagcggacggccgcgggatcccgttggggcgcatgcgcgagagcgaacgcggcgccgtgcgcatgcgcgcaagagagcgggaagccgagctgggcgagaagtaggggagggcggtgctccgccgcggtggcggttgctatcgcttcgcagaacctactcaggcagccagctgagaagagttgagggaaagtgctgctgctgggtctgcagacgcgatggataacgtgcagccgaaaataaaacatcgccccttctgcttcagtgtgaaaggccacgtgaagatgctgcggctggcactaactgtgacatctatgaccttttttatcatcgcacaagcccctgaaccatatattgttatcactggatttgaagtcaccgttatcttatttttcatacttttatatgtactcagacttgatcgattaatgaagtggttattttggcctttgcttgatattatcaactcactggtaacaacagtattcatgctcatcgtatctgtgttggcactgataccagaaaccacaacattgacagttggtggaggggtgtttgcacttgtgacagcagtatgctgtcttgccgacggggcccttatttaccggaagcttctgttcaatcccagcggtccttaccagaaaaagcctgtgcatgaaaaaaaagaagttttgtaattttatattactttttagtttgatactaagtattaaacatatttctgtattcttccaaaaaaaaaaaaaaaaaaaaaaaaaaaaaaaacggggggttaaatggggggggggaaaagggg

SEQ ID NO: 296033 - DNA, 805 bp, Homo sapiens
cgacaggaagactcctcaggagagctggagtgctgccgtcattaacgccaggccagaacacggcgggctaacagggcgctggcctgcgtgcccacctctaggtccgctaatatgtgcccagctctaggtccgctaatgtgctacgcgataactgaaagacagcacaagccagagcggacggccgcgggatcccgttggggcgcatgcgcgagagcgaacgcggcgccgtgcgcatgcgcgcaagagagcgggaagccgagctgggcgagaagtaggggagggcggtgctccgccgcggtggcggttgctatcgcttcgcagaacctactcaggcagccagctgagaagagttgagggaaagtgctgctgctgggtctgcagacgcgatggataacgtgcagccgaaaataaaacatcgccccttctgcttcagtgtgaaaggccacgtgaagatgctgcggctggatattatcaactcactggtaacaacagtattcatgctcatcgtatctgtgttggcactgataccagaaaccacaacattgacagttggtggaggggtgtttgcacttgtgacagcagtatgctgtcttgccgacggggcccttatttaccggaagcttctgttcaatcccagcggtccttaccagaaaaagcctgtgcatgaaaaaaaagaagttttgtaattttatattactttttagtttgatactaagtattaaacatatttctgtattcttccaaaaaaaaaaaaaaaaaaaaaaaaaaaaaaaacggggggttaaatggggggggggaaaagggg

SEQ ID NO: 296034 - DNA, 806 bp, Homo sapiens
cgacaggaagactcctcaggagagctggagtgctgccgtcattaacgccaggccagaacacggcgggctaacagggcgctggcctgcgtgcccacctctaggtccgctaatatgtgcccagctctaggtccgctaatgtgctacgcgataactgaaagacagcacaagccagagcggacggccgcgggatcccgttggggcgcatgcgcgagagcgaacgcggcgccgtgcgcatgcgcgcaagagagcgggaagccgagctgggcgagaagtaggggagggcggtgctccgccgcggtggcggttgctatcgcttcgcagaacctactcaggcagccagctgagaagagttgagggaaagtgctgctgctgggtctgcagacgcgatggataacgtgcagccgaaaataaaacatcgccccttctgcttcagtgtgaaaggccacgtgaagatgctgcggctggcactaactgtgacatctatgaccttttttatcatcgcacaagcccctgaaccatatattgttatcactggatttgaagtcaccgttatcttatttttcatacttttatatgtactcagacttgatcgattaatgaagtggttattttggcctttgcttgtgtttgcacttgtgacagcagtatgctgtcttgccgacggggcccttatttaccggaagcttctgttcaatcccagcggtccttaccagaaaaagcctgtgcatgaaaaaaaagaagttttgtaattttatattactttttagtttgatactaagtattaaacatatttctgtattcttcca

SEQ ID NO: 296035 - DNA, 647 bp, Homo sapiens
cgacaggaagactcctcaggagagctggagtgctgccgtcattaacgccaggccagaacacggcgggctaacagggcgctggcctgcgtgcccacctctaggtccgctaatatgtgcccagctctaggtccgctaatgtgctacgcgataactgaaagacagcacaagccagagcggacggccgcgggatcccgttggggcgcatgcgcgagagcgaacgcggcgccgtgcgcatgcgcgcaagagagcgggaagccgagctgggcgagaagtaggggagggcggtgctccgccgcggtggcggttgctatcgcttcgcagaacctactcaggcagccagctgagaagagttgagggaaagtgctgctgctgggtctgcagacgcgatggataacgtgcagccgaaaataaaacatcgccccttctgcttcagtgtgaaaggccacgtgaagatgctgcggctggtgtttgcacttgtgacagcagtatgctgtcttgccgacggggcccttatttaccggaagcttctgttcaatcccagcggtccttaccagaaaaagcctgtgcatgaaaaaaaagaagttttgtaattttatattactttttagtttgatactaagtattaaacatatttctgtattcttcca

SEQ ID NO: 296036 - DNA, 297 bp, Homo sapiens
tttattgtgtgtttttaggatattatcaactcactggtaacaacagtattcatgctcatcgtatctgtgttggcactgataccagaaaccacaacattgacagttggtggaggggtgtttgcacttgtgacagcagtatgctgtcttgccgacggggcccttatttaccggaagcttctgttcaatcccagcggtccttaccagaaaaagcctgtgcatgaaaaaaaagaagttttgtaattttatattactttttagtttgatactaagtattaaacatatttctgtattcttcca

SEQ ID NO: 296037 - DNA, 136 bp, Homo sapiens
gcggccgcctactactactactgctcgaattcaagcttctaacgatgtacggggacatgaaaaaaaagaagttttgtaattttatattactttttagtttgatactaagtattaaacatatttctgtattcttcca

SEQ ID NO: 296038 - DNA, 1430 bp, Homo sapiens
cgacaggaagactcctcaggagagctggagtgctgccgtcattaacgccaggccagaacacggcgggctaacagggcgctggcctgcgtgcccacctctaggtccgctaatatgtgcccagctctaggtccgctaatgtgctacgcgataactgaaagacagcacaagccagagcggacggccgcgggatcccgttggggcgcatgcgcgagagcgaacgcggcgccgtgcgcatgcgcgcaagagagcgggaagccgagctgggcgagaagtaggggagggcggtgctccgccgcggtggcggttgctatcgcttcgcagaacctactcaggcagccagctgagaagagttgagggaaagtgctgctgctgggtctgcagacgcgatggataacgtgcagccgaaaataaaacatcgccccttctgcttcagtgtgaaaggccacgtgaagatgctgcggctggtgaggccgggccgcggagggcgggaggctgatgaagctgctggggggcgggagatgtgggtgtgaagtgcaaagctgaacgcctgtttgcttttcaacctcgctttgatcaagattgaaaggcaaggcatggcctccttggggaagaaggagagagatacggcactgtcctccccttaggagggtttagggacacactcattcatgaaaaccagagagggcggggcgccgtggcgcacacctgtggtcccagcactttgggaggccgggacgggaggatcgcttgatcccaggagttcgaggctgcagtgaacgttgatcgcaccactgcacacaagcctaggcgacagagaggtcctgcctctttaaaaacaaaaacaaaaaaaaaccctttttttaaattaaaaatcagatctacccaaatggtctacatttggacccacaaaccgggtacccaggttaccaggcgagacaactgcagttatacctctcagaagcccacaagatttgaaagaaaaaaaaaaaagcctcaggggtttcggtgaatgttgtgtggacttccgtgagacagacgtttgatgtgaactgagttcaaggctgatacagcccagaaccaggacaaggagagaactgctcgtttccgggagcagacttcctaccgggagcactgcagtcacttctgaacaggatattatcaactcactggtaacaacagtattcatgctcatcgtatctgtgttggcactgataccagaaaccacaacattgacagttggtggaggggtgtttgcacttgtgacagcagtatgctgtcttgccgacggggcccttatttaccggaagcttctgttcaatcccagcggtccttaccagaaaaagcctgtgcatgaaaaaaaagaagttttgtaattttatattactttttagtttgatactaagtattaaacatatttctgtattcttcca

SEQ ID NO: 296039 - DNA, 844 bp, Homo sapiens
cgacaggaagactcctcaggagagctggagtgctgccgtcattaacgccaggccagaacacggcgggctaacagggcgctggcctgcgtgcccacctctaggtccgctaatatgtgcccagctctaggtccgctaatgtgctacgcgataactgaaagacagcacaagccagagcggacggccgcgggatcccgttggggcgcatgcgcgagagcgaacgcggcgccgtgcgcatgcgcgcaagagagcgggaagccgagctgggcgagaagtaggggagggcggtgctccgccgcggtggcggttgctatcgcttcgcagaacctactcaggcagccagctgagaagagttgagggaaagtgctgctgctgggtctgcagacgcgatggataacgtgcagccgaagcactaactgtgacatctatgaccttttttatcatcgcacaagcccctgaaccatatattgttatcactggatttgaagtcaccgttatcttatttttcatacttttatatgtactcagacttgatcgattaatgaagtggttattttggcctttgcttgatattatcaactcactggtaacaacagtattcatgctcatcgtatctgtgttggcactgataccagaaaccacaacattgacagttggtggaggggtgtttgcacttgtgacagcagtatgctgtcttgccgacggggcccttatttaccggaagcttctgttcaatcccagcggtccttaccagaaaaagcctgtgcatgaaaaaaaagaagttttgtaattttatattactttttagtttgatactaagtattaaacatatttctgtattcttcca

SEQ ID NO: 296040 - DNA, 820 bp, Homo sapiens
catatatgtcagaagccatgattttcatctcccttaggccctgagcaacttcatgaggagtcagaattattctagaaatgagatagctctgtatcaatttcccccagcactttgggaggccgggacgggaggatcgcttgatcccaggagttcgaggctgcagtgaacgttgatcgcaccactgcacacaagcctaggcgacagagaggtcctgcctctttaaaaacaaaaacaaaaaaaaaccctttttttaaattaaaaatcagatctacccaaatggtctacatttggacccacaaaccgggtacccaggttaccaggcgagacaactgcagttatacctctcagaagcccacaagatttgaaagaaaaaaaaaaaagcctcaggggtttcggtgaatgttgtgtggacttccgtgagacagacgtttgatgtgaactgagttcaaggctgatacagcccagaaccaggacaaggagagaactgctcgtttccgggagcagacttcctaccgggagcactgcagtcacttctgaacaggatattatcaactcactggtaacaacagtattcatgctcatcgtatctgtgttggcactgataccagaaaccacaacattgacagttggtggaggggtgtttgcacttgtgacagcagtatgctgtcttgccgacggggcccttatttaccggaagcttctgttcaatcccagcggtccttaccagaaaaagcctgtgcatgaaaaaaaagaagttttgtaattttatattactttttagtttgatactaagtattaaacatatttctgtattcttcca

SEQ ID NO: 296041 - DNA, 371 bp, Homo sapiens
tatggatttcagagcccacactgctttattatttttctgctcacttaaattatcttttctctttctataggcaagtatttagaaaacttagcaatgaggagaataagatgatctctgaagtctctccatgttagtattagatgaagcacagggagcaatccgagtaccctagcaagagaggaatctggtgggcagaccacttaaaacttgtgtgaatgacaggagtggggaccatggttagggcagtgacacttgtctttctttccaggtgtttgcacttgtgacagcagtatgctgtcttgccgacggggcccttatttaccggaagcttctgttcaatcccagcggtccttaccagaaaaagcctgtgc

SEQ ID NO: 296042 - DNA, 2670 bp, Homo sapiens
  misc_feature (1934)..(1934): n is a, c, g, or t
  misc_feature (2547)..(2547): n is a, c, g, or t
cctacttcttgggctgtttcagtggcttcttcttgccaccttcgcggccggacatggcgcctgccgccgcttccccagaagttaagtttaaaagtagaaggcaaagaattgaacacactgacatattaattctttgaaaataaatttaaaactcctaacaaccgccatgtcctcatctttaggatggggataatgacagtccctccctccctcatggggctgcgatgatgaataaataggagattctaggtgaagtccaaatccagcacaagctgggaactctgttaagtggccattaccttttttccttggaggcaagggatctgtgctcccaaaattgatctgtgcagtaggaccaaatagtcctgctatagactatttgagtcagtccctcacgtccccatgatggatgactggttggctagggaagcaattctgcatgataaccaacagcatgcatgggctttggattcagacctgagtcgaatcctcaccgtgctgtttatctgcctcatgaacttgtgccagccccttaccctctctgggcctaatgtccctatatgtgaaatgggctcacagggctatagagaggaccagtgaaccaaggactgtcagatcgccagaacttaggacacatgggatggagattctaatcagggctcctgtgggtggaggattacccaggtgccgaggcaagagactgaaggcacaaactgtttcagtataataaagaaaatggttagaataagaatagtcataatacaaattagatatagagatgatcatggacaattatcaatcattattataaacattattaatcattagcttttaatattactctttgttgcattactaatataacctaggaataaccggtgggtatagggtcaggtgctgaagggacattgggagaagtgacctagaaggcaagaggtgagtcttctgtcacgcccgcataagggttgcttgagggctccttggtcaagtggtaacgccggtgtctgggaaggcacctgttacttagccgaccacgaaagggagtctcctttccttggaggagtcagggcacactctgctccaccagcttcttgtggaaggctggatattatccaggcctgcccgcagtcatccggaggcctaaacccctccctgtggtgctgtgcttcaatgggcacactcctcgtccactttcatgttcctcccatactcctggttcctctttgaagttcgtagtagatagtggtagaaggaatagggaaaatcttaaagtgtttgatctttcttataagtgcatagaagaaaacgctgacatatgctgccttctctgtctgcttcagctacctaagagggaagggccccctgtccagtgatcacgtgacttgcttcaccttgtcaatcacttagaagattcaccctccttaccctgcccccttgtcttgtatgcaataaatatcagtgcacccagcctttcggggccacttaccggtctccacgtcttggtggtagtggtcccccgggcccagctgttttctctttatctctttgtcttgtgtcttatttattacaatctctcgtctccgcacacagggagaacacccgctaagctccgtagggctggaccctacaggctccagagcatgccttccaagcacgtagccctttacctcttggggaagggagcagaagtccatgcgggcttcctgcaggcatcctcagtccacacttacctgctctcatgaggctttcaggcgtttgggggaagccctgcgtggtgagtgagggggagagagaagagaaggctgcatctccagagaaggacgagacacgcatcagagtcacttcctggggggcctcagagccgagtgtggctgggaagatgacattagctgacctaccttgtgtcaggcactgtgttgacctccttccctgcngggatgacttctgcactttgccgtcaggagccatagcatctttgtcatagccttgggagccaggctggtatgagttcaaacacccatgccacaattcctggtcatgggcagctcacccaatctctcagagccgccctcctccctgggagggggtctgttcacctcctccatcaccgtcagaggttcctgcaaggtcctatgggtggggggccattgtcccctgggaggtctgcctctcccatcaggccctacccccaattctttttcaggcctcagggacactcagccctggggctccgtccccctgctgtaatcagtcactttcttccttttgtagatgctttgcttattgttcgtccccaagttccgccaaactgtggcctctgaggagctcaaaacaagctgattgatgacatccaccaccacccctgcccgcccccccccccaaagcttccttcctgagaccaagccagggtattgctcaccctctgtgccagaaggtggattaagctacttatacgtagtctagcttttttcttgtaggtcaggatgtaagtgagagaccttgggaccagcaaacattttgcccagctgttggggtgtgaagaacatntcttcagtccaggagcaagaacagtgttgctccaggggaacttgggccagtgggtctattgtgccaaaaatgctgaccttcaggccccgcaggtgctctcctggggctgaagttgggagcagc

SEQ ID NO: 296043 - DNA, 491 bp, Homo sapiens
gatcgcacaagtggctgcaaccaggctctaggagggagaaagagcggatcccccaaccccctccgcccgcccgccccccgcgagacgcggcgccgcgcagggtcctagtgcccgctgtgcgaagggttcctgaatctggccacttcgctgggaggccctgggctccccagtgccacccgaagggcctgaggaggccatctgcaggatcattctggctgctgggcgaaggttcaactaaagaatggcaagagtagaagctggaaatctaattaggaggctcctgcagaccccaagctggggggtgatgacagccagactagagtggtggcagttgtctgattccagttaggttttgaaagtgaaaccatcaggacccactgatggatcggatgtgacacgtgaccataagagtgaagtcaaggagaaatcctggcaattcacacactgctggtgggagtgtagttaggcaaaaactactttgggaaactatt

SEQ ID NO: 296044 - DNA, 3344 bp, Homo sapiens
acatagagataaagggaatgaactataaagacactggcatctctgtttcccacaaatcaagacattcatgaaattaatgactaacttacaatgaattttttagaggtgtgtctcataaggaaaaacctggatgatatggaccccgcaggtgattgggggcgtagcctggagtgagggtttggctggtgtagcttggagtgaggccccctggcgtggagtcttgaggcctgctgagggcgtgagctggcatgaggcgaagagagggccatggcaccgactccgagatgggtcaaggacccgtacgggagtcgcaatcctcagaccctcccgcgctccagttccggataagcgagtataagccgctgaacatggcgggagtggagcagcccccgagccccgagctgcggcaggaaggcgtgaccgaatacgaagatggcggggccccggcgggagatggcgaggcgggcccccaacaggcggaggaccacccccagaatcctccagaagatcccaatcaggaccccccagaggatgatagcacctgtcagtgccaggcgtgcgggcctcaccaagccgcgggtccagatcttggttcctctaatgatggctgccctcagctgttccaggagcggtcagtcatagtggagaactcctcaggctctaccagcgcttctgagctcctcaaacccatgaagaagaggaagcgcagggaataccagagcccatcagaggaggagtcggagccagaggccatggagaagcaagaagaaggaaaggacccagagggacaacccactgctagcaccccagagagtgaggagtggagcagcagccagcctgcaacaggtgagaagaaggaatgctggtcgtgggagtcctacctagaggagcagaaggccattactgctccagtcagcctcttccaggactcccaggcagtcactcacaacaagaatggcttcaaactgggcatgaagttggaaggcattgaccctcaacacccgtccatgtacttcatcctcaccgtggctgaggtatgtggctatcgcctacgcctgcactttgatgggtattctgagtgccatgacttctgggtcaatgccaactcccctgacattcaccctgctggctggttcgagaagacgggccacaagctgcagcctcccaaaggttacaaggaggaggagttcagctggagccagtacctgcgcagcacaagagctcaggctgcccccaagcacctgtttgtgagccagagccacagtcccccacccctgggcttccaggtgggcatgaagctggaggctgttgaccgcatgaacccgtcccttgtctgcgtggccagtgtgaccgatgtggtggacagccgcttcctggtgcactttgacaactgggatgatacttatgactactggtgtgatcccagcagcccctacatccacccagtgggctggtgccagaagcaaggaaagcccctcacccctccacaagactacccagaccctgataacttctgttgggagaaatatctggaagaaactggggcctctgctgtccccacctgggccttcaaggtgcgaccccctcacagcttcctggtcaatatgaagctggaggctgtggaccgcaggaacccagccctgattcgcgtggccagcgtggaggatgtggaggaccatcggataaagatccactttgatggctggagtcatggctatgatttctggatcgacgctgaccacccagacatccaccctgccggctggtgctccaagacaggacatcccctgcagcctcctctcggacccagagagcccagctctgcctcccctgggggctgtccccctctcagctataggagcctgccccacactaggacctccaaatacagctttcaccaccggaagtgccccactcctggttgcgacggctctggccatgtcacaggcaagttcacagctcaccattgcctctcaggctgcccactggctgagaggaaccagagccggctgaaagcggagctgtctgactcggaggcctcagcccgcaagaagaacctctcaggcttctccccaaggaagaagcctcgccatcacggccgaattggacgccctccgaagtatcgaaagattccgcaggaagatttccagaccctcacgcccgatgtcgtgcaccagtccctcttcatgtcagccctgtcggcccaccctgaccgctcactctcagtgtgctgggagcagcactgcaagctcctgccaggagtagcgggcatctcagcctcgacagtcgccaagtggaccatcgatgaggtcttcggctttgttcagaccctgacaggttgtgaggaccaagcacgcctcttcaaagacgaggcaagaatagtcagagtgacccatgtatctgggaagactctagtctggactgtggcccagcttggggaccttgtgtgctcagatcatcttcaggaaggaaaaggcatcctggagacaggagtccattcactcctctgctctctacccactcatttgcttgccaaacttagctttgccagtgatagtcaatattaaagtgtacttttttcccctttaatccaatatagttgataattaaagtgtattttgaatgacacagatattgtgatttactgcaaggatcctaacacacacttaaaatcaagagccaaggagtagtgagttgtagataaaaaaagaatgtcagctttggagacagtctgggtttaaatcccagttctgtcaatttgagctgtttactgtctctgagcctacatcttcttgtctgtaaaatggagataaaatgggtttaatgaggtctaccttgcagagccattgtgagcattggaaatgatgaatgaatcataccagaacgtctagtataattacagtcatgcattgcttaacgatggggatacattcttagaaatgtgtcactaggcaattctgtcattgtgtaaacattatagaatgtacttacacaaacctagatgttatatgtatttttatttacatgtatattttcacatgaaataccaaatgtcacagcattattactgaatgtcagtcatttcccctacttgatctgcaatgccaatatcaagggccatgtatcaggtttctgtatatgttccactataatcttatgggaccatggttttaaatgtggaatcattgacagaaatgtctttatgtagcatatggctgtgtatcactagtatataatagagcaatattatggaggaatatgtagatccaatcactttacctatacaaaatgactgctatggtgggaacacaataaacaccagttttgacttttaaaaaaaaatt

SEQ ID NO: 296045 - DNA, 5207 bp, Homo sapiens
  misc_feature (2735)..(2735): n is a, c, g, or t
acatagagataaagggaatgaactataaagacactggcatctctgtttcccacaaatcaagacattcatgaaattaatgactaacttacaatgaattttttagaggtgtgtctcataaggaaaaacctggatgatatggaccccgcaggtgattgggggcgtagcctggagtgagggtttggctggtgtagcttggagtgaggccccctggcgtggagtcttgaggcctgctgagggcgtgagctggcatgaggcgaagagagggccatggcaccgactccgagatgggtcaaggacccgtacgggagtcgcaatcctcagaccctcccgcgctccagttccggataagcgagtataagccgctgaacatggcgggagtggagcagcccccgagccccgagctgcggcaggaaggcgtgaccgaatacgaagatggcggggccccggcgggagatggcgaggcgggcccccaacaggcggaggaccacccccagaatcctccagaagatcccaatcaggaccccccagaggatgatagcacctgtcagtgccaggcgtgcgggcctcaccaagccgcgggtccagatcttggttcctctaatgatggctgccctcagctgttccaggagcggtcagtcatagtggagaactcctcaggctctaccagcgcttctgagctcctcaaacccatgaagaagaggaagcgcagggaataccagagcccatcagaggaggagtcggagccagaggccatggagaagcaagaagaaggaaaggacccagagggacaacccactgctagcaccccagagagtgaggagtggagcagcagccagcctgcaacaggtgagaagaaggaatgctggtcgtgggagtcctacctagaggagcagaaggccattactgctccagtcagcctcttccaggactcccaggcagtcactcacaacaagaatggcttcaaactgggcatgaagttggaaggcattgaccctcaacacccgtccatgtacttcatcctcaccgtggctgaggtatgtggctatcgcctacgcctgcactttgatgggtattctgagtgccatgacttctgggtcaatgccaactcccctgacattcaccctgctggctggttcgagaagacgggccacaagctgcagcctcccaaaggttacaaggaggaggagttcagctggagccagtacctgcgcagcacaagagctcaggctgcccccaagcacctgtttgtgagccagagccacagtcccccacccctgggcttccaggtgggcatgaagctggaggctgttgaccgcatgaacccgtcccttgtctgcgtggccagtgtgaccgatgtggtggacagccgcttcctggtgcactttgacaactgggatgatacttatgactactggtgtgatcccagcagcccctacatccacccagtgggctggtgccagaagcaaggaaagcccctcacccctccacaagactacccagaccctgataacttctgttgggagaaatatctggaagaaactggggcctctgctgtccccacctgggccttcaaggtgcgaccccctcacagcttcctggtcaatatgaagctggaggctgtggaccgcaggaacccagccctgattcgcgtggccagcgtggaggatgtggaggaccatcggataaagatccactttgatggctggagtcatggctatgatttctggatcgacgctgaccacccagacatccaccctgccggctggtgctccaagacaggacatcccctgcagcctcctctcggacccagagagcccagctctgcctcccctgggggctgtccccctctcagctataggagcctgccccacactaggacctccaaatacagctttcaccaccggaagtgccccactcctggttgcgacggctctggccatgtcacaggcaagttcacagctcaccattgcctctcaggctgcccactggctgagaggaaccagagccggctgaaagcggagctgtctgactcggaggcctcagcccgcaagaagaacctctcaggcttctccccaaggaagaagcctcgccatcacggccgaattggacgccctccgaagtatcgaaagattccgcaggaagatttccagaccctcacgcccgatgtcgtgcaccagtccctcttcatgtcagccctgtcggcccaccctgaccgctcactctcagtgtgctgggagcagcactgcaagctcctgccaggagtagcgggcatctcagcctcgacagtcgccaagtggaccatcgatgaggtcttcggctttgttcagaccctgacaggttgtgaggaccaagcacgcctcttcaaagacgagatgattgacggcgaggccttccttttgctgacacaggcggacattgtgaagatcatgagcgtcaagctgggcccagccttgaagatctataacgccattctcatgttcaaaaacgctgatgacaccttaaagtgactggcccagggctgggccctcctgcagcccctgcttggcctccctctccagctgatgctttcttcctgacctgaattcctcataccccacacgtccccatgctccacctatatctgaccaggctggtccttcttagagggtgcatgggagctgaggagccctggggagggtaggcacccagccccaagtcctagagctcattcgtcaccaggcatgttggtgagggcntgactggcaggggcattactcatggagtcagttggactgtggcagccccacagccccagtggacttttattgtattaccaaagggtctttttcttggcagtggaggagagactagtagagcagcagtccttcaatctgaggcccctttcccttttttggtatctctgtgtacttttctctccttggctcctttcctcctgccaagaagtgaccccaccacaaatgtatttactcctggaggtacctcctctctttctgtctgctggttttgctgccctcattctgctgcttcgtttcctgggcagtgcccccagccagaccccactggctcttccccctgagatatgtgaacctcggaaacatgttttcctaagatcccttggaagtctctagctgcctttctctcttttgcccagaattgagagattttgagccaagatgccttcctgaacttacccagttctggaccagttggcattttagtgtcccacgccaagtccaagtttcagcagaatgagcaggtggtttgagcctgttttatagatggcagaggttgaggttccactgctgttttccatacacccttcatgtgttgagtctgggaaggagtaagcctagcctgccagtagcctaggttaggagaccagcataaggatttgttagacaatctcgggtctttggccagaggggcagctccagcaggcatagtggtgcctgaagttaggaatactgtactctctgtagctttggacctcagccaaggtattgcccatggggtgatggctccaggcctgccaggccttctgccatgagaatgtagcactctgtgtagcacacacccccatgacatcatttaacctgtcccttaaatgttgaccattagctcttgcagcgtcttacaaagacgacttgaagttgggagttaggaaggtgaacttttctatctgaattctccgggtccctgaagccctccttgccgctctccatctgtcttgcactgccagctgggtccctgctggggctctgggacttccacttctcagtccacataggaacccagcttccactgagtcactgccaaacctgcctcccagcctgggtgggaagggggagagccactggtaggagccagccccacatggaggtgaggagccactgccaacctcccgtgtccaggtgctgatgtgggcctgcggagtgtggggctggtgccttcacccagaccccttcaatcatgtgatgtgtgtgtgtgtgcatgtgtgtgtgtgtgtgtgtgtggcactctcagaagtgtttgacagggtgcagatgtgaggcttagtgttgggaaaatgccaagggctattatcattaaaatttgaagctttatttttcccttagaagtgggaaacccagagctctgttgatttcctaccacaacccagtaggggcctctctctgccatgggctggacagctttttgaggaagccattcagctcccacagttgagctcccacagggctttaggtgtccattccctctcaactgcttagaggcagctttgagcacagccttcctggaaggaagctaggcaagacctgccacacagcgaaggttgggtttacaagggtgacattggtacccccttggccaagagtaaagaagaacaagtctaagccttgcttttatcttagttgtctgggtggtagcagaactcatcagctccttatcctcagtctgttcctctataaaagatgagagatgttcactgactttgtgcagtgagaaggcagcaagtactcacggctggtgctgtgggacctcacagcttctaaggagaggggctgggagggcctttgccatcagatctgccaagcacctaatgcttgcctgtggtgaaggcaagatggaccaagggccttggagaaaagggctcccaggcttctgaactttgaggcctcagcactttctgcattatcgtcaaactctttggaaagaaaccaaatcattaaaaagtagaaagaaatctgcctcttgtctgccctactgcccctttacccccactctgtccccaaatgatattattgcaccttgacctgggagcgcagagaggggagggagttggcagagacttctggtgccctctgccctcctagcaacagatgccacttatattttggcccctggcagcctcgcccagcccctgatcagcccaggcctagggcagttaggacctttctgtttattttctgaagcagagagaatgatctcagagtttgcaaatgaagccttttttgcactttcattcacatgcactttggtggggttacatttttgtacttgcctcttgtgtgtgcacatgtgtgtatgtgttctttaagagaatcttctggcttaagctaaggtgactcttgaaggagaaaaagttacaaacaaaatgtggtgtgatctgtcagtgtatcaaaacaacataaataaacttgaacaactga

SEQ ID NO: 296046 - DNA, 5453 bp, Homo sapiens
  misc_feature (2981)..(2981): n is a, c, g, or t
gggggctatgtttggcttgtaggcctgccaggatggaggggcatgctgggatggaggggcatgctgaaatggagatgctgaggacactgaaggggccttccacaggggaggtcagcatgcacttggtggccggagacagccccggttctggtcctcacctgcccgcaactgccttcatcattccagccagttcggccaccctcggcctgcccagcagtgccctggatgtgtcttgctttccccgggagccaatccatgtgggtgccccggagcaagtggccggctgcgaaccagtttctgccaccgtcctgccgcagcttagcgccgggccggccagctccagcaccagcacagtgcggcttctggaatggacagaggccgcggccccgcccccagggggcggcctgcggttccggataagcgagtataagccgctgaacatggcgggagtggagcagcccccgagccccgagctgcggcaggaaggcgtgaccgaatacgaagatggcggggccccggcgggagatggcgaggcgggcccccaacaggcggaggaccacccccagaatcctccagaagatcccaatcaggaccccccagaggatgatagcacctgtcagtgccaggcgtgcgggcctcaccaagccgcgggtccagatcttggttcctctaatgatggctgccctcagctgttccaggagcggtcagtcatagtggagaactcctcaggctctaccagcgcttctgagctcctcaaacccatgaagaagaggaagcgcagggaataccagagcccatcagaggaggagtcggagccagaggccatgtgatagggggatgtctgctggagctgcactcctgctggcggcctagaagaaattctgcctgtttggggcagaacaccacatggccagagagccaggtaggggccaggatcagaccctagggcttcatcccaaaccatgaggagaagaagctgggatcaggcttgccttctacaggagaagcaagaagaaggaaaggacccagagggacaacccactgctagcaccccagagagtgaggagtggagcagcagccagcctgcaacaggtgagaagaaggaatgctggtcgtgggagtcctacctagaggagcagaaggccattactgctccagtcagcctcttccaggactcccaggcagtcactcacaacaagaatggcttcaaactgggcatgaagttggaaggcattgaccctcaacacccgtccatgtacttcatcctcaccgtggctgaggtatgtggctatcgcctacgcctgcactttgatgggtattctgagtgccatgacttctgggtcaatgccaactcccctgacattcaccctgctggctggttcgagaagacgggccacaagctgcagcctcccaaaggttacaaggaggaggagttcagctggagccagtacctgcgcagcacaagagctcaggctgcccccaagcacctgtttgtgagccagagccacagtcccccacccctgggcttccaggtgggcatgaagctggaggctgttgaccgcatgaacccgtcccttgtctgcgtggccagtgtgaccgatgtggtggacagccgcttcctggtgcactttgacaactgggatgatacttatgactactggtgtgatcccagcagcccctacatccacccagtgggctggtgccagaagcaaggaaagcccctcacccctccacaagactacccagaccctgataacttctgttgggagaaatatctggaagaaactggggcctctgctgtccccacctgggccttcaaggtgcgaccccctcacagcttcctggtcaatatgaagctggaggctgtggaccgcaggaacccagccctgattcgcgtggccagcgtggaggatgtggaggaccatcggataaagatccactttgatggctggagtcatggctatgatttctggatcgacgctgaccacccagacatccaccctgccggctggtgctccaagacaggacatcccctgcagcctcctctcggacccagagagcccagctctgcctcccctgggggctgtccccctctcagctataggagcctgccccacactaggacctccaaatacagctttcaccaccggaagtgccccactcctggttgcgacggctctggccatgtcacaggcaagttcacagctcaccattgcctctcaggctgcccactggctgagaggaaccagagccggctgaaagcggagctgtctgactcggaggcctcagcccgcaagaagaacctctcaggcttctccccaaggaagaagcctcgccatcacggccgaattggacgccctccgaagtatcgaaagattccgcaggaagatttccagaccctcacgcccgatgtcgtgcaccagtccctcttcatgtcagccctgtcggcccaccctgaccgctcactctcagtgtgctgggagcagcactgcaagctcctgccaggagtagcgggcatctcagcctcgacagtcgccaagtggaccatcgatgaggtcttcggctttgttcagaccctgacaggttgtgaggaccaagcacgcctcttcaaagacgagatgattgacggcgaggccttccttttgctgacacaggcggacattgtgaagatcatgagcgtcaagctgggcccagccttgaagatctataacgccattctcatgttcaaaaacgctgatgacaccttaaagtgactggcccagggctgggccctcctgcagcccctgcttggcctccctctccagctgatgctttcttcctgacctgaattcctcataccccacacgtccccatgctccacctatatctgaccaggctggtccttcttagagggtgcatgggagctgaggagccctggggagggtaggcacccagccccaagtcctagagctcattcgtcaccaggcatgttggtgagggcntgactggcaggggcattactcatggagtcagttggactgtggcagccccacagccccagtggacttttattgtattaccaaagggtctttttcttggcagtggaggagagactagtagagcagcagtccttcaatctgaggcccctttcccttttttggtatctctgtgtacttttctctccttggctcctttcctcctgccaagaagtgaccccaccacaaatgtatttactcctggaggtacctcctctctttctgtctgctggttttgctgccctcattctgctgcttcgtttcctgggcagtgcccccagccagaccccactggctcttccccctgagatatgtgaacctcggaaacatgttttcctaagatcccttggaagtctctagctgcctttctctcttttgcccagaattgagagattttgagccaagatgccttcctgaacttacccagttctggaccagttggcattttagtgtcccacgccaagtccaagtttcagcagaatgagcaggtggtttgagcctgttttatagatggcagaggttgaggttccactgctgttttccatacacccttcatgtgttgagtctgggaaggagtaagcctagcctgccagtagcctaggttaggagaccagcataaggatttgttagacaatctcgggtctttggccagaggggcagctccagcaggcatagtggtgcctgaagttaggaatactgtactctctgtagctttggacctcagccaaggtattgcccatggggtgatggctccaggcctgccaggccttctgccatgagaatgtagcactctgtgtagcacacacccccatgacatcatttaacctgtcccttaaatgttgaccattagctcttgcagcgtcttacaaagacgacttgaagttgggagttaggaaggtgaacttttctatctgaattctccgggtccctgaagccctccttgccgctctccatctgtcttgcactgccagctgggtccctgctggggctctgggacttccacttctcagtccacataggaacccagcttccactgagtcactgccaaacctgcctcccagcctgggtgggaagggggagagccactggtaggagccagccccacatggaggtgaggagccactgccaacctcccgtgtccaggtgctgatgtgggcctgcggagtgtggggctggtgccttcacccagaccccttcaatcatgtgatgtgtgtgtgtgtgcatgtgtgtgtgtgtgtgtgtgtggcactctcagaagtgtttgacagggtgcagatgtgaggcttagtgttgggaaaatgccaagggctattatcattaaaatttgaagctttatttttcccttagaagtgggaaacccagagctctgttgatttcctaccacaacccagtaggggcctctctctgccatgggctggacagctttttgaggaagccattcagctcccacagttgagctcccacagggctttaggtgtccattccctctcaactgcttagaggcagctttgagcacagccttcctggaaggaagctaggcaagacctgccacacagcgaaggttgggtttacaagggtgacattggtacccccttggccaagagtaaagaagaacaagtctaagccttgcttttatcttagttgtctgggtggtagcagaactcatcagctccttatcctcagtctgttcctctataaaagatgagagatgttcactgactttgtgcagtgagaaggcagcaagtactcacggctggtgctgtgggacctcacagcttctaaggagaggggctgggagggcctttgccatcagatctgccaagcacctaatgcttgcctgtggtgaaggcaagatggaccaagggccttggagaaaagggctcccaggcttctgaactttgaggcctcagcactttctgcattatcgtcaaactctttggaaagaaaccaaatcattaaaaagtagaaagaaatctgcctcttgtctgccctactgcccctttacccccactctgtccccaaatgatattattgcaccttgacctgggagcgcagagaggggagggagttggcagagacttctggtgccctctgccctcctagcaacagatgccacttatattttggcccctggcagcctcgcccagcccctgatcagcccaggcctagggcagttaggacctttctgtttattttctgaagcagagagaatgatctcagagtttgcaaatgaagccttttttgcactttcattcacatgcactttggtggggttacatttttgtacttgcctcttgtgtgtgcacatgtgtgtatgtgttctttaagagaatcttctggcttaagctaaggtgactcttgaaggagaaaaagttacaaacaaaatgtggtgtgatctgtcagtgtatcaaaacaacataaataaacttgaacaactga

SEQ ID NO: 296047 - DNA, 4629 bp, Homo sapiens
  misc_feature (1890)..(1890): n is a, c, g, or t
acatagagataaagggaatgaactataaagacactggcatctctgtttcccacaaatcaagacattcatgaaattaatgactaacttacaatgaattttttagaggtgtgtctcataaggaaaaacctggatgatatggaccccgcaggtgattgggggcgtagcctggagtgagggtttggctggtgtagcttggagtgaggccccctggcgtggagtcttgaggcctgctgagggcgtgagctggcatgaggcgaagagagggccatggcaccgactccgagatgggtcaaggacccgtacgggagtcgcaatcctcagaccctcccgcgctccagttccggataagcgagtataagccgctgaacatggcgggagtggagcagcccccgagccccgagctgcggcaggaaggcgtgaccgaatacgaagatggcggggccccggcgggagatggcgaggcgggcccccaacaggcggaggaccacccccagaatcctccagaagatcccaatcaggaccccccagaggatgatagcacctgtcagtgccaggcgtgcgggcctcaccaagccgcgggtccagatcttggttcctctaatgatggctgccctcagctgttccaggagcggtcagtcatagtggagaactcctcaggctctaccagcgcttctgagctcctcaaacccatgaagaagaggaagcgcagggaataccagagcccatcagaggaggagtcggagccagaggccatggagaagcaagaagaaggaaaggacccagagggacaacccactgctagcaccccagagagtgaggagtggagcagcagccagcctgcaacaggtgagaagaaggaatgctggtcgtgggagtcctacctagaggagcagaaggccattactgctccagtcagcctcttccaggactcccaggcagtcactcacaacaagaatggcttcaaactgggcatgaagttggaaggcattgaccctcaacacccgtccatgtacttcatcctcaccgtggctgaggtatgtggctatcgcctacgcctgcactttgatgggtattctgagtgccatgacttctgggtcaatgccaactcccctgacattcaccctgctggctggttcgagaagacgggccacaagctgcagcctcccaaaggttacaaggaggaggagttcagctggagccagtacctgcgcagcacaagagctcaggctgcccccaagcacctgtttgtgagccagagccacgtgagtgcccctgagtgagagtggatgtcactcccatgtgccagagttcactgcagctggcccagggtatctgactcatcagaagggagctcatgtgctggttctctcagctttgttctgatctctcatatcagatgggaggggtacagctgggcagggtccagggccagagatgggaagctggttataggtttttcccgacttccctccctcctttgctactgcagataccctgtcctcacatccccttggagcccctggcccactaccctagtctgagcactgagatgtcattgctcatatattcttgctttggcttgctctgcagttctttggtgtaaggtcaatgcctctattctgggagcttctttttctttccttttgcccaacattgagactcttccatttatttccaacaattcatcccttgtcctttcctctgttcagggcagctggcagcttatccagcagttaaagtatctcataatcccaaccaaaaggcctaagagatacagggagcctccattaaaaatatcatactggaccaggtgtggcggctcatgcctgtaatcccagcactttgggaggctgaggcgggtggatcacctgaggtcaggagttcaagacnagcctgggcaacatggtgaaacccccatctctactaaaaatataaaaaattagctgggcgtggtggtgggtgtctgtaatcccagttactcaggatgctgaggcaggagaatcgcttgaacctggggggcggaagttgcagtgagccaagatcacgccattgcactccggtctcagcaacaagaacgaaactccgtctcaaaaaaaagaagtatgtatcagtcttactggctgggtgcggtggctcacacctgtaattccagtactttgggaggctgaggcgggaggatcacttgagcccaggagtttgagaccagcgtaggcaacatagtgagaccccatctgtacaaaaaatgtcattaaattattagctgggcatggtgcatgtgcctgtagtcctagataccacagtagctagctgagctgggaggattgtttgagcccaggaattcaaggctacagcaagctatgattgtaccactgtaccccagcctgggcgacagagtgagaccctgtgtctaaagaaaaaaaaccatattgaatgtctagagtttccctgggcccaggactccaccatgctcttcaggcagagacagttactcccctaccccagtccagccccagagttcatacttgcaagttcccaggtgacaggtggggtcctgcctgctgttgtgacaacgaatgccgacttttaattcaaactatttaaatactggccccgccgttgactagcattgtgttctgggccaagtgatttaacttcttaaatgggaatagggttgttgtaaaggtccaaggaggtgatgtcttttgaagcttacatggcaggtactcagtttatactggttccctgtctgcctctatgccatagatgtccgctgtttcttcccagccaccccactgttgccacaactgcctcaggacaagctgggaagggcttgtctgggtagggaagatttatacttggttcaccaggttctttgggcgaacgcatagcctccttccaggcacttaccttctgacacaagccaggcctctgagtgcaccttggaggccagaggttcctgagtgcctcagggctcaggttatgattctgccctggagggccctctttcccagcttatttctccttcctttctcactgcccacaccccaggctttcctagagaacctattcctttgtttgccaatgggctctgggctggtcttagccagcttggccctggccgtggcagctcctttttttcccctagagtcccccacccctgggcttccaggtgggcatgaagctggaggctgttgaccgcatgaacccgtcccttgtctgcgtggccagtgtgaccgatgtggtggacagccgcttcctggtgcactttgacaactgggatgatacttatgactactggtgtgatcccagcagcccctacatccacccagtgggctggtgccagaagcaaggaaagcccctcacccctccacaagactacccagaccctgataacttctgttgggagaaatatctggaagaaactggggcctctgctgtccccacctgggccttcaaggtgcgaccccctcacagcttcctggtcaatatgaagctggaggctgtggaccgcaggaacccagccctgattcgcgtggccagcgtggaggatgtggaggaccatcggataaagatccactttgatggctggagtcatggctatgatttctggatcgacgctgaccacccagacatccaccctgccggctggtgctccaagacaggacatcccctgcagcctcctctcggacccagagagcccagctctgcctcccctgggggctgtccccctctcagctataggagcctgccccacactaggacctccaaatacagctttcaccaccggaagtgccccactcctggttgcgacggctctggccatgtcacaggcaagttcacagctcaccattgcctctcaggctgcccactggctgagaggaaccagagccggctgaaagcggagctgtctgactcggaggcctcagcccgcaagaagaacctctcaggcttctccccaaggaagaagcctcgccatcacggccgaattggacgccctccgaagtatcgaaagattccgcaggaagatttccagaccctcacgcccgatgtcgtgcaccagtccctcttcatgtcagccctgtcggcccaccctgaccgctcactctcagtgtgctgggagcagcactgcaagctcctgccaggagtagcgggcatctcagcctcgacagtcgccaagtggaccatcgatgaggtcttcggctttgttcagaccctgacaggttgtgaggaccaagcacgcctcttcaaagacgaggtaaggtgcaagtgcagagtgggagacagagccggggtcactgtccttaagacggcaggaagcaggtgccctccccagcgtcacttctgctaaggagggacccgtgttgccccaccaggcaagaatagtcagagtgacccatgtatctgggaagactctagtctggactgtggcccagcttggggaccttgtgtgctcagatcatcttcaggaaggaaaaggcatcctggagacaggagtccattcactcctctgctctctacccactcatttgcttgccaaacttagctttgccagtgatagtcaatattaaagtgtacttttttcccctttaatccaatatagttgataattaaagtgtattttgaatgaca

SEQ ID NO: 296048 - DNA, 7519 bp, Homo sapiens
  misc_feature (1890)..(1890): n is a, c, g, or t
  misc_feature (4618)..(4618): n is a, c, g, or t
acatagagataaagggaatgaactataaagacactggcatctctgtttcccacaaatcaagacattcatgaaattaatgactaacttacaatgaattttttagaggtgtgtctcataaggaaaaacctggatgatatggaccccgcaggtgattgggggcgtagcctggagtgagggtttggctggtgtagcttggagtgaggccccctggcgtggagtcttgaggcctgctgagggcgtgagctggcatgaggcgaagagagggccatggcaccgactccgagatgggtcaaggacccgtacgggagtcgcaatcctcagaccctcccgcgctccagttccggataagcgagtataagccgctgaacatggcgggagtggagcagcccccgagccccgagctgcggcaggaaggcgtgaccgaatacgaagatggcggggccccggcgggagatggcgaggcgggcccccaacaggcggaggaccacccccagaatcctccagaagatcccaatcaggaccccccagaggatgatagcacctgtcagtgccaggcgtgcgggcctcaccaagccgcgggtccagatcttggttcctctaatgatggctgccctcagctgttccaggagcggtcagtcatagtggagaactcctcaggctctaccagcgcttctgagctcctcaaacccatgaagaagaggaagcgcagggaataccagagcccatcagaggaggagtcggagccagaggccatggagaagcaagaagaaggaaaggacccagagggacaacccactgctagcaccccagagagtgaggagtggagcagcagccagcctgcaacaggtgagaagaaggaatgctggtcgtgggagtcctacctagaggagcagaaggccattactgctccagtcagcctcttccaggactcccaggcagtcactcacaacaagaatggcttcaaactgggcatgaagttggaaggcattgaccctcaacacccgtccatgtacttcatcctcaccgtggctgaggtatgtggctatcgcctacgcctgcactttgatgggtattctgagtgccatgacttctgggtcaatgccaactcccctgacattcaccctgctggctggttcgagaagacgggccacaagctgcagcctcccaaaggttacaaggaggaggagttcagctggagccagtacctgcgcagcacaagagctcaggctgcccccaagcacctgtttgtgagccagagccacgtgagtgcccctgagtgagagtggatgtcactcccatgtgccagagttcactgcagctggcccagggtatctgactcatcagaagggagctcatgtgctggttctctcagctttgttctgatctctcatatcagatgggaggggtacagctgggcagggtccagggccagagatgggaagctggttataggtttttcccgacttccctccctcctttgctactgcagataccctgtcctcacatccccttggagcccctggcccactaccctagtctgagcactgagatgtcattgctcatatattcttgctttggcttgctctgcagttctttggtgtaaggtcaatgcctctattctgggagcttctttttctttccttttgcccaacattgagactcttccatttatttccaacaattcatcccttgtcctttcctctgttcagggcagctggcagcttatccagcagttaaagtatctcataatcccaaccaaaaggcctaagagatacagggagcctccattaaaaatatcatactggaccaggtgtggcggctcatgcctgtaatcccagcactttgggaggctgaggcgggtggatcacctgaggtcaggagttcaagacnagcctgggcaacatggtgaaacccccatctctactaaaaatataaaaaattagctgggcgtggtggtgggtgtctgtaatcccagttactcaggatgctgaggcaggagaatcgcttgaacctggggggcggaagttgcagtgagccaagatcacgccattgcactccggtctcagcaacaagaacgaaactccgtctcaaaaaaaagaagtatgtatcagtcttactggctgggtgcggtggctcacacctgtaattccagtactttgggaggctgaggcgggaggatcacttgagcccaggagtttgagaccagcgtaggcaacatagtgagaccccatctgtacaaaaaatgtcattaaattattagctgggcatggtgcatgtgcctgtagtcctagataccacagtagctagctgagctgggaggattgtttgagcccaggaattcaaggctacagcaagctatgattgtaccactgtaccccagcctgggcgacagagtgagaccctgtgtctaaagaaaaaaaaccatattgaatgtctagagtttccctgggcccaggactccaccatgctcttcaggcagagacagttactcccctaccccagtccagccccagagttcatacttgcaagttcccaggtgacaggtggggtcctgcctgctgttgtgacaacgaatgccgacttttaattcaaactatttaaatactggccccgccgttgactagcattgtgttctgggccaagtgatttaacttcttaaatgggaatagggttgttgtaaaggtccaaggaggtgatgtcttttgaagcttacatggcaggtactcagtttatactggttccctgtctgcctctatgccatagatgtccgctgtttcttcccagccaccccactgttgccacaactgcctcaggacaagctgggaagggcttgtctgggtagggaagatttatacttggttcaccaggttctttgggcgaacgcatagcctccttccaggcacttaccttctgacacaagccaggcctctgagtgcaccttggaggccagaggttcctgagtgcctcagggctcaggttatgattctgccctggagggccctctttcccagcttatttctccttcctttctcactgcccacaccccaggctttcctagagaacctattcctttgtttgccaatgggctctgggctggtcttagccagcttggccctggccgtggcagctcctttttttcccctagagtcccccacccctgggcttccaggtgggcatgaagctggaggctgttgaccgcatgaacccgtcccttgtctgcgtggccagtgtgaccgatgtggtggacagccgcttcctggtgcactttgacaactgggatgatacttatgactactggtgtgatcccagcagcccctacatccacccagtgggctggtgccagaagcaaggaaagcccctcacccctccacaagactacccagaccctgataacttctgttgggagaaatatctggaagaaactggggcctctgctgtccccacctgggccttcaaggtgcgaccccctcacagcttcctggtcaatatgaagctggaggctgtggaccgcaggaacccagccctgattcgcgtggccagcgtggaggatgtggaggaccatcggataaagatccactttgatggctggagtcatggctatgatttctggatcgacgctgaccacccagacatccaccctgccggctggtgctccaagacaggacatcccctgcagcctcctctcggacccagagagcccagctctgcctcccctgggggctgtccccctctcagctataggagcctgccccacactaggacctccaaatacagctttcaccaccggaagtgccccactcctggttgcgacggctctggccatgtcacaggcaagttcacagctcaccattgcctctcaggctgcccactggctgagaggaaccagagccggctgaaagcggagctgtctgactcggaggcctcagcccgcaagaagaacctctcaggcttctccccaaggaagaagcctcgccatcacggccgaattggacgccctccgaagtatcgaaagattccgcaggaagatttccagaccctcacgcccgatgtcgtgcaccagtccctcttcatgtcagccctgtcggcccaccctgaccgctcactctcagtgtgctgggagcagcactgcaagctcctgccaggagtagcgggcatctcagcctcgacagtcgccaagtggaccatcgatgaggtcttcggctttgttcagaccctgacaggttgtgaggaccaagcacgcctcttcaaagacgagatgattgacggcgaggccttccttttgctgacacaggcggacattgtgaagatcatgagcgtcaagctgggcccagccttgaagatctataacgccattctcatgttcaaaaacgctgatgacaccttaaagtgactggcccagggctgggccctcctgcagcccctgcttggcctccctctccagctgatgctttcttcctgacctgaattcctcataccccacacgtccccatgctccacctatatctgaccaggctggtccttcttagagggtgcatgggagctgaggagccctggggagggtaggcacccagccccaagtcctagagctcattcgtcaccaggcatgttggtgagggcntgactggcaggggcattactcatggagtcagttggactgtggcagccccacagccccagtggacttttattgtattaccaaagggtctttttcttggcagtggaggagagactagtagagcagcagtccttcaatctgaggcccctttcccttttttggtatctctgtgtacttttctctccttggctcctttcctcctgccaagaagtgaccccaccacaaatgtatttactcctggaggtacctcctctctttctgtctgctggttttgctgccctcattctgctgcttcgtttcctgggcagtgcccccagccagaccccactggctcttccccctgagatatgtgaacctcggaaacatgttttcctaagatcccttggaagtctctagctgcctttctctcttttgcccagaattgagagattttgagccaagatgccttcctgaacttacccagttctggaccagttggcattttagtgtcccacgccaagtccaagtttcagcagaatgagcaggtggtttgagcctgttttatagatggcagaggttgaggttccactgctgttttccatacacccttcatgtgttgagtctgggaaggagtaagcctagcctgccagtagcctaggttaggagaccagcataaggatttgttagacaatctcgggtctttggccagaggggcagctccagcaggcatagtggtgcctgaagttaggaatactgtactctctgtagctttggacctcagccaaggtattgcccatggggtgatggctccaggcctgccaggccttctgccatgagaatgtagcactctgtgtagcacacacccccatgacatcatttaacctgtcccttaaatgttgaccattagctcttgcagcgtcttacaaagacgacttgaagttgggagttaggaaggtgaacttttctatctgaattctccgggtccctgaagccctccttgccgctctccatctgtcttgcactgccagctgggtccctgctggggctctgggacttccacttctcagtccacataggaacccagcttccactgagtcactgccaaacctgcctcccagcctgggtgggaagggggagagccactggtaggagccagccccacatggaggtgaggagccactgccaacctcccgtgtccaggtgctgatgtgggcctgcggagtgtggggctggtgccttcacccagaccccttcaatcatgtgatgtgtgtgtgtgtgcatgtgtgtgtgtgtgtgtgtgtggcactctcagaagtgtttgacagggtgcagatgtgaggcttagtgttgggaaaatgccaagggctattatcattaaaatttgaagctttatttttcccttagaagtgggaaacccagagctctgttgatttcctaccacaacccagtaggggcctctctctgccatgggctggacagctttttgaggaagccattcagctcccacagttgagctcccacagggctttaggtgtccattccctctcaactgcttagaggcagctttgagcacagccttcctggaaggaagctaggcaagacctgccacacagcgaaggttgggtttacaagggtgacattggtacccccttggccaagagtaaagaagaacaagtctaagccttgcttttatcttagttgtctgggtggtagcagaactcatcagctccttatcctcagtctgttcctctataaaagatgagagatgttcactgactttgtgcagtgagaaggcagcaagtactcacggctggtgctgtgggacctcacagcttctaaggagaggggctgggagggcctttgccatcagatctgccaagcacctaatgcttgcctgtggtgaaggcaagatggaccaagggccttggagaaaagggctcccaggcttctgaactttgaggcctcagcactttctgcattatcgtcaaactctttggaaagaaaccaaatcattaaaaagtagaaagaaatctgcctcttgtctgccctactgcccctttacccccactctgtccccaaatgatattattgcaccttgacctgggagcgcagagaggggagggagttggcagagacttctggtgccctctgccctcctagcaacagatgccacttatattttggcccctggcagcctcgcccagcccctgatcagcccaggcctagggcagttaggacctttctgtttattttctgaagcagagagaatgatctcagagtttgcaaatgaagccttttttgcactttcattcacatgcactttggtggggttacatttttgtacttgcctcttgtgtgtgcacatgtgtgtatgtgttctttaagagaatcttctggcttaagctaaggtgactcttgaaggagaaaaagttacaaacaaaatgtggtgtgatctgtcagtgtatcaaaacaacataaataaacttgaacaactgatacgcagccagagtctgtttctattttcatgataaaacatccagagaacacaaaatggttatcagtagtggcactactgaagagactaaagtgttctctttgttgttagttaggggtccttatagtttttaaggaaagaaacaaaggataaggataaatgggtatctgtctgcactgaaagtgtaaacagtgggaactcccagagatcggtgtgtaaaagggcctgatccttaacatttgataaatggtcaagggcagaaaattcaatgaaacctgtaatttttaaaataataatatcagctgggcacagtggctcacacctgtaatcctagccactttggagggccaaggagggaggatcacatgaggccaggagttcaagaccatcctgggtaacgtagctagatcctgtctctataaaaaaaaaaa

SEQ ID NO: 296049 - DNA, 3711 bp, Homo sapiens
  misc_feature (1239)..(1239): n is a, c, g, or t
gagatgccagtaacttaatgagtgatgcccttggaaaatgtggtggccaagacagattattgcagggttggccccttggttctttcaatccaggatcttgcttctgacaggtcccagggatggggagaggaccttctggctgagctgggctccatgagaaacgcctgacttccaagagcctttcctccccagatccactttgatggctggagtcatggctatgatttctggatcgacgctgaccacccagacatccaccctgccggctggtgctccaagacaggacatcccctgcagcctcctctcggacccagagagcccagctctgcctcccctgggggctgtccccctctcagctataggagcctgccccacactaggacctccaaatacagctttcaccaccggaagtgccccactcctggttgcgacggctctggccatgtcacaggcaagttcacagctcaccattgcctctcaggctgcccactggctgagaggaaccagagccggctgaaagcggagctgtctgactcggaggcctcagcccgcaagaagaacctctcaggcttctccccaaggaagaagcctcgccatcacggccgaattggacgccctccgaagtatcgaaagattccgcaggaagatttccagaccctcacgcccgatgtcgtgcaccagtccctcttcatgtcagccctgtcggcccaccctgaccgctcactctcagtgtgctgggagcagcactgcaagctcctgccaggagtagcgggcatctcagcctcgacagtcgccaagtggaccatcgatgaggtcttcggctttgttcagaccctgacaggttgtgaggaccaagcacgcctcttcaaagacgagatgattgacggcgaggccttccttttgctgacacaggcggacattgtgaagatcatgagcgtcaagctgggcccagccttgaagatctataacgccattctcatgttcaaaaacgctgatgacaccttaaagtgactggcccagggctgggccctcctgcagcccctgcttggcctccctctccagctgatgctttcttcctgacctgaattcctcataccccacacgtccccatgctccacctatatctgaccaggctggtccttcttagagggtgcatgggagctgaggagccctggggagggtaggcacccagccccaagtcctagagctcattcgtcaccaggcatgttggtgagggcntgactggcaggggcattactcatggagtcagttggactgtggcagccccacagccccagtggacttttattgtattaccaaagggtctttttcttggcagtggaggagagactagtagagcagcagtccttcaatctgaggcccctttcccttttttggtatctctgtgtacttttctctccttggctcctttcctcctgccaagaagtgaccccaccacaaatgtatttactcctggaggtacctcctctctttctgtctgctggttttgctgccctcattctgctgcttcgtttcctgggcagtgcccccagccagaccccactggctcttccccctgagatatgtgaacctcggaaacatgttttcctaagatcccttggaagtctctagctgcctttctctcttttgcccagaattgagagattttgagccaagatgccttcctgaacttacccagttctggaccagttggcattttagtgtcccacgccaagtccaagtttcagcagaatgagcaggtggtttgagcctgttttatagatggcagaggttgaggttccactgctgttttccatacacccttcatgtgttgagtctgggaaggagtaagcctagcctgccagtagcctaggttaggagaccagcataaggatttgttagacaatctcgggtctttggccagaggggcagctccagcaggcatagtggtgcctgaagttaggaatactgtactctctgtagctttggacctcagccaaggtattgcccatggggtgatggctccaggcctgccaggccttctgccatgagaatgtagcactctgtgtagcacacacccccatgacatcatttaacctgtcccttaaatgttgaccattagctcttgcagcgtcttacaaagacgacttgaagttgggagttaggaaggtgaacttttctatctgaattctccgggtccctgaagccctccttgccgctctccatctgtcttgcactgccagctgggtccctgctggggctctgggacttccacttctcagtccacataggaacccagcttccactgagtcactgccaaacctgcctcccagcctgggtgggaagggggagagccactggtaggagccagccccacatggaggtgaggagccactgccaacctcccgtgtccaggtgctgatgtgggcctgcggagtgtggggctggtgccttcacccagaccccttcaatcatgtgatgtgtgtgtgtgtgcatgtgtgtgtgtgtgtgtgtgtggcactctcagaagtgtttgacagggtgcagatgtgaggcttagtgttgggaaaatgccaagggctattatcattaaaatttgaagctttatttttcccttagaagtgggaaacccagagctctgttgatttcctaccacaacccagtaggggcctctctctgccatgggctggacagctttttgaggaagccattcagctcccacagttgagctcccacagggctttaggtgtccattccctctcaactgcttagaggcagctttgagcacagccttcctggaaggaagctaggcaagacctgccacacagcgaaggttgggtttacaagggtgacattggtacccccttggccaagagtaaagaagaacaagtctaagccttgcttttatcttagttgtctgggtggtagcagaactcatcagctccttatcctcagtctgttcctctataaaagatgagagatgttcactgactttgtgcagtgagaaggcagcaagtactcacggctggtgctgtgggacctcacagcttctaaggagaggggctgggagggcctttgccatcagatctgccaagcacctaatgcttgcctgtggtgaaggcaagatggaccaagggccttggagaaaagggctcccaggcttctgaactttgaggcctcagcactttctgcattatcgtcaaactctttggaaagaaaccaaatcattaaaaagtagaaagaaatctgcctcttgtctgccctactgcccctttacccccactctgtccccaaatgatattattgcaccttgacctgggagcgcagagaggggagggagttggcagagacttctggtgccctctgccctcctagcaacagatgccacttatattttggcccctggcagcctcgcccagcccctgatcagcccaggcctagggcagttaggacctttctgtttattttctgaagcagagagaatgatctcagagtttgcaaatgaagccttttttgcactttcattcacatgcactttggtggggttacatttttgtacttgcctcttgtgtgtgcacatgtgtgtatgtgttctttaagagaatcttctggcttaagctaaggtgactcttgaaggagaaaaagttacaaacaaaatgtggtgtgatctgtcagtgtatcaaaacaacataaataaacttgaacaactga

SEQ ID NO: 296050 - DNA, 4091 bp, Homo sapiens
  misc_feature (1619)..(1619): n is a, c, g, or t
tgctgtggcccagcctctgcacggcgctctgttcatgcccctcgaggggcctaggttacaaggaggaggagttcagctggagccagtacctgcgcagcacaagagctcaggctgcccccaagcacctgtttgtgagccagagccacagtcccccacccctgggcttccaggtgggcatgaagctggaggctgttgaccgcatgaacccgtcccttgtctgcgtggccagtgtgaccgatgtggtggacagccgcttcctggtgcactttgacaactgggatgatacttatgactactggtgtgatcccagcagcccctacatccacccagtgggctggtgccagaagcaaggaaagcccctcacccctccacaagactacccagaccctgataacttctgttgggagaaatatctggaagaaactggggcctctgctgtccccacctgggccttcaaggtgcgaccccctcacagcttcctggtcaatatgaagctggaggctgtggaccgcaggaacccagccctgattcgcgtggccagcgtggaggatgtggaggaccatcggataaagatccactttgatggctggagtcatggctatgatttctggatcgacgctgaccacccagacatccaccctgccggctggtgctccaagacaggacatcccctgcagcctcctctcggacccagagagcccagctctgcctcccctgggggctgtccccctctcagctataggagcctgccccacactaggacctccaaatacagctttcaccaccggaagtgccccactcctggttgcgacggctctggccatgtcacaggcaagttcacagctcaccattgcctctcaggctgcccactggctgagaggaaccagagccggctgaaagcggagctgtctgactcggaggcctcagcccgcaagaagaacctctcaggcttctccccaaggaagaagcctcgccatcacggccgaattggacgccctccgaagtatcgaaagattccgcaggaagatttccagaccctcacgcccgatgtcgtgcaccagtccctcttcatgtcagccctgtcggcccaccctgaccgctcactctcagtgtgctgggagcagcactgcaagctcctgccaggagtagcgggcatctcagcctcgacagtcgccaagtggaccatcgatgaggtcttcggctttgttcagaccctgacaggttgtgaggaccaagcacgcctcttcaaagacgagatgattgacggcgaggccttccttttgctgacacaggcggacattgtgaagatcatgagcgtcaagctgggcccagccttgaagatctataacgccattctcatgttcaaaaacgctgatgacaccttaaagtgactggcccagggctgggccctcctgcagcccctgcttggcctccctctccagctgatgctttcttcctgacctgaattcctcataccccacacgtccccatgctccacctatatctgaccaggctggtccttcttagagggtgcatgggagctgaggagccctggggagggtaggcacccagccccaagtcctagagctcattcgtcaccaggcatgttggtgagggcntgactggcaggggcattactcatggagtcagttggactgtggcagccccacagccccagtggacttttattgtattaccaaagggtctttttcttggcagtggaggagagactagtagagcagcagtccttcaatctgaggcccctttcccttttttggtatctctgtgtacttttctctccttggctcctttcctcctgccaagaagtgaccccaccacaaatgtatttactcctggaggtacctcctctctttctgtctgctggttttgctgccctcattctgctgcttcgtttcctgggcagtgcccccagccagaccccactggctcttccccctgagatatgtgaacctcggaaacatgttttcctaagatcccttggaagtctctagctgcctttctctcttttgcccagaattgagagattttgagccaagatgccttcctgaacttacccagttctggaccagttggcattttagtgtcccacgccaagtccaagtttcagcagaatgagcaggtggtttgagcctgttttatagatggcagaggttgaggttccactgctgttttccatacacccttcatgtgttgagtctgggaaggagtaagcctagcctgccagtagcctaggttaggagaccagcataaggatttgttagacaatctcgggtctttggccagaggggcagctccagcaggcatagtggtgcctgaagttaggaatactgtactctctgtagctttggacctcagccaaggtattgcccatggggtgatggctccaggcctgccaggccttctgccatgagaatgtagcactctgtgtagcacacacccccatgacatcatttaacctgtcccttaaatgttgaccattagctcttgcagcgtcttacaaagacgacttgaagttgggagttaggaaggtgaacttttctatctgaattctccgggtccctgaagccctccttgccgctctccatctgtcttgcactgccagctgggtccctgctggggctctgggacttccacttctcagtccacataggaacccagcttccactgagtcactgccaaacctgcctcccagcctgggtgggaagggggagagccactggtaggagccagccccacatggaggtgaggagccactgccaacctcccgtgtccaggtgctgatgtgggcctgcggagtgtggggctggtgccttcacccagaccccttcaatcatgtgatgtgtgtgtgtgtgcatgtgtgtgtgtgtgtgtgtgtggcactctcagaagtgtttgacagggtgcagatgtgaggcttagtgttgggaaaatgccaagggctattatcattaaaatttgaagctttatttttcccttagaagtgggaaacccagagctctgttgatttcctaccacaacccagtaggggcctctctctgccatgggctggacagctttttgaggaagccattcagctcccacagttgagctcccacagggctttaggtgtccattccctctcaactgcttagaggcagctttgagcacagccttcctggaaggaagctaggcaagacctgccacacagcgaaggttgggtttacaagggtgacattggtacccccttggccaagagtaaagaagaacaagtctaagccttgcttttatcttagttgtctgggtggtagcagaactcatcagctccttatcctcagtctgttcctctataaaagatgagagatgttcactgactttgtgcagtgagaaggcagcaagtactcacggctggtgctgtgggacctcacagcttctaaggagaggggctgggagggcctttgccatcagatctgccaagcacctaatgcttgcctgtggtgaaggcaagatggaccaagggccttggagaaaagggctcccaggcttctgaactttgaggcctcagcactttctgcattatcgtcaaactctttggaaagaaaccaaatcattaaaaagtagaaagaaatctgcctcttgtctgccctactgcccctttacccccactctgtccccaaatgatattattgcaccttgacctgggagcgcagagaggggagggagttggcagagacttctggtgccctctgccctcctagcaacagatgccacttatattttggcccctggcagcctcgcccagcccctgatcagcccaggcctagggcagttaggacctttctgtttattttctgaagcagagagaatgatctcagagtttgcaaatgaagccttttttgcactttcattcacatgcactttggtggggttacatttttgtacttgcctcttgtgtgtgcacatgtgtgtatgtgttctttaagagaatcttctggcttaagctaaggtgactcttgaaggagaaaaagttacaaacaaaatgtggtgtgatctgtcagtgtatcaaaacaacataaataaacttgaacaactga

SEQ ID NO: 296051 - DNA, 6854 bp, Homo sapiens
  misc_feature (1890)..(1890): n is a, c, g, or t
  misc_feature (4618)..(4618): n is a, c, g, or t
acatagagataaagggaatgaactataaagacactggcatctctgtttcccacaaatcaagacattcatgaaattaatgactaacttacaatgaattttttagaggtgtgtctcataaggaaaaacctggatgatatggaccccgcaggtgattgggggcgtagcctggagtgagggtttggctggtgtagcttggagtgaggccccctggcgtggagtcttgaggcctgctgagggcgtgagctggcatgaggcgaagagagggccatggcaccgactccgagatgggtcaaggacccgtacgggagtcgcaatcctcagaccctcccgcgctccagttccggataagcgagtataagccgctgaacatggcgggagtggagcagcccccgagccccgagctgcggcaggaaggcgtgaccgaatacgaagatggcggggccccggcgggagatggcgaggcgggcccccaacaggcggaggaccacccccagaatcctccagaagatcccaatcaggaccccccagaggatgatagcacctgtcagtgccaggcgtgcgggcctcaccaagccgcgggtccagatcttggttcctctaatgatggctgccctcagctgttccaggagcggtcagtcatagtggagaactcctcaggctctaccagcgcttctgagctcctcaaacccatgaagaagaggaagcgcagggaataccagagcccatcagaggaggagtcggagccagaggccatggagaagcaagaagaaggaaaggacccagagggacaacccactgctagcaccccagagagtgaggagtggagcagcagccagcctgcaacaggtgagaagaaggaatgctggtcgtgggagtcctacctagaggagcagaaggccattactgctccagtcagcctcttccaggactcccaggcagtcactcacaacaagaatggcttcaaactgggcatgaagttggaaggcattgaccctcaacacccgtccatgtacttcatcctcaccgtggctgaggtatgtggctatcgcctacgcctgcactttgatgggtattctgagtgccatgacttctgggtcaatgccaactcccctgacattcaccctgctggctggttcgagaagacgggccacaagctgcagcctcccaaaggttacaaggaggaggagttcagctggagccagtacctgcgcagcacaagagctcaggctgcccccaagcacctgtttgtgagccagagccacgtgagtgcccctgagtgagagtggatgtcactcccatgtgccagagttcactgcagctggcccagggtatctgactcatcagaagggagctcatgtgctggttctctcagctttgttctgatctctcatatcagatgggaggggtacagctgggcagggtccagggccagagatgggaagctggttataggtttttcccgacttccctccctcctttgctactgcagataccctgtcctcacatccccttggagcccctggcccactaccctagtctgagcactgagatgtcattgctcatatattcttgctttggcttgctctgcagttctttggtgtaaggtcaatgcctctattctgggagcttctttttctttccttttgcccaacattgagactcttccatttatttccaacaattcatcccttgtcctttcctctgttcagggcagctggcagcttatccagcagttaaagtatctcataatcccaaccaaaaggcctaagagatacagggagcctccattaaaaatatcatactggaccaggtgtggcggctcatgcctgtaatcccagcactttgggaggctgaggcgggtggatcacctgaggtcaggagttcaagacnagcctgggcaacatggtgaaacccccatctctactaaaaatataaaaaattagctgggcgtggtggtgggtgtctgtaatcccagttactcaggatgctgaggcaggagaatcgcttgaacctggggggcggaagttgcagtgagccaagatcacgccattgcactccggtctcagcaacaagaacgaaactccgtctcaaaaaaaagaagtatgtatcagtcttactggctgggtgcggtggctcacacctgtaattccagtactttgggaggctgaggcgggaggatcacttgagcccaggagtttgagaccagcgtaggcaacatagtgagaccccatctgtacaaaaaatgtcattaaattattagctgggcatggtgcatgtgcctgtagtcctagataccacagtagctagctgagctgggaggattgtttgagcccaggaattcaaggctacagcaagctatgattgtaccactgtaccccagcctgggcgacagagtgagaccctgtgtctaaagaaaaaaaaccatattgaatgtctagagtttccctgggcccaggactccaccatgctcttcaggcagagacagttactcccctaccccagtccagccccagagttcatacttgcaagttcccaggtgacaggtggggtcctgcctgctgttgtgacaacgaatgccgacttttaattcaaactatttaaatactggccccgccgttgactagcattgtgttctgggccaagtgatttaacttcttaaatgggaatagggttgttgtaaaggtccaaggaggtgatgtcttttgaagcttacatggcaggtactcagtttatactggttccctgtctgcctctatgccatagatgtccgctgtttcttcccagccaccccactgttgccacaactgcctcaggacaagctgggaagggcttgtctgggtagggaagatttatacttggttcaccaggttctttgggcgaacgcatagcctccttccaggcacttaccttctgacacaagccaggcctctgagtgcaccttggaggccagaggttcctgagtgcctcagggctcaggttatgattctgccctggagggccctctttcccagcttatttctccttcctttctcactgcccacaccccaggctttcctagagaacctattcctttgtttgccaatgggctctgggctggtcttagccagcttggccctggccgtggcagctcctttttttcccctagagtcccccacccctgggcttccaggtgggcatgaagctggaggctgttgaccgcatgaacccgtcccttgtctgcgtggccagtgtgaccgatgtggtggacagccgcttcctggtgcactttgacaactgggatgatacttatgactactggtgtgatcccagcagcccctacatccacccagtgggctggtgccagaagcaaggaaagcccctcacccctccacaagactacccagaccctgataacttctgttgggagaaatatctggaagaaactggggcctctgctgtccccacctgggccttcaaggtgcgaccccctcacagcttcctggtcaatatgaagctggaggctgtggaccgcaggaacccagccctgattcgcgtggccagcgtggaggatgtggaggaccatcggataaagatccactttgatggctggagtcatggctatgatttctggatcgacgctgaccacccagacatccaccctgccggctggtgctccaagacaggacatcccctgcagcctcctctcggacccagagagcccagctctgcctcccctgggggctgtccccctctcagctataggagcctgccccacactaggacctccaaatacagctttcaccaccggaagtgccccactcctggttgcgacggctctggccatgtcacaggcaagttcacagctcaccattgcctctcaggctgcccactggctgagaggaaccagagccggctgaaagcggagctgtctgactcggaggcctcagcccgcaagaagaacctctcaggcttctccccaaggaagaagcctcgccatcacggccgaattggacgccctccgaagtatcgaaagattccgcaggaagatttccagaccctcacgcccgatgtcgtgcaccagtccctcttcatgtcagccctgtcggcccaccctgaccgctcactctcagtgtgctgggagcagcactgcaagctcctgccaggagtagcgggcatctcagcctcgacagtcgccaagtggaccatcgatgaggtcttcggctttgttcagaccctgacaggttgtgaggaccaagcacgcctcttcaaagacgagatgattgacggcgaggccttccttttgctgacacaggcggacattgtgaagatcatgagcgtcaagctgggcccagccttgaagatctataacgccattctcatgttcaaaaacgctgatgacaccttaaagtgactggcccagggctgggccctcctgcagcccctgcttggcctccctctccagctgatgctttcttcctgacctgaattcctcataccccacacgtccccatgctccacctatatctgaccaggctggtccttcttagagggtgcatgggagctgaggagccctggggagggtaggcacccagccccaagtcctagagctcattcgtcaccaggcatgttggtgagggcntgactggcaggggcattactcatggagtcagttggactgtggcagccccacagccccagtggacttttattgtattaccaaagggtctttttcttggcagtggaggagagactagtagagcagcagtccttcaatctgaggcccctttcccttttttggtatctctgtgtacttttctctccttggctcctttcctcctgccaagaagtgaccccaccacaaatgtatttactcctggaggtacctcctctctttctgtctgctggttttgctgccctcattctgctgcttcgtttcctgggcagtgcccccagccagaccccactggctcttccccctgagatatgtgaacctcggaaacatgttttcctaagatcccttggaagtctctagctgcctttctctcttttgcccagaattgagagattttgagccaagatgccttcctgaacttacccagttctggaccagttggcattttagtgtcccacgccaagtccaagtttcagcagaatgagcaggtggtttgagcctgttttatagatggcagaggttgaggttccactgctgttttccatacacccttcatgtgttgagtctgggaaggagtaagcctagcctgccagtagcctaggttaggagaccagcataaggatttgttagacaatctcgggtctttggccagaggggcagctccagcaggcatagtggtgcctgaagttaggaatactgtactctctgtagctttggacctcagccaaggtattgcccatggggtgatggctccaggcctgccaggccttctgccatgagaatgtagcactctgtgtagcacacacccccatgacatcatttaacctgtcccttaaatgttgaccattagctcttgcagcgtcttacaaagacgacttgaagttgggagttaggaaggtgaacttttctatctgaattctccgggtccctgaagccctccttgccgctctccatctgtcttgcactgccagctgggtccctgctggggctctgggacttccacttctcagtccacataggaacccagcttccactgagtcactgccaaacctgcctcccagcctgggtgggaagggggagagccactggtaggagccagccccacatggaggtgaggagccactgccaacctcccgtgtccaggtgctgatgtgggcctgcggagtgtggggctggtgccttcacccagaccccttcaatcatgtgatgtgtgtgtgtgtgcatgtgtgtgtgtgtgtgtgtgtggcactctcagaagtgtttgacagggtgcagatgtgaggcttagtgttgggaaaatgccaagggctattatcattaaaatttgaagctttatttttcccttagaagtgggaaacccagagctctgttgatttcctaccacaacccagtaggggcctctctctgccatgggctggacagctttttgaggaagccattcagctcccacagttgagctcccacagggctttaggtgtccatcccctgatcagcccaggcctagggcagttaggacctttctgtttattttctgaagcagagagaatgatctcagagtttgcaaatgaagccttttttgcactttcattcacatgcactttggtggggttacatttttgtacttgcctcttgtgtgtgcacatgtgtgtatgtgttctttaagagaatcttctggcttaagctaaggtgactcttgaaggagaaaaagttacaaacaaaatgtggtgtgatctgtcagtgtatcaaaacaacataaataaacttgaacaactgatacgcagccagagtctgtttctattttcatgataaaacatccagagaacacaaaatggttatcagtagtggcactactgaagagactaaagtgttctctttgttgttagttaggggtccttatagtttttaaggaaagaaacaaaggataaggataaatgggtatctgtctgcactgaaagtgtaaacagtgggaactcccagagatcggtgtgtaaaagggcctgatccttaacatttgataaatggtcaagggcagaaaattcaatgaaacctgtaatttttaaaataataatatcagctgggcacagtggctcacacctgtaatcctagccactttggagggccaaggagggaggatcacatgaggccaggagttcaagaccatcctgggtaacgtagctagatcctgtctctataaaaaaaaaaa

SEQ ID NO: 296052 - DNA, 6049 bp, Homo sapiens
  misc_feature (1890)..(1890): n is a, c, g, or t
  misc_feature (4618)..(4618): n is a, c, g, or t
acatagagataaagggaatgaactataaagacactggcatctctgtttcccacaaatcaagacattcatgaaattaatgactaacttacaatgaattttttagaggtgtgtctcataaggaaaaacctggatgatatggaccccgcaggtgattgggggcgtagcctggagtgagggtttggctggtgtagcttggagtgaggccccctggcgtggagtcttgaggcctgctgagggcgtgagctggcatgaggcgaagagagggccatggcaccgactccgagatgggtcaaggacccgtacgggagtcgcaatcctcagaccctcccgcgctccagttccggataagcgagtataagccgctgaacatggcgggagtggagcagcccccgagccccgagctgcggcaggaaggcgtgaccgaatacgaagatggcggggccccggcgggagatggcgaggcgggcccccaacaggcggaggaccacccccagaatcctccagaagatcccaatcaggaccccccagaggatgatagcacctgtcagtgccaggcgtgcgggcctcaccaagccgcgggtccagatcttggttcctctaatgatggctgccctcagctgttccaggagcggtcagtcatagtggagaactcctcaggctctaccagcgcttctgagctcctcaaacccatgaagaagaggaagcgcagggaataccagagcccatcagaggaggagtcggagccagaggccatggagaagcaagaagaaggaaaggacccagagggacaacccactgctagcaccccagagagtgaggagtggagcagcagccagcctgcaacaggtgagaagaaggaatgctggtcgtgggagtcctacctagaggagcagaaggccattactgctccagtcagcctcttccaggactcccaggcagtcactcacaacaagaatggcttcaaactgggcatgaagttggaaggcattgaccctcaacacccgtccatgtacttcatcctcaccgtggctgaggtatgtggctatcgcctacgcctgcactttgatgggtattctgagtgccatgacttctgggtcaatgccaactcccctgacattcaccctgctggctggttcgagaagacgggccacaagctgcagcctcccaaaggttacaaggaggaggagttcagctggagccagtacctgcgcagcacaagagctcaggctgcccccaagcacctgtttgtgagccagagccacgtgagtgcccctgagtgagagtggatgtcactcccatgtgccagagttcactgcagctggcccagggtatctgactcatcagaagggagctcatgtgctggttctctcagctttgttctgatctctcatatcagatgggaggggtacagctgggcagggtccagggccagagatgggaagctggttataggtttttcccgacttccctccctcctttgctactgcagataccctgtcctcacatccccttggagcccctggcccactaccctagtctgagcactgagatgtcattgctcatatattcttgctttggcttgctctgcagttctttggtgtaaggtcaatgcctctattctgggagcttctttttctttccttttgcccaacattgagactcttccatttatttccaacaattcatcccttgtcctttcctctgttcagggcagctggcagcttatccagcagttaaagtatctcataatcccaaccaaaaggcctaagagatacagggagcctccattaaaaatatcatactggaccaggtgtggcggctcatgcctgtaatcccagcactttgggaggctgaggcgggtggatcacctgaggtcaggagttcaagacnagcctgggcaacatggtgaaacccccatctctactaaaaatataaaaaattagctgggcgtggtggtgggtgtctgtaatcccagttactcaggatgctgaggcaggagaatcgcttgaacctggggggcggaagttgcagtgagccaagatcacgccattgcactccggtctcagcaacaagaacgaaactccgtctcaaaaaaaagaagtatgtatcagtcttactggctgggtgcggtggctcacacctgtaattccagtactttgggaggctgaggcgggaggatcacttgagcccaggagtttgagaccagcgtaggcaacatagtgagaccccatctgtacaaaaaatgtcattaaattattagctgggcatggtgcatgtgcctgtagtcctagataccacagtagctagctgagctgggaggattgtttgagcccaggaattcaaggctacagcaagctatgattgtaccactgtaccccagcctgggcgacagagtgagaccctgtgtctaaagaaaaaaaaccatattgaatgtctagagtttccctgggcccaggactccaccatgctcttcaggcagagacagttactcccctaccccagtccagccccagagttcatacttgcaagttcccaggtgacaggtggggtcctgcctgctgttgtgacaacgaatgccgacttttaattcaaactatttaaatactggccccgccgttgactagcattgtgttctgggccaagtgatttaacttcttaaatgggaatagggttgttgtaaaggtccaaggaggtgatgtcttttgaagcttacatggcaggtactcagtttatactggttccctgtctgcctctatgccatagatgtccgctgtttcttcccagccaccccactgttgccacaactgcctcaggacaagctgggaagggcttgtctgggtagggaagatttatacttggttcaccaggttctttgggcgaacgcatagcctccttccaggcacttaccttctgacacaagccaggcctctgagtgcaccttggaggccagaggttcctgagtgcctcagggctcaggttatgattctgccctggagggccctctttcccagcttatttctccttcctttctcactgcccacaccccaggctttcctagagaacctattcctttgtttgccaatgggctctgggctggtcttagccagcttggccctggccgtggcagctcctttttttcccctagagtcccccacccctgggcttccaggtgggcatgaagctggaggctgttgaccgcatgaacccgtcccttgtctgcgtggccagtgtgaccgatgtggtggacagccgcttcctggtgcactttgacaactgggatgatacttatgactactggtgtgatcccagcagcccctacatccacccagtgggctggtgccagaagcaaggaaagcccctcacccctccacaagactacccagaccctgataacttctgttgggagaaatatctggaagaaactggggcctctgctgtccccacctgggccttcaaggtgcgaccccctcacagcttcctggtcaatatgaagctggaggctgtggaccgcaggaacccagccctgattcgcgtggccagcgtggaggatgtggaggaccatcggataaagatccactttgatggctggagtcatggctatgatttctggatcgacgctgaccacccagacatccaccctgccggctggtgctccaagacaggacatcccctgcagcctcctctcggacccagagagcccagctctgcctcccctgggggctgtccccctctcagctataggagcctgccccacactaggacctccaaatacagctttcaccaccggaagtgccccactcctggttgcgacggctctggccatgtcacaggcaagttcacagctcaccattgcctctcaggctgcccactggctgagaggaaccagagccggctgaaagcggagctgtctgactcggaggcctcagcccgcaagaagaacctctcaggcttctccccaaggaagaagcctcgccatcacggccgaattggacgccctccgaagtatcgaaagattccgcaggaagatttccagaccctcacgcccgatgtcgtgcaccagtccctcttcatgtcagccctgtcggcccaccctgaccgctcactctcagtgtgctgggagcagcactgcaagctcctgccaggagtagcgggcatctcagcctcgacagtcgccaagtggaccatcgatgaggtcttcggctttgttcagaccctgacaggttgtgaggaccaagcacgcctcttcaaagacgagatgattgacggcgaggccttccttttgctgacacaggcggacattgtgaagatcatgagcgtcaagctgggcccagccttgaagatctataacgccattctcatgttcaaaaacgctgatgacaccttaaagtgactggcccagggctgggccctcctgcagcccctgcttggcctccctctccagctgatgctttcttcctgacctgaattcctcataccccacacgtccccatgctccacctatatctgaccaggctggtccttcttagagggtgcatgggagctgaggagccctggggagggtaggcacccagccccaagtcctagagctcattcgtcaccaggcatgttggtgagggcntgactggcaggggcattactcatggagtcagttggactgtggcagccccacagccccagtggacttttattgtattaccaaagggtctttttcttggcagtggaggagagactagtagagcagcagtccttcaatctgaggcccctttcccttttttggtatctctgtgtacttttctctccttggctcctttcctcctgccaagaagtgaccccaccacaaatgtatttactcctggaggtacctcctctctttctgtctgctggttttgctgccctcattctgctgcttcgtttcctgggcagtgcccccagccagaccccactggctcttccccctgagatatgtgaacctcggaaacatgttttcctaagatcccttggaagtctctagctgcctttctctcttttgcccagaattgagagattttgagccaagatgccttcctgaacttacccagttctggaccagttggcattttagtgtcccacgccaagtccaagtttcagcagaatgagcaggtggtttgagcctgttttatagatggcagaggttgaggttccactgctgttttccatacacccttcatgtgttgagtctgggaaggagtaagcctagcctgccagtagcctaggttaggagaccagcataaggatttgttagacaatctcgggtctttggccagaggggcagctccagcaggcatagtggtgcctgaagttaggaatactgtactctctgtagctttggacctcagccaaggtattgcccatggggtgatggctccaggcctgccaggccttctgccatgagaatgtagcactctgtgtagcacacacccccatgacatcatttaacctgtcccttaaatgttgaccattagctcttgcagcgtcttacaaagacgacttgaagttgggagttaggaaggtgaacttttctatctgaattctccgggtccctgaagccctccttgccgctctccatctgtcttgcactgccagctgggtccctgctggggctctgggacttccacttctcagtccacataggaacccagcttccactgagtcactgccaaacctgccctcctagcaacagatgccacttatattttggcccctggcagcctcgcccagcccctgatcagcccaggcctagggcagttaggacctttctgtttattttctgaagcagagagaatgatctcagagtttgcaaatgaagccttttttgcactttcattcacatgcactttggtggggttacatttttgtacttgcctcttgtgtgtgcacatgtgtgtatgtgttctttaagagaatcttctggcttaagctaaggtgactcttgaaggagaaaaagttacaaacaaaatgtggtgtgatctgtcagtgtatcaaaacaacataaataaacttgaacaactga

SEQ ID NO: 296053 - DNA, 4511 bp, Homo sapiens
  misc_feature (1890)..(1890): n is a, c, g, or t
acatagagataaagggaatgaactataaagacactggcatctctgtttcccacaaatcaagacattcatgaaattaatgactaacttacaatgaattttttagaggtgtgtctcataaggaaaaacctggatgatatggaccccgcaggtgattgggggcgtagcctggagtgagggtttggctggtgtagcttggagtgaggccccctggcgtggagtcttgaggcctgctgagggcgtgagctggcatgaggcgaagagagggccatggcaccgactccgagatgggtcaaggacccgtacgggagtcgcaatcctcagaccctcccgcgctccagttccggataagcgagtataagccgctgaacatggcgggagtggagcagcccccgagccccgagctgcggcaggaaggcgtgaccgaatacgaagatggcggggccccggcgggagatggcgaggcgggcccccaacaggcggaggaccacccccagaatcctccagaagatcccaatcaggaccccccagaggatgatagcacctgtcagtgccaggcgtgcgggcctcaccaagccgcgggtccagatcttggttcctctaatgatggctgccctcagctgttccaggagcggtcagtcatagtggagaactcctcaggctctaccagcgcttctgagctcctcaaacccatgaagaagaggaagcgcagggaataccagagcccatcagaggaggagtcggagccagaggccatggagaagcaagaagaaggaaaggacccagagggacaacccactgctagcaccccagagagtgaggagtggagcagcagccagcctgcaacaggtgagaagaaggaatgctggtcgtgggagtcctacctagaggagcagaaggccattactgctccagtcagcctcttccaggactcccaggcagtcactcacaacaagaatggcttcaaactgggcatgaagttggaaggcattgaccctcaacacccgtccatgtacttcatcctcaccgtggctgaggtatgtggctatcgcctacgcctgcactttgatgggtattctgagtgccatgacttctgggtcaatgccaactcccctgacattcaccctgctggctggttcgagaagacgggccacaagctgcagcctcccaaaggttacaaggaggaggagttcagctggagccagtacctgcgcagcacaagagctcaggctgcccccaagcacctgtttgtgagccagagccacgtgagtgcccctgagtgagagtggatgtcactcccatgtgccagagttcactgcagctggcccagggtatctgactcatcagaagggagctcatgtgctggttctctcagctttgttctgatctctcatatcagatgggaggggtacagctgggcagggtccagggccagagatgggaagctggttataggtttttcccgacttccctccctcctttgctactgcagataccctgtcctcacatccccttggagcccctggcccactaccctagtctgagcactgagatgtcattgctcatatattcttgctttggcttgctctgcagttctttggtgtaaggtcaatgcctctattctgggagcttctttttctttccttttgcccaacattgagactcttccatttatttccaacaattcatcccttgtcctttcctctgttcagggcagctggcagcttatccagcagttaaagtatctcataatcccaaccaaaaggcctaagagatacagggagcctccattaaaaatatcatactggaccaggtgtggcggctcatgcctgtaatcccagcactttgggaggctgaggcgggtggatcacctgaggtcaggagttcaagacnagcctgggcaacatggtgaaacccccatctctactaaaaatataaaaaattagctgggcgtggtggtgggtgtctgtaatcccagttactcaggatgctgaggcaggagaatcgcttgaacctggggggcggaagttgcagtgagccaagatcacgccattgcactccggtctcagcaacaagaacgaaactccgtctcaaaaaaaagaagtatgtatcagtcttactggctgggtgcggtggctcacacctgtaattccagtactttgggaggctgaggcgggaggatcacttgagcccaggagtttgagaccagcgtaggcaacatagtgagaccccatctgtacaaaaaatgtcattaaattattagctgggcatggtgcatgtgcctgtagtcctagataccacagtagctagctgagctgggaggattgtttgagcccaggaattcaaggctacagcaagctatgattgtaccactgtaccccagcctgggcgacagagtgagaccctgtgtctaaagaaaaaaaaccatattgaatgtctagagtttccctgggcccaggactccaccatgctcttcaggcagagacagttactcccctaccccagtccagccccagagttcatacttgcaagttcccaggtgacaggtggggtcctgcctgctgttgtgacaacgaatgccgacttttaattcaaactatttaaatactggccccgccgttgactagcattgtgttctgggccaagtgatttaacttcttaaatgggaatagggttgttgtaaaggtccaaggaggtgatgtcttttgaagcttacatggcaggtactcagtttatactggttccctgtctgcctctatgccatagatgtccgctgtttcttcccagccaccccactgttgccacaactgcctcaggacaagctgggaagggcttgtctgggtagggaagatttatacttggttcaccaggttctttgggcgaacgcatagcctccttccaggcacttaccttctgacacaagccaggcctctgagtgcaccttggaggccagaggttcctgagtgcctcagggctcaggttatgattctgccctggagggccctctttcccagcttatttctccttcctttctcactgcccacaccccaggctttcctagagaacctattcctttgtttgccaatgggctctgggctggtcttagccagcttggccctggccgtggcagctcctttttttcccctagagtcccccacccctgggcttccaggtgggcatgaagctggaggctgttgaccgcatgaacccgtcccttgtctgcgtggccagtgtgaccgatgtggtggacagccgcttcctggtgcactttgacaactgggatgatacttatgactactggtgtgatcccagcagcccctacatccacccagtgggctggtgccagaagcaaggaaagcccctcacccctccacaagactacccagaccctgataacttctgttgggagaaatatctggaagaaactggggcctctgctgtccccacctgggccttcaaggtgcgaccccctcacagcttcctggtcaatatgaagctggaggctgtggaccgcaggaacccagccctgattcgcgtggccagcgtggaggatgtggaggaccatcggataaagatccactttgatggctggagtcatggctatgatttctggatcgacgctgaccacccagacatccaccctgccggctggtgctccaagacaggacatcccctgcagcctcctctcggacccagagagcccagctctgcctcccctgggggctgtccccctctcagctataggagcctgccccacactaggacctccaaatacagctttcaccaccggaagtgccccactcctggttgcgacggctctggccatgtcacaggcaagttcacagctcaccattgcctctcaggctgcccactggctgagaggaaccagagccggctgaaagcggagctgtctgactcggaggcctcagcccgcaagaagaacctctcaggcttctccccaaggaagaagcctcgccatcacggccgaattggacgccctccgaagtatcgaaagattccgcaggaagatttccagaccctcacgcccgatgtcgtgcaccagtccctcttcatgtcagccctgtcggcccaccctgaccgctcactctcagtgtgctgggagcagcactgcaagctcctgccaggagtagcgggcatctcagcctcgacagtcgccaagtggaccatcgatgaggtcttcggctttgttcagaccctgacaggttgtgaggaccaagcacgcctcttcaaagacgaggcaagaatagtcagagtgacccatgtatctgggaagactctagtctggactgtggcccagcttggggaccttgtgtgctcagatcatcttcaggaaggaaaaggcatcctggagacaggagtccattcactcctctgctctctacccactcatttgcttgccaaacttagctttgccagtgatagtcaatattaaagtgtacttttttcccctttaatccaatatagttgataattaaagtgtattttgaatgaca

SEQ ID NO: 296054 - DNA, 834 bp, Homo sapiens
acatagagataaagggaatgaactataaagacactggcatctctgtttcccacaaatcaagacattcatgaaattaatgactaacttacaatgaattttttagaggtgtgtctcataaggaaaaacctggatgatatggaccccgcaggtgattgggggcgtagcctggagtgagggtttggctggtgtagcttggagtgaggccccctggcgtggagtcttgaggcctgctgagggcgtgagctggcatgaggcgaagagagggccatggcaccgactccgagatgggtcaaggacccgtacgggagtcgcaatcctcagaccctcccgcgctccagttccggataagcgagtataagccgctgaacatggcgggagtggagcagcccccgagccccgagctgcggcaggaaggcgtgaccgaatacgaagatggcggggccccggcgggagatggcgaggcgggcccccaacaggcggaggaccacccccagaatcctccagaagatcccaatcaggaccccccagaggatgatagcacctgtcagtgccaggcgtgcgggcctcaccaagccgcgggtccagatcttggttcctctaatgatggctgccctcagctgttccaggagcggagaagcaagaagaaggaaaggacccagagggacaacccactgctagcaccccagagagtgaggagtggagcagcagccagcctgcaacaggtgagaagaaggaatgctggtcgtgggagtcctacctagaggagcagaaggccattactgctccagtcagcctcttccaggaccccactaggcaaggataaggctggatgga

SEQ ID NO: 296055 - DNA, 333 bp, Homo sapiens
gggtggtgcagcctcagagagacggggtgagggtcattccgaatagctgacctgagagtctttaagagagtcactttaccagcaggagtgaacactgtgtgaggagtcaggagatacggctcaccctcttgactctacaggctgtcagaaggggcccggagtcctgtctactctgccagccagtctcctgagtggtgtgggtatgcatgggcttcgggaacagtttagtcatcctcgttggcctgccagcctctgcctctgctttccagccctcacgcccgatgtcgtgcaccagtccctcttcatgtcagccctgtcggcccaccctgaccg

SEQ ID NO: 296056 - DNA, 138 bp, Homo sapiens
agagtggggcaccctgggactggaccccgcaggtgattgggggcgtagcctggagtgagggtttggctggtgtagcttggagtgaggccccctggcgtggagtcttgaggcctgctgagggcgtgagctggcatgagg

SEQ ID NO: 296057 - DNA, 2242 bp, Homo sapiens
gaattccgctccgcactgctcactcccgcgcagtgaggttggcacagccaccgctctgtggctcgcttggttcccttagtcccgagcgctcgcccactgcagattcctttcccgtgcagacatggcctctggcaccaccaccaccgccgtgaagattggaataattggtggaacaggcctggatgatccagaaattttagaaggaagaactgaaaaatatgtggatactccatttggcaagccatctgatgccttaattttggggaagataaaaaatgttgattgcatcctccttgcaaggcatggaaggcagcacaccatcatgccttcaaaggtcaactaccaggcgaacatctgggctttgaaggaagagggctgtacacatgtcatagtgaccacagcttgtggctccttgagggaggagattcagcccggcgatattgtcattattgatcagttcattgacaggaccactatgagacctcagtccttctatgatggaagtcattcttgtgccagaggagtgtgccatattccaatggctgagccgttttgccccaaaacgagagaggttcttatagagactgctaagaagctaggactccggtgccactcaaaggggacaatggtcacaatcgagggacctcgttttagctcccgggcagaaagcttcatgttccgcacctggggggcggatgttatcaacatgaccacagttccagaggtggttcttgctaaggaggctggaatttgttacgcaagtatcgccatggcgacagattatgactgctggaaggagcacgaggaagcagtttcggtggaccgggtcttaaagaccctgaaagaaaacgctaataaagccaaaagcttactgctcactaccatacctcagatagggtccacagaatggtcagaaaccctccataacctgaagaatatggcccagttttctgttttattaccaagacattaaagtagcatggctgcccaggagaaaagaagacattctaattccagtcattttgggaattcctgcttaacttgaaaaaaatatgggaaagacatgcagctttcatgcccttgcctatcaaagagtatgttgtaagaaagacaagacattgtgtgtattagagactcctgaatgatttagacaacttcaaaatacagaagaaaagcaaatgactagtaaacatgtgggaaaaaatattacattttaagggggaaaaaaaaacccaccattctcttctccccctattaaatttgcaacaataaagggtggagggtaatctctactttcctatactgccaaagaatgtgaggaagaaatgggactctttggttatttattgatgcgactgtaaattggtacagtatttctggagggcaatttggtaaaatgcatcaaaagacttaaaaatacggacgtactttgtgctgggaactctacatctagcaatttctctttaaaaccatatcagagatgcatacaaagaattatatataaagaagggtgtttaataatgatagttataataataaataattgaaacaatctgaatcccttgcaattggaggtaaattatgtcttagttataattagattgtgaatcagccaactgaaaatcctttttgcatatttcaatgtcctaaaaagacacggttgctctatatatgaagtgaaaaaaggatatggtagcattttatagtactagttttgctttaaaatgctatgtaaatatacaaaaaaactagaaagaaatatatataaccttgttattgtatttgggggagggatactgggataatttttattttctttgaatctttctgtgtcttcacatttttctacagtgaatataatcaaatagtaaagttgttgtaaaaataaaagtggatttagaaagatccagttcttgaaaacactgtttctggtaatgaagcagaatttaagttggtaatattaaggtgaatgtcatttaagggagttacatctttattctgctaaagaagaggatcattgatttctgtacagtcagaacagtacttgggtttgcaacagctttctgagaaaagctaggtgtttaatagtttaactgaaagtttaactatttaaaagactaaatgcacattttatggtatctgatattttaaaaagtaatgtttgattctcctttttatgagttaaattattttatacgagttggtaatttttgctttttaataaagtggaagcttgcttttt

SEQ ID NO: 296058 - DNA, 1401 bp, Homo sapiens
gaattccgctccgcactgctcactcccgcgcagtgaggttggcacagccaccgctctgtggctcgcttggttcccttagtcccgagcgctcgcccactgcagattcctttcccgtgcagacatggcctctggcaccaccaccaccgccgtgaagattggaataattggtggaacaggcctggatgatccagaaattttagaaggaagaactgaaaaatatgtggatactccatttggcaagccatctgatgccttaattttggggaagataaaaaatgttgattgcatcctccttgcaaggcatggaaggcagcacaccatcatgccttcaaaggtcaactaccaggcgaacatctgggctttgaaggaagagggctgtacacatgtcatagtgaccacagcttgtggctccttgagggaggagattcagcccggcgatattgtcattattgatcagttcattgacaggaccactatgagacctcagtccttctatgatggaagtcattcttgtgccagaggagtgtgccatattccaatggctgagccgttttgccccaaaacgagagaggttcttatagagactgctaagaagctaggactccggtgccactcaaaggggacaatggtcacaatcgagggacctcgttttagctcccgggcagaaagcttcatgttccgcacctggggggcggatgttatcaacatgaccacagttccagaggtggttcttgctaaggaggctggaatttgttacgcaagtatcgccatggcgacagattatgactgctggaaggagcacgaggaagcagtttcggtggaccgggtcttaaagaccctgaaagaaaacgctaataaagccaaaagcttactgctcactaccatacctcagatagggtccacagaatggtcagaaaccctccataacctgaagaaaaaatctgctggaatggcactgaatttttaggtcgatttgggaagaattgacaatattgaacctttcaatcgatggacatggtatgtttctgcatttatttgggccttttaaaatttatctcagcaatattttgtagttttagtgaagaagtcttgtatatatcttttgttaaatgtattcctaaatattttgtggaaatgttactgtaaatagtactttaatttcatttttaagtttattgctggtatacagaaatatgttttatttttgtatattgactttatattctgtaatcttattaaattcacttagttcagtagtagttcttatttttattttattgcaagtgccttagggataccttgtgtacacaatcatgtcatatatgaataacaacagtttaccttttgtttcttcttgctttgtcgtaatggctaggaccttcaacctaatgttgaatagaa

SEQ ID NO: 296059 - DNA, 2167 bp, Homo sapiens
gattgacttcaagataataagctgctaattgtaaacaaaacagttaccctccagtattaatatgactcattagtgtgagccatttgggtcaagtatgattatgacccttggacttcctgatgtagtattaaatttcaactctggttatccattagcaatctgtagagaacttaatgaacctgaacccaggcttctctagctctggtaacgtgtgattgttttcactacaatatgatacatagatggtaccttacttttcctcattcttaataggtgtctaagaatgtcagggcaaaagtatgggcatttttcttgctatgttcagaaagtacagttctctccaacttgcagaggtacttttcttgattaaatagccttctctagcaacatcattttcagactaactaaatgaatgcagtatactcttttctttgttctcaatcattcactccttatgcaaagccaatataattttcctcataccttatgcttgaggatattgttgaagaacacttcctggaacacttctcacttgtgatgctgtactaattttttttttttaatttaagctagtatactaagtgaacaccatggtcagttgtgagcattttggtttccgcaaaggatggatggtgagcatcatgggaaagctgtagtttagtgacttagcccttagtgattaatagatttgcatgtacatagaagtctttgttggccttataatctgctgttatatttggcatggattttcatggttttgagaatgacatcctggccctgtggtccccgagggtcatggtccttgtgacctggcccctgttcactgcccccttcgctagcacgagttgctgtgcagggctggaggtagctaccatggcttgtttcaaggaaggaaactctggtacggtggcaccctcaggagtggaggacagtgaacttccttgaagagggagtgactaaggtgacctccaacctgccctgagccagctgccctgcaggtgccacgtgagcctgctctggcatccacaggatgctcctggagcctcttctctggctgctacctcagggcatggttgtggccccaccaacacctattttccaaataattattcattcttgtgacagtggcctgaacatgtttttaattttctcaacaagcatttagccagcacttatccagtgaaacaatttgataaggtttcaaggagtatctgatgggttaggaagtcacgaaatgaggagttcttgccacatttgcagagtccctccttgataaggtttggcggtgtccccacccaaatctcatgttgaattgtagttcccataatccccacatgttgtgggagggacccagtgggaggtaattaaatcatgggggtggttacccccacactgctgttctcatgatactgagttctcacaagtcctgtttgttttataaggggcttttcccccttttgctcaacacttcttcctgccatcatgtgaagaaggacgtgtttgtttccccttctgccacgattgtaagtttcctgaggccttcccagctatgtggaactgtgagttaattaaacctctttcctttataaattacccagtcatgggcagtcctttacagcagcatgagaatggactaatacactcctcaaatgttttgaagattgttgcaccttggaactaccagtgtgcacacaatctggctcaatgtatatattggcccagcaaggcaaagaactgaagttccaggatggaagaacctgtgttctcctcataatagtatagaataattcaagataggcaagaaggacagcagtaaatgaagaccatggaagaaaagaaggaatgccaaagatcgaggaaatctaccaagactagtagggtagtccagaagaagctgtttcagggcctgttgccagctatgcctttgagaacctcgggatcccaaagaatgaggggaatttcttcagaaagacaatctcggcatgcattatttctttgttttgaagattcactcatgttgcatgcatctgtagcttgtgccttttttattgcctagtagtattctgtcatatgcctatcttacaatttgattatctattcacctgttgatgaatgtttgaattttttccatttgaggaattttatgaataaagctgctataagcatg

SEQ ID NO: 296060 - DNA, 943 bp, Homo sapiens
gaattccgctccgcactgctcactcccgcgcagtgaggttggcacagccaccgctctgtggctcgcttggttcccttagtcccgagcgctcgcccactgcagattcctttcccgtgcagacatggcctctggcaccaccaccaccgccgtgaagattggaataattggtggaacaggcctggatgatccagaaattttagaaggaagaactgaaaaatatgtggatactccatttggcaagccatctgatgccttaattttggggaagataaaaaatgttgattgcatcctccttgcaaggcatggaaggcagcacaccatcatgccttcaaaggtcaactaccaggcgaacatctgggctttgaaggaagagggctgtacacatgtcatagtgaccacagcttgtggctccttgagggaggagattcagcccggcgatattgtcattattgatcagttcattgacaggactatttgccacgacatttcaaaggattccaagagagaatattggtgtccatgctgtgatgattcctcagctcctctcatctgatctccgtcctggcccccatgactttctttgtggtagttagggtgtggtatgtgccactgaggcccacacctattgctgcaatttatagcactgatctgtcatcaataccacttgctgtcttggatgtgaagatgatttttcctgcagggattccctctacaaaattaaaaacactgggcatgtggaaataatattcatgctttaaattgtcttttctcttcactacaccaggggtccccaacccctaggccacagactgtggccctagtgtagtgaatagaaaagacaatttaaagcgtgaatattatttcctcatgcccagtgtttttaattttgtactggtctgtggcttgttagaaaccaggctgcacagcagaaggtgggcagcag

SEQ ID NO: 296061 - DNA, 658 bp, Homo sapiens
ctcgccccctagctacatccgtcacctgacacggccctaccaggaacagccgcgctcccgcggattctgatttggaaaacaagcgaaattaaactaaaccgctgcacgcctctgacgcgacatctggacacggcgcggcgctggcgctgccggagctgtcgacccggcctggcgccggactaggactatttgccacgacatttcaaaggattccaagagagaatattggtgtccatgctgtgatgattcctcagctcctctcatctgatctccgtcctggcccccatgactttctttgtggtagttagggtgtggtatgtgccactgaggcccacacctattgctgcaatttatagcactgatctgtcatcaataccacttgctgtcttggatgtgaagatgatttttcctgcagggattccctctacaaaattaaaaacactgggcatgtggaaataatattcatgctttaaattgtcttttctcttcactacaccaggggtccccaacccctaggccacagactgtggccctagtgtagtgaatagaaaagacaatttaaagcgtgaatattatttcctcatgcccagtgtttttaattttgtactggtctgtggcttgttagaaaccaggctgcacagcagaaggtgggcagcag

SEQ ID NO: 296062 - DNA, 2533 bp, Homo sapiens
gaattccgctccgcactgctcactcccgcgcagtgaggttggcacagccaccgctctgtggctcgcttggttcccttagtcccgagcgctcgcccactgcagattcctttcccgtgcagacatggcctctggcaccaccaccaccgccgtgaagattggaataattggtggaacaggcctggatgatccagaaattttagaaggaagaactgaaaaatatgtggatactccatttggcaagccatctgatgccttaattttggggaagataaaaaatgttgattgcatcctccttgcaaggcatggaaggcagcacaccatcatgccttcaaaggtcaactaccaggcgaacatctgggctttgaaggaagagggctgtacacatgtcatagtgaccacagcttgtggctccttgagggaggagattcagcccggcgatattgtcattattgatcagttcattgacaggaccactatgagacctcagtccttctatgatggaagtcattcttgtgccagaggagtgtgccatattccaatggctgagccgttttgccccaaaacgagagaggttcttatagagactgctaagaagctaggactccggtgccactcaaaggggacaatggtcacaatcgagggacctcgttttagctcccgggcagaaagcttcatgttccgcacctggggggcggatgttatcaacatgaccacagttccagaggtggttcttgctaaggaggctggaatttgttacgcaagtatcgccatggcgacagattatgactgctggaaggagcacgaggaagcagtttcggtggaccgggtcttaaagaccctgaaagaaaacgctaataaagccaaaagcttactgctcactaccatacctcagatagggtccacagaatggtcagaaaccctccataacctgaagaatatggcccagttttctgttttattaccaagacattaaagtagcatggctgcccaggagaaaagaagacattctaattccagtcattttgggaattcctgcttaacttgaaaaaaatatgggaaagacatgcagctttcatgcccttgcctatcaaagagtatgttgtaagaaagacaagacattgtgtgtattagagactcctgaatgatttagacaacttcaaaatacagaagaaaagcaaatgactagtaaacatgtgggaaaaaatattacattttaagggggaaaaaaaaacccaccattctcttctccccctattaaatttgcaacaataaagggtggagggtaatctctactttcctatactgccaaagaatgtgaggaagaaatgggactctttggttatttattgatgcgactgtaaattggtacagtatttctggagggcaatttggtaaaatgcatcaaaagacttaaaaatacggacgtactttgtgctgggaactctacatctagcaatttctctttaaaaccatatcagagatgcatacaaagaattatatataaagaagggtgtttaataatgatagttataataataaataattgaaacaatctgaatcccttgcaattggaggtaaattatgtcttagttataattagattgtgaatcagccaactgaaaatcctttttgcatatttcaatgtcctaaaaagacacggttgctctatatatgaagtgaaaaaaggatatggtagcattttatagtactagttttgctttaaaatgctatgtaaatatacaaaaaaactagaaagaaatatatataaccttgttattgtatttgggggagggatactgggataatttttattttctttgaatctttctgtgtcttcacatttttctacagtgaatataatcaaatagtaaagttgttgtaaaaataaaagtggatttagaaagatccagttcttgaaaacactgtttctggtaatgaagcagaatttaagttggtaatattaaggtgaatgtcatttaagggagttacatctttattctgctaaagaagaggatcattgatttctgtacagtcagaacagtacttgggtttgcaacagctttctgagaaaagctaggtgtttaatagtttaactgaaagtttaactatttaaaagactaaatgcacattttatggtatctgatattttaaaaagtaatgtttgattctcctttttatgagttaaattattttatacgagttggtaatttttgctttttaataaagtggaagcttgcttttttaactctttttttattgttattttatagaaatgctttttgttggccgggcacagttgctcatccatgtaatcccagcactgtgggaggccgagacgggtggatcacaaggtcaggagatcgagaccatcctggctaatgcgttgaaactccgtctctactaaaaatacaaaaaaaaaaaaaaaaaaaagagtgaaatgctttttgtttgcttcagttttttatcatggggagatctttttcctcagaattgttttcttttcactgtaggctattacaggatacttcaggat

SEQ ID NO: 296063 - DNA, 1588 bp, Homo sapiens
gaattccgctccgcactgctcactcccgcgcagtgaggttggcacagccaccgctctgtggctcgcttggttcccttagtcccgagcgctcgcccactgcagattcctttcccgtgcagacatggcctctggcaccaccaccaccgccgtgaagattggaataattggtggaacaggcctggatgatccagaaattttagaaggaagaactgaaaaatatgtggatactccatttggcaagccatctgatgccttaattttggggaagataaaaaatgttgattgcatcctccttgcaaggcatggaaggcagcacaccatcatgccttcaaaggtcaactaccaggcgaacatctgggctttgaaggaagagggctgtacacatgtcatagtgaccacagcttgtggctccttgagggaggagattcagcccggcgatattgtcattattgatcagttcattgacaggaccactatgagacctcagtccttctatgatggaagtcattcttgtgccagaggagtgtgccatattccaatggctgagccgttttgccccaaaacgagagaggttcttatagagactgctaagaagctaggactccggtgccactcaaaggggacaatggtcacaatcgagggacctcgttttagctcccgggcagaaagcttcatgttccgcacctggggggcggatgttatcaacatgaccacagttccagaggtggttcttgctaaggaggctggaatttgttacgcaagtatcgccatggcgacagattatgactgctggaaggagcacgaggaagcagtttcggtggaccgggtcttaaagaccctgaaagaaaacgctaataaagccaaaagcttactgctcactaccatacctcagatagggtccacagaatggtcagaaaccctccataacctgaagaatatggcccagttttctgttttattaccaagacattaaagtagcatggctgcccaggagaaaagaagacattctaattccagtcattttgggaattcctgcttaacttgaaaaaaatatgggaaagacatgcagctttcatgcccttgcctatcaaagagtatgttgtaagaaagacaagacattgtgtgtattagagactcctgaatgatttagacaacttcaaaatacagaagaaaagcaaatgactagtaaacatgtgggaaaaaatattacattttaagggggaaaaaaaaacccaccattctcttctccccctattaaatttgcaacaataaagggtggagggtaatctctactttcctatactgccaaagaatgtgaggaagaaatgggactctttggttatttattgatgcgactgtaaattggtacagtatttctggagggcaatttggtaaaatgcatcaaaagacttaaaaatacggacgtactttgtgctgggaactctacatctagcaatttctctttgccgccctctgaccgccgccgcccgaccgctctccgcccccaacggacgtgcgcgatactagacgtggggtgtgggcgggggggggcgtgccggcgcccgccgggctccccgggggcggccgc

SEQ ID NO: 296064 - DNA, 2584 bp, Homo sapiens
gaattccgctccgcactgctcactcccgcgcagtgaggttggcacagccaccgctctgtggctcgcttggttcccttagtcccgagcgctcgcccactgcagattcctttcccgtgcagacatggcctctggcaccaccaccaccgccgtgaagattggaataattggtggaacaggcctggatgatccagaaattttagaaggaagaactgaaaaatatgtggatactccatttggcaagccatctgatgccttaattttggggaagataaaaaatgttgattgcatcctccttgcaaggcatggaaggcagcacaccatcatgccttcaaaggtcaactaccaggcgaacatctgggctttgaaggaagagggctgtacacatgtcatagtgaccacagcttgtggctccttgagggaggagattcagcccggcgatattgtcattattgatcagttcattgacaggaccactatgagacctcagtccttctatgatggaagtcattcttgtgccagaggagtgtgccatattccaatggctgagccgttttgccccaaaacgagagaggttcttatagagactgctaagaagctaggactccggtgccactcaaaggggacaatggtcacaatcgagggacctcgttttagctcccgggcagaaagcttcatgttccgcacctggggggcggatgttatcaacatgaccacagttccagaggtggttcttgctaaggaggctggaatttgttacgcaagtatcgccatggcgacagattatgactgctggaaggagcacgaggaagcagtttcggtggaccgggtcttaaagaccctgaaagaaaacgctaataaagccaaaagcttactgctcactaccatacctcagatagggtccacagaatggtcagaaaccctccataacctgaaggaaagggaggtgaggaaccaagagtttagagtacccgaagttccacatctgaatatggcccagttttctgttttattaccaagacattaaagtagcatggctgcccaggagaaaagaagacattctaattccagtcattttgggaattcctgcttaacttgaaaaaaatatgggaaagacatgcagctttcatgcccttgcctatcaaagagtatgttgtaagaaagacaagacattgtgtgtattagagactcctgaatgatttagacaacttcaaaatacagaagaaaagcaaatgactagtaaacatgtgggaaaaaatattacattttaagggggaaaaaaaaacccaccattctcttctccccctattaaatttgcaacaataaagggtggagggtaatctctactttcctatactgccaaagaatgtgaggaagaaatgggactctttggttatttattgatgcgactgtaaattggtacagtatttctggagggcaatttggtaaaatgcatcaaaagacttaaaaatacggacgtactttgtgctgggaactctacatctagcaatttctctttaaaaccatatcagagatgcatacaaagaattatatataaagaagggtgtttaataatgatagttataataataaataattgaaacaatctgaatcccttgcaattggaggtaaattatgtcttagttataattagattgtgaatcagccaactgaaaatcctttttgcatatttcaatgtcctaaaaagacacggttgctctatatatgaagtgaaaaaaggatatggtagcattttatagtactagttttgctttaaaatgctatgtaaatatacaaaaaaactagaaagaaatatatataaccttgttattgtatttgggggagggatactgggataatttttattttctttgaatctttctgtgtcttcacatttttctacagtgaatataatcaaatagtaaagttgttgtaaaaataaaagtggatttagaaagatccagttcttgaaaacactgtttctggtaatgaagcagaatttaagttggtaatattaaggtgaatgtcatttaagggagttacatctttattctgctaaagaagaggatcattgatttctgtacagtcagaacagtacttgggtttgcaacagctttctgagaaaagctaggtgtttaatagtttaactgaaagtttaactatttaaaagactaaatgcacattttatggtatctgatattttaaaaagtaatgtttgattctcctttttatgagttaaattattttatacgagttggtaatttttgctttttaataaagtggaagcttgcttttttaactctttttttattgttattttatagaaatgctttttgttggccgggcacagttgctcatccatgtaatcccagcactgtgggaggccgagacgggtggatcacaaggtcaggagatcgagaccatcctggctaatgcgttgaaactccgtctctactaaaaatacaaaaaaaaaaaaaaaaaaaagagtgaaatgctttttgtttgcttcagttttttatcatggggagatctttttcctcagaattgttttcttttcactgtaggctattacaggatacttcaggat

SEQ ID NO: 296065 - DNA, 2702 bp, Homo sapiens
gaattccgctccgcactgctcactcccgcgcagtgaggttggcacagccaccgctctgtggctcgcttggttcccttagtcccgagcgctcgcccactgcagattcctttcccgtgcagacatggcctctggcaccaccaccaccgccgtgaaggtgagatgagccctcccagccgcagcggttcgccctgccggatgccttctcgcccccgcgccgggggaccgcgcctccgggggccatgcgcccggcccgtgcgtcccttgccgccgcggggagggactggggcgcggcactcgggactcacttgccgcgcgaggagaggattggaataattggtggaacaggcctggatgatccagaaattttagaaggaagaactgaaaaatatgtggatactccatttggcaagccatctgatgccttaattttggggaagataaaaaatgttgattgcatcctccttgcaaggcatggaaggcagcacaccatcatgccttcaaaggtcaactaccaggcgaacatctgggctttgaaggaagagggctgtacacatgtcatagtgaccacagcttgtggctccttgagggaggagattcagcccggcgatattgtcattattgatcagttcattgacaggaccactatgagacctcagtccttctatgatggaagtcattcttgtgccagaggagtgtgccatattccaatggctgagccgttttgccccaaaacgagagaggttcttatagagactgctaagaagctaggactccggtgccactcaaaggggacaatggtcacaatcgagggacctcgttttagctcccgggcagaaagcttcatgttccgcacctggggggcggatgttatcaacatgaccacagttccagaggtggttcttgctaaggaggctggaatttgttacgcaagtatcgccatggcgacagattatgactgctggaaggagcacgaggaagcagtttcggtggaccgggtcttaaagaccctgaaagaaaacgctaataaagccaaaagcttactgctcactaccatacctcagatagggtccacagaatggtcagaaaccctccataacctgaagaatatggcccagttttctgttttattaccaagacattaaagtagcatggctgcccaggagaaaagaagacattctaattccagtcattttgggaattcctgcttaacttgaaaaaaatatgggaaagacatgcagctttcatgcccttgcctatcaaagagtatgttgtaagaaagacaagacattgtgtgtattagagactcctgaatgatttagacaacttcaaaatacagaagaaaagcaaatgactagtaaacatgtgggaaaaaatattacattttaagggggaaaaaaaaacccaccattctcttctccccctattaaatttgcaacaataaagggtggagggtaatctctactttcctatactgccaaagaatgtgaggaagaaatgggactctttggttatttattgatgcgactgtaaattggtacagtatttctggagggcaatttggtaaaatgcatcaaaagacttaaaaatacggacgtactttgtgctgggaactctacatctagcaatttctctttaaaaccatatcagagatgcatacaaagaattatatataaagaagggtgtttaataatgatagttataataataaataattgaaacaatctgaatcccttgcaattggaggtaaattatgtcttagttataattagattgtgaatcagccaactgaaaatcctttttgcatatttcaatgtcctaaaaagacacggttgctctatatatgaagtgaaaaaaggatatggtagcattttatagtactagttttgctttaaaatgctatgtaaatatacaaaaaaactagaaagaaatatatataaccttgttattgtatttgggggagggatactgggataatttttattttctttgaatctttctgtgtcttcacatttttctacagtgaatataatcaaatagtaaagttgttgtaaaaataaaagtggatttagaaagatccagttcttgaaaacactgtttctggtaatgaagcagaatttaagttggtaatattaaggtgaatgtcatttaagggagttacatctttattctgctaaagaagaggatcattgatttctgtacagtcagaacagtacttgggtttgcaacagctttctgagaaaagctaggtgtttaatagtttaactgaaagtttaactatttaaaagactaaatgcacattttatggtatctgatattttaaaaagtaatgtttgattctcctttttatgagttaaattattttatacgagttggtaatttttgctttttaataaagtggaagcttgcttttttaactctttttttattgttattttatagaaatgctttttgttggccgggcacagttgctcatccatgtaatcccagcactgtgggaggccgagacgggtggatcacaaggtcaggagatcgagaccatcctggctaatgcgttgaaactccgtctctactaaaaatacaaaaaaaaaaaaaaaaaaaagagtgaaatgctttttgtttgcttcagttttttatcatggggagatctttttcctcagaattgttttcttttcactgtaggctattacaggatacttcaggat

SEQ ID NO: 296066 - DNA, 2570 bp, Homo sapiens
gtagtatcattcgtgttcagtccggcgcaggaggtaggtagaagatggcgatatgtggtcgtatgatatccttattctcaatagtgcgtgcgattgtacgaatacctatatcacacagtgccccgacagtggacctcgtgctgttcagaaccaaactgccagatagagaattcgtgatagtcttgtgacgtggagcatcgtacttaggatgagtcgctacgaagtttagctcaggtgatcgaactgacagcctatggtcgtgtactccatttggcaagccatctgatgccttaattttggggaagataaaaaatgttgattgcatcctccttgcaaggcatggaaggcagcacaccatcatgccttcaaaggtcaactaccaggcgaacatctgggctttgaaggaagagggctgtacacatgtcatagtgaccacagcttgtggctccttgagggaggagattcagcccggcgatattgtcattattgatcagttcattgacaggaccactatgagacctcagtccttctatgatggaagtcattcttgtgccagaggagtgtgccatattccaatggctgagccgttttgccccaaaacgagagaggttcttatagagactgctaagaagctaggactccggtgccactcaaaggggacaatggtcacaatcgagggacctcgttttagctcccgggcagaaagcttcatgttccgcacctggggggcggatgttatcaacatgaccacagttccagaggtggttcttgctaaggaggctggaatttgttacgcaagtatcgccatggcgacagattatgactgctggaaggagcacgaggaagcagtttcggtggaccgggtcttaaagaccctgaaagaaaacgctaataaagccaaaagcttactgctcactaccatacctcagatagggtccacagaatggtcagaaaccctccataacctgaagaatatggcccagttttctgttttattaccaagacattaaagtagcatggctgcccaggagaaaagaagacattctaattccagtcattttgggaattcctgcttaacttgaaaaaaatatgggaaagacatgcagctttcatgcccttgcctatcaaagagtatgttgtaagaaagacaagacattgtgtgtattagagactcctgaatgatttagacaacttcaaaatacagaagaaaagcaaatgactagtaaacatgtgggaaaaaatattacattttaagggggaaaaaaaaacccaccattctcttctccccctattaaatttgcaacaataaagggtggagggtaatctctactttcctatactgccaaagaatgtgaggaagaaatgggactctttggttatttattgatgcgactgtaaattggtacagtatttctggagggcaatttggtaaaatgcatcaaaagacttaaaaatacggacgtactttgtgctgggaactctacatctagcaatttctctttaaaaccatatcagagatgcatacaaagaattatatataaagaagggtgtttaataatgatagttataataataaataattgaaacaatctgaatcccttgcaattggaggtaaattatgtcttagttataattagattgtgaatcagccaactgaaaatcctttttgcatatttcaatgtcctaaaaagacacggttgctctatatatgaagtgaaaaaaggatatggtagcattttatagtactagttttgctttaaaatgctatgtaaatatacaaaaaaactagaaagaaatatatataaccttgttattgtatttgggggagggatactgggataatttttattttctttgaatctttctgtgtcttcacatttttctacagtgaatataatcaaatagtaaagttgttgtaaaaataaaagtggatttagaaagatccagttcttgaaaacactgtttctggtaatgaagcagaatttaagttggtaatattaaggtgaatgtcatttaagggagttacatctttattctgctaaagaagaggatcattgatttctgtacagtcagaacagtacttgggtttgcaacagctttctgagaaaagctaggtgtttaatagtttaactgaaagtttaactatttaaaagactaaatgcacattttatggtatctgatattttaaaaagtaatgtttgattctcctttttatgagttaaattattttatacgagttggtaatttttgctttttaataaagtggaagcttgcttttttaactctttttttattgttattttatagaaatgctttttgttggccgggcacagttgctcatccatgtaatcccagcactgtgggaggccgagacgggtggatcacaaggtcaggagatcgagaccatcctggctaatgcgttgaaactccgtctctactaaaaatacaaaaaaaaaaaaaaaaaaaagagtgaaatgctttttgtttgcttcagttttttatcatggggagatctttttcctcagaattgttttcttttcactgtaggctattacaggatacttcaggat

SEQ ID NO: 296067 - DNA, 1003 bp, Homo sapiens
gaattccgctccgcactgctcactcccgcgcagtgaggttggcacagccaccgctctgtggctcgcttggttcccttagtcccgagcgctcgcccactgcagattcctttcccgtgcagacatggcctctggcaccaccaccaccgccgtgaagattggaataattggtggaacaggcctggatgatccagaaattttagaaggaagaactgaaaaatatgtggatactccatttggcaagccatctgatgccttaattttggggaagataaaaaatgttgattgcatcctccttgcaaggcatggaaggcagcacaccatcatgccttcaaaggtcaactaccaggcgaacatctgggctttgaaggaagagggctgtacacatgtcatagtgaccacagcttgtggctccttgagggaggagattcagcccggcgatattgtcattattgatcagttcattgacaggaccactatgagacctcagtccttctatgatggaagtcattcttgtgccagaggagtgtgccatattccaatggctgagccgttttgccccaaaacgagagaggttcttatagagactgctaagaagctaggactccggtgccactcaaaggggacaatggtcacaatcgagggacctcgttttagctcccgggcagaaagcttcatgttccgcacctggggggcggatgttatcaacatgaccacagttccagaggtggttcttgctaaggaggctggaatttgttacgcaagtatcgccatggcgacagattatgactgctggaaggagcacgaggaagcaatgatcaagttccagatgatcctcagtgagggataccatcctttcaatattcaagagtcacccttctacagaggactcctagacttcccatcagtgggacatggcagaggtgaaatcctgcccctgtctcccttagacctggctggatactgcttccaacaacccatgcagccaccctgccctgacagctag

SEQ ID NO: 296068 - DNA, 2222 bp, Homo sapiens
gaattccgctccgcactgctcactcccgcgcagtgaggttggcacagccaccgctctgtggctcgcttggttcccttagtcccgagcgctcgcccactgcagattcctttcccgtgcagacatggcctctggcaccaccaccaccgccgtgaagattggaataattggtggaacaggcctggatgatccagaaattttagaaggaagaactgaaaaatatgtggatactccatttggcaagccatctgatgccttaattttggggaagataaaaaatgttgattgcatcctccttgcaaggcatggaaggcagcacaccatcatgccttcaaaggtcaactaccaggcgaacatctgggctttgaaggaagagggctgtacacatgtcatagtgaccacagcttgtggctccttgagggaggagattcagcccggcgatattgtcattattgatcagttcattgacagattatgactgctggaaggagcacgaggaagcagtttcggtggaccgggtcttaaagaccctgaaagaaaacgctaataaagccaaaagcttactgctcactaccatacctcagatagggtccacagaatggtcagaaaccctccataacctgaagaatatggcccagttttctgttttattaccaagacattaaagtagcatggctgcccaggagaaaagaagacattctaattccagtcattttgggaattcctgcttaacttgaaaaaaatatgggaaagacatgcagctttcatgcccttgcctatcaaagagtatgttgtaagaaagacaagacattgtgtgtattagagactcctgaatgatttagacaacttcaaaatacagaagaaaagcaaatgactagtaaacatgtgggaaaaaatattacattttaagggggaaaaaaaaacccaccattctcttctccccctattaaatttgcaacaataaagggtggagggtaatctctactttcctatactgccaaagaatgtgaggaagaaatgggactctttggttatttattgatgcgactgtaaattggtacagtatttctggagggcaatttggtaaaatgcatcaaaagacttaaaaatacggacgtactttgtgctgggaactctacatctagcaatttctctttaaaaccatatcagagatgcatacaaagaattatatataaagaagggtgtttaataatgatagttataataataaataattgaaacaatctgaatcccttgcaattggaggtaaattatgtcttagttataattagattgtgaatcagccaactgaaaatcctttttgcatatttcaatgtcctaaaaagacacggttgctctatatatgaagtgaaaaaaggatatggtagcattttatagtactagttttgctttaaaatgctatgtaaatatacaaaaaaactagaaagaaatatatataaccttgttattgtatttgggggagggatactgggataatttttattttctttgaatctttctgtgtcttcacatttttctacagtgaatataatcaaatagtaaagttgttgtaaaaataaaagtggatttagaaagatccagttcttgaaaacactgtttctggtaatgaagcagaatttaagttggtaatattaaggtgaatgtcatttaagggagttacatctttattctgctaaagaagaggatcattgatttctgtacagtcagaacagtacttgggtttgcaacagctttctgagaaaagctaggtgtttaatagtttaactgaaagtttaactatttaaaagactaaatgcacattttatggtatctgatattttaaaaagtaatgtttgattctcctttttatgagttaaattattttatacgagttggtaatttttgctttttaataaagtggaagcttgcttttttaactctttttttattgttattttatagaaatgctttttgttggccgggcacagttgctcatccatgtaatcccagcactgtgggaggccgagacgggtggatcacaaggtcaggagatcgagaccatcctggctaatgcgttgaaactccgtctctactaaaaatacaaaaaaaaaaaaaaaaaaaagagtgaaatgctttttgtttgcttcagttttttatcatggggagatctttttcctcagaattgttttcttttcactgtaggctattacaggatacttcaggat

SEQ ID NO: 296069 - DNA, 2269 bp, Homo sapiens
ggattttatatatatgtgtatatatatacacacatacatacatatacacacacacacatataaaacctaaagagagaaaatgaggaattcctgctctagacaaaactgagaatcttggtcttcatgctacagcattaaggaacaccatactaataatccctttttctggggtagtattgttagcactgaaatgtgtatcattcattccctcactaagtcatttcagaaacacttagcacctgctatacgtcaaggtctggtttgcaaagataaagagttgtgatgatgatcctatggtgtttggagatatagacacataaaaatttcaatgatttcttacagtggggtaaggataagggatagaggttgcataaacaataatccaggctgggggctggtatggcaataagtgattatcagaacaatgctctgagataagcattattaacctcactttacaggaaagggaggtgaggaaccaagagtttagagtacccgaagttccacatctggttagtgaacttgaaaattttctgtagaatttatttaaagtgtatgtttcctgcgtcctcactttgatctagaaaatcaaaatctgtttttttttttaacaaacatctcagtaattacgccaacatgtgaatatcactgcctcctttcttcctttcagaatatggcccagttttctgttttattaccaagacattaaagtagcatggctgcccaggagaaaagaagacattctaattccagtcattttgggaattcctgcttaacttgaaaaaaatatgggaaagacatgcagctttcatgcccttgcctatcaaagagtatgttgtaagaaagacaagacattgtgtgtattagagactcctgaatgatttagacaacttcaaaatacagaagaaaagcaaatgactagtaaacatgtgggaaaaaatattacattttaagggggaaaaaaaaacccaccattctcttctccccctattaaatttgcaacaataaagggtggagggtaatctctactttcctatactgccaaagaatgtgaggaagaaatgggactctttggttatttattgatgcgactgtaaattggtacagtatttctggagggcaatttggtaaaatgcatcaaaagacttaaaaatacggacgtactttgtgctgggaactctacatctagcaatttctctttaaaaccatatcagagatgcatacaaagaattatatataaagaagggtgtttaataatgatagttataataataaataattgaaacaatctgaatcccttgcaattggaggtaaattatgtcttagttataattagattgtgaatcagccaactgaaaatcctttttgcatatttcaatgtcctaaaaagacacggttgctctatatatgaagtgaaaaaaggatatggtagcattttatagtactagttttgctttaaaatgctatgtaaatatacaaaaaaactagaaagaaatatatataaccttgttattgtatttgggggagggatactgggataatttttattttctttgaatctttctgtgtcttcacatttttctacagtgaatataatcaaatagtaaagttgttgtaaaaataaaagtggatttagaaagatccagttcttgaaaacactgtttctggtaatgaagcagaatttaagttggtaatattaaggtgaatgtcatttaagggagttacatctttattctgctaaagaagaggatcattgatttctgtacagtcagaacagtacttgggtttgcaacagctttctgagaaaagctaggtgtttaatagtttaactgaaagtttaactatttaaaagactaaatgcacattttatggtatctgatattttaaaaagtaatgtttgattctcctttttatgagttaaattattttatacgagttggtaatttttgctttttaataaagtggaagcttgcttttttaactctttttttattgttattttatagaaatgctttttgttggccgggcacagttgctcatccatgtaatcccagcactgtgggaggccgagacgggtggatcacaaggtcaggagatcgagaccatcctggctaatgcgttgaaactccgtctctactaaaaatacaaaaaaaaaaaaaaaaaaaagagtgaaatgctttttgtttgcttcagttttttatcatggggagatctttttcctcagaattgttttcttttcactgtaggctattacaggatacttcaggat

SEQ ID NO: 296070 - DNA, 3422 bp, Homo sapiens
gattgacttcaagataataagctgctaattgtaaacaaaacagttaccctccagtattaatatgactcattagtgtgagccatttgggtcaagtatgattatgacccttggacttcctgatgtagtattaaatttcaactctggttatccattagcaatctgtagagaacttaatgaacctgaacccaggcttctctagctctggtaacgtgtgattgttttcactacaatatgatacatagatggtaccttacttttcctcattcttaataggtgtctaagaatgtcagggcaaaagtatgggcatttttcttgctatgttcagaaagtacagttctctccaacttgcagaggtacttttcttgattaaatagccttctctagcaacatcattttcagactaactaaatgaatgcagtatactcttttctttgttctcaatcattcactccttatgcaaagccaatataattttcctcataccttatgcttgaggatattgttgaagaacacttcctggaacacttctcacttgtgatgctgtactaattttttttttttaatttaagctagtatactaagtgaacaccatggtcagttgtgagcattttggtttccgcaaaggatggatggtgagcatcatgggaaagctgtagtttagtgacttagcccttagtgattaatagatttgcatgtacatagaagtctttgttggccttataatctgctgttatatttggcatggattttcatggttttgagaatgacatcctggccctgtggtccccgagggtcatggtccttgtgacctggcccctgttcactgcccccttcgctagcacgagttgctgtgcagggctggaggtagctaccatggcttgtttcaaggaaggaaactctggtacggtggcaccctcaggagtggaggacagtgaacttccttgaagagggagtgactaaggtgacctccaacctgccctgagccagctgccctgcaggtgccacgtgagcctgctctggcatccacaggatgctcctggagcctcttctctggctgctacctcagggcatggttgtggccccaccaacacctattttccaaataattattcattcttgtgacagtggcctgaacatgtttttaattttctcaacaagcatttagccagcacttatccagtgaaacaatttgataaggtttcaaggagtatctgatgggttaggaagtcacgaaatgaggagttcttgccacatttgcagagtccctccttgataaggtttggcggtgtccccacccaaatctcatgttgaattgtagttcccataatccccacatgttgtgggagggacccagtgggaggtaattaaatcatgggggtggttacccccacactgctgttctcatgatactgagttctcacaagtcctgtttgttttataaggggcttttcccccttttgctcaacacttcttcctgccatcatgtgaagaaggacgtgtttgtttccccttctgccacgattgtaagtttcctgaggccttcccagctatgtggaactgtgagttaattaaacctctttcctttataaattacccagtcatgggcagtcctttacagcagcatgagaatggactaatacactcctcaaatgttttgaagattgttgcaccttggaactaccagtgtgcacacaatctggctcaatgtatatattggcccagcaaggcaaagaactgaagttccaggatggaagaacctgtgttctcctcataatagtatagaataattcaagataggcaagaaggacagcagtaaatgaagaccatggaagaaaagaaggaatgccaaagatcgaggaaatctaccaagactagtagggtagtccagaagaagctgtttcagggcctgttgccagctatgcctttgagaacctcgggatcccaaagaatgaggggaatttcttcagaaagacaatctcggcatgcattatttctttgttttgaagattcactcatgttgcatgcatctgtagcttgtgccttttttattgcctagtagtattctgtcatatgcctatcttacaatttgattatctattcacctgttgatgaatgtttgaattttttccatttgaggaattttatgaataaagctgctataagcatgaaattacaagtctttttgtgaacatattttcacttgtgcaaatgcctatactcccaccagtaatttgtaagaattcttgacaaagcttggtattgtcagcgtttttaattttagccattctattgggtatattttgatatctcgtggttttgatttgcatttttctgattaaagatgttgaacttcttttcatgtgcttattggccattcacatatttcgtgaactatctgtacaaatattttgtttattaaaaaattagattgttttgttttattattgaatagtaagaatgtttatatattctggatacactctttttcagatatgtgtgttgtgactattcttagtctttagcttgccttttcattttcttaattatgtctttcaaagaacaagtttttcattttgacgaagcctagtttatcaattttttttatggttggtgcttttgtgtgttccaagaaatctttgcctactcatttaattacctgtgtgcccttgtcaaaatcatttaattttgactactcacttaattaccttgcctactcatttaattacctgtgtgcccttgtcaaaatttactgtttatctgtgaatctggatgatctatttatgtcatttatctatgtgtctcttcttatgccagtaccccactgtcttgattattgtggctttatggtgtcttgaaattaagtattgttaagctttgcaatcttttccaagattgttttggctataggtcctttctttataaagtttatattaagcttctccatttttctttaagaaaaaatctgctggaatggcactgaatttttaggtcgatttgggaagaattgacaatattgaacctttcaatcgatggacatggtatgtttctgcatttatttgggccttttaaaatttatctcagcaatattttgtagttttagtgaagaagtcttgtatatatcttttgttaaatgtattcctaaatattttgtggaaatgttactgtaaatagtactttaatttcatttttaagtttattgctggtatacagaaatatgttttatttttgtatattgactttatattctgtaatcttattaaattcacttagttcagtagtagttcttatttttattttattgcaagtgccttagggataccttgtgtacacaatcatgtcatatatgaataacaacagtttaccttttgtttcttcttgctttgtcgtaatggctaggaccttcaacctaatgttgaatagaa

SEQ ID NO: 296071 - DNA, 1918 bp, Homo sapiens
gtctggctgccgcggagggcctactatttgttgcggttggctacgccttccagctcaccaaaaacagtctcaaaaacaaccatttcctctctgctgagagccagggaaggcgagctctgcgcacacgggcgtccctgcagcagccactctgctttccaggaccggccaactgccctggaggcatccacacaggggcccaggcagcacagaggagctgtgaacccgctccacaccggccaccctgcccggagcctggcactcacagcaggccggtgctaaggagtgtggcgcgggctcgactcccactgctgccggcctcccgagtgactctgttttccactgctgcaggcgagaagaggcacgcgcggcacaggccggcctccgcttcccgggaagacggcgcactcctggccctgggttcttgctgctgcccaccctctgctccctgggatgggccccgaggcgagcagcttcagcacaggcctggccctgctccaggtgcaggaaggaggataaggccgggccgagaggcggcacacctggaccatcccatgggcctccgcccgcgccgccccgaggatgagtggtgatgtcctctagccacccctagcagcgtcggctctccctggacgtgcggccgcggactgggacttggctttctccggataagcggcggcaccggcgtcagcgatgaccgtgcagagactcgtggccgcggccgtgctggtggccctggtctcactcatcctcaacaacgtggcggccttcacctccaactgggtgtgccagacgctggaggatgggcgcaggcgcagcgtggggctgtggaggtcctgctggctggtggacaggacccggggagggccgagccctggggccagagccggccaggtggacgcacatgactgtgaggcgctgggctggggctccgaggcagccggcttccaggagtcccgaggcaccgtcaaactgcagttcgacatgatgcgcgcctgcaacctggtggccacggccgcgctcaccgcaggccagctcaccttcctcctggggctggtgggcctgcccctgctgtcacccgacgccccgtgctgggaggaggccatggccgctgcattccaactggcgagttttgtcctggtcatcgggctcgtgactttctacagaattggcccatacaccaacctgtcctggtcctgctacctgaacattggcgcctgccttctggccacgctggcggcagccatgctcatctggaacattctccacaagagggaggactgcatggccccccgggtgattgtcatcagccgctccctgacagcgcgctttcgccgtgggctggacaatgactacgtggagtcaccatgctgagtcgcccttctcagcgctccatcaacgcacacctgctatcgtggaacagcctagaaaccaagggactccaccaccaagtcacttcccctgctcgtgcagaggcacgggatgagtctgggtgacctctgcgccatgcgtgcgagacacgtgtgcgtttactgttatgtcggtcatatgtctgtacgtgtcgtgggccaacctcgttctgcctccagctttcctggttagcgcaacgcggctccacgaccacacgcacttcagggtggaagctggaagctgagacacaggttaggtggcgcgaggctgccctgcgctccgctttgctttgggattaatttattctgcatctgctgagaggggcaccccagccatatcttacactttggtaaagcagaaaaccaggaaaattttcttaaaatatccacaatattccttgagtgagtcagaatctatagccggttagtgatggtttcagacagaatcgtgttcgtgtctgttttgctcgattcctttcctaagttaaataaatgcaagcctctgaactctg

SEQ ID NO: 296072 - DNA, 1626 bp, Homo sapiens
ccgctctgaggactggagggaccagccgcccacagagccccgagcccgtggtcccggcgagaagaggcacgcgcggcacaggccggcctccgcttcccgggaagacggcgcactcctggccctgggttcttgctgctgcccaccctctgctccctgggatgggccccgaggcgagcagcttcagcacaggcctggccctgctccaggtgcaggaaggaggataaggccgggccgagaggcggcacacctggaccatcccatgggcctccgcccgcgccgccccgaggatgagtggtgatgtcctctagccacccctagcagcgtcggctctccctggacgtgcggccgcggactgggacttggctttctccggataagcggcggcaccggcgtcagcgatgaccgtgcagagactcgtggccgcggccgtgctggtggccctggtctcactcatcctcaacaacgtggcggccttcacctccaactgggtgtgccagacgctggaggatgggcgcaggcgcagcgtggggctgtggaggtcctgctggctggtggacaggacccggggagggccgagccctggggccagagccggccaggtggacgcacatgactgtgaggcgctgggctggggctccgaggcagccggcttccaggagtcccgaggcaccgtcaaactgcagttcgacatgatgcgcgcctgcaacctggtggccacggccgcgctcaccgcaggccagctcaccttcctcctggggctggtgggcctgcccctgctgtcacccgacgccccgtgctgggaggaggccatggccgctgcattccaactggcgagttttgtcctggtcatcgggctcgtgactttctacagaattggcccatacaccaacctgtcctggtcctgctacctgaacattggcgcctgccttctggccacgctggcggcagccatgctcatctggaacattctccacaagagggaggactgcatggccccccgggtgattgtcatcagccgctccctgacagcgcgctttcgccgtgggctggacaatgactacgtggagtcaccatgctgagtcgcccttctcagcgctccatcaacgcacacctgctatcgtggaacagcctagaaaccaagggactccaccaccaagtcacttcccctgctcgtgcagaggcacgggatgagtctgggtgacctctgcgccatgcgtgcgagacacgtgtgcgtttactgttatgtcggtcatatgtctgtacgtgtcgtgggccaacctcgttctgcctccagctttcctggttagcgcaacgcggctccacgaccacacgcacttcagggtggaagctggaagctgagacacaggttaggtggcgcgaggctgccctgcgctccgctttgctttgggattaatttattctgcatctgctgagaggggcaccccagccatatcttacactttggtaaagcagaaaaccaggaaaattttcttaaaatatccacaatattccttgagtgagtcagaatctatagccggttagtgatggtttcagacagaatcgtgttcgtgtctgttttgctcgattcctttcctaagttaaataaatgcaagcctctgaactctg

SEQ ID NO: 296073 - DNA, 2507 bp, Homo sapiens
gtctggctgccgcggagggcctactatttgttgcggttggctacgccttccagctcaccaaaaacagtctcaaaaacaaccatttcctctctgctgagagccagggaaggcgagctctgcgcacacgggcgtccctgcagcagccactctgctttccaggaccggccaactgccctggaggcatccacacaggggcccaggcagcacagaggagctgtgaacccgctccacaccggccaccctgcccggagcctggcactcacagcaggccggtgctaaggagtgtggcgcgggctcgactcccactgctgccggcctcccgagtgactctgttttccactgctgcaggcgagaagaggcacgcgcggcacaggccggcctccgcttcccgggaagacggcgcactcctggccctgggttcttgctgctgcccaccctctgctccctgggatgggccccgaggcgagcagcttcagcacaggcctggccctgctccaggtgcaggaaggaggataaggccgggccgagaggcggcacacctggaccatcccatgggcctccgcccgcgccgccccgaggatgagtggtgatgtcctctagccacccctagcagcgtcggctctccctggacgtgcggccgcggactgggacttggctttctccggataagcggcggcaccggcgtcagcgatgaccgtgcagagactcgtggccgcggccgtgctggtggccctggtctcactcatcctcaacaacgtggcggccttcacctccaactgggtgtgccagacgctggaggatgggcgcaggcgcagcgtggggctgtggaggtcctgctggctggtggacaggacccggggagggccgagccctggggccagagccggccaggtggacgcacatgactgtgaggcgctgggctggggctccgaggcagccggcttccaggagtcccgaggcaccgtcaaactgcagttcgacatgatgcgcgcctgcaacctggtggccacggccgcgctcaccgcaggccagctcaccttcctcctggggctggtgggcctgcccctgctgtcacccgacgccccgtgctgggaggaggccatggccgctgcattccaactggcgagttttgtcctggtcatcgggctcgtgactttctacagaattggcccatacaccaacctgtcctggtcctgctacctgaacattggcgcctgccttctggccacgctggcggcagccatgctcatctggaacattctccacaagagggaggactgcatggccccccgggtgattgtcatcagccgctccctgacagcgcgctttcgccgtgggctggacaatgactacgtggagtcaccatgctgagtcgcccttctcagcgctccatcaacgcacacctgctatcgtggaacagcctagaaaccaagggactccaccaccaagtcacttcccctgctcgtgcagaggcacgggatgagtctgggtgacctctgcgccatgcgtgcgagacacgtgtgcgtttactgttatgtcggtcatatgtctgtacgtgtcgtgggccaacctcgttctgcctccagctttcctggttagcgcaacgcggctccacgaccacacgcacttcagggtggaagctggaagctgagacacaggttaggtggcgcgaggctgccctgcgctccgctttgctttgggattaatttattctgcatctgctgagaggggcaccccagccatatcttacactttggtaaagcagaaaaccaggaaaattttcttaaaatatccacaatattccttgagtgagtcagaatctatagccggttagtgatggtttcagacagaatcgtgttcgtgtctgttttgctcgattcctttcctaagttaaataaatgcaagcctctgaactctgaataaaaaaaaaataaaaaaaaaaacaacaaccactcatcaaaacaaacacaaaaaacaaaagggggggccccccccccataaagtatttcccccggggggggcgcccccaatcttttgtcggcgcgctaacccccgtttttttgtgtacacaagggggggccctaatatgggatggcgctgtcattatataacaagccgagtagcggctaatcgcccccctatttattacaacaacacgtgctctgtgatacgggtggaacacaccttgcgtgcctactcgggggtcaccttttgtggttgggaggcagcccctcactactcttaggcgggggtgcgagccaaccacactattgggtggccacaacaataattgccttctatggcggacaactattatacgaaccgctctcatcgagcgggagccatgtactcatagcacccttctccagcagaggcgtatatccaacggtgcctacaaacaacctgtgggctgataaatatactcgatgcgcgtgataaaacaacctactgctgcgccagccgggagtagttgagtgcgtggctcaaactccactttatacccgggt

SEQ ID NO: 296074 - DNA, 1738 bp, Homo sapiens
gtctggctgccgcggagggcctactatttgttgcggttggctacgccttccagctcaccaaaaacagtctcaaaaacaaccatttcctctctgctgagagccagggaaggcgagctctgcgcacacgggcgtccctgcagcagccacttctgttttccactgctgcaggcgagaagaggcacgcgcggcacaggccggcctccgcttcccgggaagacggcgcactcctggccctgggttcttgctgctgcccaccctctgctccctgggatgggccccgaggcgagcagcttcagcacaggcctggccctgctccaggtgcaggaaggaggataaggccgggccgagaggcggcacacctggaccatcccatgggcctccgcccgcgccgccccgaggatgagtggtgatgtcctctagccacccctagcagcgtcggctctccctggacgtgcggccgcggactgggacttggctttctccggataagcggcggcaccggcgtcagcgatgaccgtgcagagactcgtggccgcggccgtgctggtggccctggtctcactcatcctcaacaacgtggcggccttcacctccaactgggtgtgccagacgctggaggatgggcgcaggcgcagcgtggggctgtggaggtcctgctggctggtggacaggacccggggagggccgagccctggggccagagccggccaggtggacgcacatgactgtgaggcgctgggctggggctccgaggcagccggcttccaggagtcccgaggcaccgtcaaactgcagttcgacatgatgcgcgcctgcaacctggtggccacggccgcgctcaccgcaggccagctcaccttcctcctggggctggtgggcctgcccctgctgtcacccgacgccccgtgctgggaggaggccatggccgctgcattccaactggcgagttttgtcctggtcatcgggctcgtgactttctacagaattggcccatacaccaacctgtcctggtcctgctacctgaacattggcgcctgccttctggccacgctggcggcagccatgctcatctggaacattctccacaagagggaggactgcatggccccccgggtgattgtcatcagccgctccctgacagcgcgctttcgccgtgggctggacaatgactacgtggagtcaccatgctgagtcgcccttctcagcgctccatcaacgcacacctgctatcgtggaacagcctagaaaccaagggactccaccaccaagtcacttcccctgctcgtgcagaggcacgggatgagtctgggtgacctctgcgccatgcgtgcgagacacgtgtgcgtttactgttatgtcggtcatatgtctgtacgtgtcgtgggccaacctcgttctgcctccagctttcctggttagcgcaacgcggctccacgaccacacgcacttcagggtggaagctggaagctgagacacaggttaggtggcgcgaggctgccctgcgctccgctttgctttgggattaatttattctgcatctgctgagaggggcaccccagccatatcttacactttggtaaagcagaaaaccaggaaaattttcttaaaatatccacaatattccttgagtgagtcagaatctatagccggttagtgatggtttcagacagaatcgtgttcgtgtctgttttgctcgattcctttcctaagttaaataaatgcaagcctctgaactctg

SEQ ID NO: 296075 - DNA, 644 bp, Homo sapiens
gcggccgcgagcggggcgggggctgccggtgccctccgcaggccgggcctcctgggcgcccctcggtgctgcaggctggggggccttgggtacctgcagagccttttctctgaattccttatgtccggtgggccagaagcccgtcctcctatgctggtggaaggcggaggaccggagtccctgcagaaggccccgtgcactcgggggcctccctcacatcccgtgccccctgcgctggccttcacagtaggtaatggctccggcccgggtgttcgctgtccacggaacatggcagaggggcaccccggcccggaaagacgccagagccagcaggggctgtttcgggccgcgtggctccccgggtctcggccgtctcccctcttctgcgtctgttccgtgacttcgcctgggtgggatgtaccgcaggtgcatcgcgtcgaggtggggcacggccgccggcaagaaacccaccctgtccggaggcgggcgtgagacaagcccagcccgcacgcgctcatctttcttcgttttttgatcagtttattcagaattgctctataatttaccaattgtatgtatttaacctattcttgtggaaaaaaaaggtctttcattatatctttatttctgaatttcaaactgct

SEQ ID NO: 296076 - DNA, 360 bp, Homo sapiens
gcggtactcggccgagggcgagccttttctctgaattccttatgtccaggggctgtttcgggccgcgtggctccccgggtctcggccgtctcccctcttctgcgtctgttccgtgacttcgcctgggtgggatgtaccgcaggtgcatcgcgtcgaggtggggcacggccgccggcaagaaacccaccctgtccggaggcgggcgtgagacaagcccagcccgcacgcgctcatctttcttcgttttttgatcagtttattcagaattgctctataatttaccaattgtatgtatttaacctattcttgtggaaaaaaaaggtctttcattatatctttatttctgaatttcaaactgct

SEQ ID NO: 296077 - DNA, 2414 bp, Homo sapiens
gtttctccatagcataaatgaaaaaaaaaaaaaaaaagtaaacagggcagtgtgtgctttttcttttctcccccctcaactatattaagaactcctagtttcaccctttctccatcccatcatcccacctatctgtggttgcttcccaagacctcctcccaagatagacatctcctacccagtgcccttgtgtgaccccaggactcaagtctcagactgtgaacagatgtggccatgcccagagacgccagcctggccagaagggcatgcctcagcttactacttcatctctcctggttccctccctgcagtgccccgggtgtcatcttctcccactctgggtaccagggattctaccacataggcttcccaaagccccattctaactcccctctctcagggaagccctagagagaggtccaaaaagcattcacagctgtatcacactctatgcaggtggggtaggagactgatcaggcctgctgtggggaagcagtatgtatgaacacagccagaaatgtcatagtccaaacaggatgctttcaggccatctcagctgcttgatggtgagatggttcccttattccttcaggaaaggcttagcattgggccacataggggaagcagctttgaacaaatcagtcatagcactgcctatagcattagccagtgaccaaattagggacaacgtcttggcacagaattgcttatcaaggaacatttccacaagaaagaaaatattaaggggttatttccacagaagcccaaaacgtcttggaaacacagaggtgaggaggaggaatagtaattgtcaatgagcttttaataccaagatacaccccctgcccccaaagaagagtcctcttttagggaatcagaaccttcattgtcctagaagctgaaagattcttggaacattttagcttttactctcaacttgctgttctctttacattccttaagttagactttcgggtgtggcttctctcccaggggtaacatttacttccattttctagaccgaaccaaaagtcttctgcagaatctcccaccgagtgtggtaagaaggaaggacaaaaggctttaggatataaatttcatgttacagagcatgtcattgtcaaaggaaatctgtggccctgagattttaagaacataaaatgtgacatttgatatttctccagcccagggaagtaagatggttagcaatggttgccttaatcaaatggtcccatttttaaccccaaaggaagtgcccacagcaagaggtttgtgtgatgcacttatgtcctccggtgaggaaagggggccacatatgaaaggccccttaggtcagatcctgagagtagcacatttgagtgcagattcctgggccccacctcaaacctactaattctgaatctctgggaatagggccaggaaatctgccctttctacaaactacccaagttgttctgttgcacatcaatgtttgggaaccactgctgtaagggaatcattctggtcaccttgagctttgagctaccactaagccatgaaagaaaatacatcatacagggaagagagaagggaggaggttccaagtagtaactggcagatcctcctgtctggaggtaccaccttctattctggtttctgacttttccttcttgatgaccatagatgtgttccagaggcaaaagagacacattatcccagatggcagaacatgctttcaaaacatataaaatgtcaaagttccagatccttctacatctttagtcctgtctgaggatggtagctggctctctgtagctgatagatggctagagttccatccaaatccttgaccacgacttcatggagatttgaataatctatttgatgagatttctatttcaataacccacctctctcaccccacattcatatccctaaatttgaccctctgggccgagtcacattaccttcaggagacttgatcccagtagactgaggtcttccctttcagcagaaagatttcatttccctggcttgccagtggcactgatttccgaacacccaatgagtttaatattctttcctccttggcattactgccccagcctctttttattttttttgtgtgtgtctaataaccaggaaaaaaataaagcttaggttttaaaaagttttaaaaataatctgtttcagaaactgtcaaatgtaccatatttgtattaagagttgttgggaatttttgtacaatgaatttacatttatttatggtgacatatttacgcttgtgatcaaataatgatgttaaattcttaaatcatatttgctatgcagctgaagatgatattttgatttgtattttgggggtacctgtgttgagttgataaacatttccatcttcattaaaactgcttccaaactagtaaaaccaaaaaatt

SEQ ID NO: 296078 - DNA, 2360 bp, Homo sapiens
gtttctccatagcataaatgaaaaaaaaaaaaaaaaagtaaacagggcagtgtgtgctttttcttttctcccccctcaactatattaagaactcctagtttcaccctttctccatcccatcatcccacctatctgtggttgcttcccaagacctcctcccaagatagacatctcctacccagtgcccttgtgtgaccccaggactcaagtctcagactgtgaacagatgtggccatgcccagagacgccagcctggccagaagggcatgcctcagcttactacttcatctctcctggttccctccctgcagtgccccgggtgtcatcttctcccactctgggtaccagggattctaccacataggcttcccaaagccccattctaactcccctctctcagggaagccctagagagaggtccaagcctgctgtggggaagcagtatgtatgaacacagccagaaatgtcatagtccaaacaggatgctttcaggccatctcagctgcttgatggtgagatggttcccttattccttcaggaaaggcttagcattgggccacataggggaagcagctttgaacaaatcagtcatagcactgcctatagcattagccagtgaccaaattagggacaacgtcttggcacagaattgcttatcaaggaacatttccacaagaaagaaaatattaaggggttatttccacagaagcccaaaacgtcttggaaacacagaggtgaggaggaggaatagtaattgtcaatgagcttttaataccaagatacaccccctgcccccaaagaagagtcctcttttagggaatcagaaccttcattgtcctagaagctgaaagattcttggaacattttagcttttactctcaacttgctgttctctttacattccttaagttagactttcgggtgtggcttctctcccaggggtaacatttacttccattttctagaccgaaccaaaagtcttctgcagaatctcccaccgagtgtggtaagaaggaaggacaaaaggctttaggatataaatttcatgttacagagcatgtcattgtcaaaggaaatctgtggccctgagattttaagaacataaaatgtgacatttgatatttctccagcccagggaagtaagatggttagcaatggttgccttaatcaaatggtcccatttttaaccccaaaggaagtgcccacagcaagaggtttgtgtgatgcacttatgtcctccggtgaggaaagggggccacatatgaaaggccccttaggtcagatcctgagagtagcacatttgagtgcagattcctgggccccacctcaaacctactaattctgaatctctgggaatagggccaggaaatctgccctttctacaaactacccaagttgttctgttgcacatcaatgtttgggaaccactgctgtaagggaatcattctggtcaccttgagctttgagctaccactaagccatgaaagaaaatacatcatacagggaagagagaagggaggaggttccaagtagtaactggcagatcctcctgtctggaggtaccaccttctattctggtttctgacttttccttcttgatgaccatagatgtgttccagaggcaaaagagacacattatcccagatggcagaacatgctttcaaaacatataaaatgtcaaagttccagatccttctacatctttagtcctgtctgaggatggtagctggctctctgtagctgatagatggctagagttccatccaaatccttgaccacgacttcatggagatttgaataatctatttgatgagatttctatttcaataacccacctctctcaccccacattcatatccctaaatttgaccctctgggccgagtcacattaccttcaggagacttgatcccagtagactgaggtcttccctttcagcagaaagatttcatttccctggcttgccagtggcactgatttccgaacacccaatgagtttaatattctttcctccttggcattactgccccagcctctttttattttttttgtgtgtgtctaataaccaggaaaaaaataaagcttaggttttaaaaagttttaaaaataatctgtttcagaaactgtcaaatgtaccatatttgtattaagagttgttgggaatttttgtacaatgaatttacatttatttatggtgacatatttacgcttgtgatcaaataatgatgttaaattcttaaatcatatttgctatgcagctgaagatgatattttgatttgtattttgggggtacctgtgttgagttgataaacatttccatcttcattaaaactgcttccaaactagtaaaaccaaaaaatt

SEQ ID NO: 296079 - DNA, 2490 bp, Homo sapiens
  misc_feature (2490)..(2490): n is a, c, g, or t
gtttctccatagcataaatgaaaaaaaaaaaaaaaaagtaaacagggcagtgtgtgctttttcttttctcccccctcaactatattaagaactcctagtttcaccctttctccatcccatcatcccacctatctgtggttgcttcccaagacctcctcccaagatagacatctcctacccagtgcccttgtgtgaccccaggactcaagtctcagactgtgaacagatgtggccatgcccagagacgccagcctggccagaagggcatgcctcagcttactacttcatctctcctggttccctccctgcagtgccccgggtgtcatcttctcccactctgggtaccagggattctaccacataggcttcccaaagccccattctaactcccctctctcagggaagccctagagagaggtccaaaaagcattcacagctgtatcacactctatgcaggtggggtaggagactgatcaggcctgctgtggggaagcagtatgtatgaacacagccagaaatgtcatagtccaaacaggatgctttcaggccatctcagctgcttgatggtgagatggttcccttattccttcaggaaaggcttagcattgggccacataggggaagcagctttgaacaaatcagtcatagcactgcctatagcattagccagtgaccaaattagggacaacgtcttggcacagaattgcttatcaaggaacatttccacaagaaagaaaatattaaggggttatttccacagaagcccaaaacgtcttggaaacacagaggtgaggaggaggaatagtaattgtcaatgagcttttaataccaagatacaccccctgcccccaaagaagagtcctcttttagggaatcagaaccttcattgtcctagaagctgaaagattcttggaacattttagcttttactctcaacttgctgttctctttacattccttaagttagactttcgggtgtggcttctctcccaggggtaacatttacttccattttctagaccgaaccaaaagtcttctgcagaatctcccaccgagtgtggtaagaaggaaggacaaaaggctttaggatataaatttcatgttacagagcatgtcattgtcaaaggaaatctgtggccctgagattttaagaacataaaatgtgacatttgatatttctccagcccagggaagtaagatggttagcaatggttgccttaatcaaatggtcccatttttaaccccaaaggaagtgcccacagcaagaggtttgtgtgatgcacttatgtcctccggtgaggaaagggggccacatatgaaaggccccttaggtcagatcctgagagtagcacatttgagtgcagattcctgggccccacctcaaacctactaattctgaatctctgggaatagggccaggaaatctgccctttctacaaactacccaagttgttctgttgcacatcaatgtttgggaaccactgctgtaagggaatcattctggtcaccttgagctttgagctaccactaagccatgaaagaaaatacatcatacagggaagagagaagggaggaggttccaagtagtaactggcagatcctcctgtctggaggtaccaccttctattctggtttctgacttttccttcttgatgaccatagatgtgttccagaggcaaaagagacacattatcccagatggcagaacatgctttcaaaacatataaaatgtcaaagttccagatccttctacatctttagtcctgtctgaggatggtagctggctctctgtagctgatagatggctagagttccatccaaatccttgaccacgacttcatggagatttgaataatctatttgatgagatttctatttcaataacccacctctctcaccccacattcatatccctaaatttgaccctctgggccgagtcacattaccttcaggagacttgatcccagtagactgaggtcttccctttcagcagaaagatttcatttccctggcttgccagtggcactgatttccgaacacccaatgagtttaatattctttcctccttggcattactgccccagcctctttttattttttttgtgtgtgtctaataaccaggaaaaaaataaagcttaggttttaaaaagttttaaaaataatctgtttcagaaactgtcaaatgtaccatatttgtattaagagttgttgggaatttttgtacaatgaatttacatttatttatggtgacatatttacgcttgtgatcaaataatgatgttaaattcttaaatcatatttgctatgcagctgaagatgatattttgatttgtattttgggggtacctgtgttgagttgataaacatttccatcttcattaaaactgcttccaaactagtaaaaccaaaaaattacaacaattaattggccgttgttttacaacggctgactgggaaacccttgccgtccccaactttattgcttgtccn

SEQ ID NO: 296080 - DNA, 1337 bp, Homo sapiens
attttaagaacataaaatctcagggccacagatttcctttgacaatgacatgctctgtggccctgagattttaagaacataaaatgtgacatttgatatttctccagcccagggaagtaagatggttagcaatggttgccttaatcaaatggtcccatttttaaccccaaaggaagtgcccacagcaagaggtttgtgtgatgcacttatgtcctccggtgaggaaagggggccacatatgaaaggccccttaggtcagatcctgagagtagcacatttgagtgcagattcctgggccccacctcaaacctactaattctgaatctctgggaatagggccaggaaatctgccctttctacaaactacccaagttgttctgttgcacatcaatgtttgggaaccactgctgtaagggaatcattctggtcaccttgagctttgagctaccactaagccatgaaagaaaatacatcatacagggaagagagaagggaggaggttccaagtagtaactggcagatcctcctgtctggaggtaccaccttctattctggtttctgacttttccttcttgatgaccatagatgtgttccagaggcaaaagagacacattatcccagatggcagaacatgctttcaaaacatataaaatgtcaaagttccagatccttctacatctttagtcctgtctgaggatggtagctggctctctgtagctgatagatggctagagttccatccaaatccttgaccacgacttcatggagatttgaataatctatttgatgagatttctatttcaataacccacctctctcaccccacattcatatccctaaatttgaccctctgggccgagtcacattaccttcaggagacttgatcccagtagactgaggtcttccctttcagcagaaagatttcatttccctggcttgccagtggcactgatttccgaacacccaatgagtttaatattctttcctccttggcattactgccccagcctctttttattttttttgtgtgtgtctaataaccaggaaaaaaataaagcttaggttttaaaaagttttaaaaataatctgtttcagaaactgtcaaatgtaccatatttgtattaagagttgttgggaatttttgtacaatgaatttacatttatttatggtgacatatttacgcttgtgatcaaataatgatgttaaattcttaaatcatatttgctatgcagctgaagatgatattttgatttgtattttgggggtacctgtgttgagttgataaacatttccatcttcattaaaactgcttccaaactagtaaaaccaaaaaatt

SEQ ID NO: 296081 - DNA, 624 bp, Homo sapiens
actactactactactgctcgaattcaagcttctaacgatgtacgggttcatggagatttgaataatctatttgatgagatttctatttcaataacccacctctctcaccccacattcatatccctaaatttgaccctctgggccgagtcacattaccttcaggagacttgatcccagtagactgaggtcttccctttcagcagaaagatttcatttccctggcttgccagtggcactgatttccgaacacccaatgagtttaatattctttcctccttggcattactgccccagcctctttttattttttttgtgtgtgtctaataaccaggaaaaaaataaagcttaggttttaaaaagttttaaaaataatctgtttcagaaactgtcaaatgtaccatatttgtattaagagttgttgggaatttttgtacaatgaatttacatttatttatggtgacatatttacgcttgtgatcaaataatgatgttaaattcttaaatcatatttgctatgcagctgaagatgatattttgatttgtattttgggggtacctgtgttgagttgataaacatttccatcttcattaaaactgcttccaaactagtaaaaccaaaaaatt

SEQ ID NO: 296082 - DNA, 4416 bp, Homo sapiens
gcgcggcggccgtggttgcggcgcgggaagtttggatcctggttccgtccgctaggagtctgcgtgcgaggattatggctgctgttcctcaaaataatctacaggagcaactagaacgtcactcagccagaacacttaataataaattaagtctttcaaaaccaaaattttcaggtttcacttttaaaaagaaaacatcttcagataacaatgtatctgtaactaatgtgtcagtagcaaaaacacctgtattaagaaataaagatgttaatgttaccgaagacttttccttcagtgaacctctacccaacaccacaaatcagcaaagggtcaaggacttctttaaaaatgctccagcaggacaggaaacacagagaggtggatcaaaatcattattgccagatttcttgcagactccgaaggaagttgtatgcactacccaaaacacaccaactgtaaagaaatcccgggatactgctctcaagaaattagaatttagttcttcaccagattctttaagtaccatcaatgattgggatgatatggatgactttgatacttctgagacttcaaaatcatttgttacaccaccccaaagtcactttgtaagagtaagcactgctcagaaatcaaaaaagggtaagagaaacttttttaaagcacagctttatacaacaaacacagtaaagactgatttgcctccaccctcctctgaaagcgagcaaatagatttgactgaggaacagaaggatgactcagaatggttaagcagcgatgtgatttgcatcgatgatggccccattgctgaagtgcatataaatgaagatgctcaggaaagtgactctctgaaaactcatttggaagatgaaagagataatagcgaaaagaagaagaatttggaagaagctgaattacattcaactgagaaagttccatgtattgaatttgatgatgatgattatgatacggattttgttccaccttctccagaagaaattatttctgcttcttcttcctcttcaaaatgccttagtacgttaaaggaccttgacacctctgacagaaaagaggatgttcttagcacatcaaaagatcttttgtcaaaacctgagaaaatgagtatgcaggagctgaatccagaaaccagcacagactgtgacgctagacagataagtttacagcagcagcttattcatgtgatggagcacatctgtaaattaattgatactattcctgatgataaactgaaacttttggattgtgggaacgaactgcttcagcagcggaacataagaaggaaacttctaacggaagtagattttaataaaagtgatgccagtcttcttggctcattgtggagatacaggcctgattcacttgatggccctatggagggtgattcctgccctacagggaattctatgaaggagttaaatttttcacaccttccctcaaattctgtttctcctggggactgtttactgactaccaccctaggaaagacaggattctctgccaccaggaagaatctttttgaaaggcctttattcaatacccatttacagaagtcctttgtaagtagcaactgggctgaaacaccaagactaggaaaaaaaaatgaaagctcttatttcccaggaaatgttctcacaagcactgctgtgaaagatcagaataaacatactgcttcaataaatgacttagaaagagaaacccaaccttcctatgatattgataattttgacatagatgactttgatgatgatgatgactgggaagacataatgcataatttagcagccagcaaatcttccacagctgcctatcaacccatcaaggaaggtcggccaattaaatcagtatcagaaagactttcctcagccaagacagactgtcttccagtgtcatctactgctcaaaatataaacttctcagagtcaattcagaattatactgacaagtcagcacaaaatttagcatccagaaatctgaaacatgagcgtttccaaagtcttagttttcctcatacaaaggaaatgatgaagatttttcataaaaaatttggcctgcataattttagaactaatcagctagaggcgatcaatgctgcactgcttggtgaagactgttttatcctgatgccgactggaggtggtaagagtttgtgttaccagctccctgcctgtgtttctcctggggtcactgttgtcatttctcccttgagatcacttatcgtagatcaagtccaaaagctgacttccttggatattccagctacatatctgacaggtgataagactgactcagaagctacaaatatttacctccagttatcaaaaaaagacccaatcataaaacttctatatgtcactccagaaaagatctgtgcaagtaacagactcatttctactctggagaatctctatgagaggaagctcttggcacgttttgttattgatgaagcacattgtgtcagtcagtggggacatgattttcgtcaagattacaaaagaatgaatatgcttcgccagaagtttccttctgttccggtgatggctcttacggccacagctaatcccagggtacagaaggacatcctgactcagctgaagattctcagacctcaggtgtttagcatgagctttaacagacataatctgaaatactatgtattaccgaaaaagcctaaaaaggtggcatttgattgcctagaatggatcagaaagcaccacccatatgattcagggataatttactgcctctccaggcgagaatgtgacaccatggctgacacgttacagagagatgggctcgctgctcttgcttaccatgctggcctcagtgattctgccagagatgaagtgcagcagaagtggattaatcaggatggctgtcaggttatctgtgctacaattgcatttggaatggggattgacaaaccggacgtgcgatttgtgattcatgcatctctccctaaatctgtggagggttactaccaagaatctggcagagctggaagagatggggaaatatctcactgcctgcttttctatacctatcatgatgtgaccagactgaaaagacttataatgatggaaaaagatggaaaccatcatacaagagaaactcacttcaataatttgtatagcatggtacattactgtgaaaatataacggaatgcaggagaatacagcttttggcctactttggtgaaaatggatttaatcctgatttttgtaagaaacacccagatgtttcttgtgataattgctgtaaaacaaaggattataaaacaagagatgtgactgacgatgtgaaaagtattgtaagatttgttcaagaacatagttcatcacaaggaatgagaaatataaaacatgtaggtccttctggaagatttactatgaatatgctggtcgacattttcttggggagtaagagtgcaaaaatccagtcaggtatatttggaaaaggatctgcttattcacgacacaatgccgaaagactttttaaaaagctgatacttgacaagattttggatgaagacttatatatcaatgccaatgaccaggcgatcgcttatgtgatgctcggaaataaagcccaaactgtactaaatggcaatttaaaggtagactttatggaaacagaaaattccagcagtgtgaaaaaacaaaaagcgttagtagcaaaagtgtctcagagggaagagatggttaaaaaatgtcttggagaacttacagaagtctgcaaatctctggggaaagtttttggtgtccattacttcaatatttttaataccgtcactctcaagaagcttgcagaatctttatcttctgatcctgaggttttgcttcaaattgatggtgttactgaagacaaactggaaaaatatggtgcggaagtgatttcagtattacagaaatactctgaatggacatcgccagctgaagacagttccccagggataagcctgtccagcagcagaggccccggaagaagtgccgctgaggagctcgacgaggaaatacccgtatcttcccactactttgcaagtaaaaccagaaatgaaaggaagaggaaaaagatgccagcctcccaaaggtctaagaggagaaaaactgcttccagtggttccaaggcaaagggggggtctgccacatgtagaaagatatcttccaaaacgaaatcctccagcatcattggatccagttcagcctcacatacttctcaagcgacatcaggagccaatagcaaattggggattatggctccaccgaagcctataaatagaccgtttcttaagccttcatatgcattctcataacaaccgaatctcaatgtacatagaccctctttcttgtttgtcagcatctgaccatctgtgactataaagctgttattcttgttatacc

SEQ ID NO: 296083 - DNA, 980 bp, Homo sapiens
gcagtaaagagagggcacaccagtctcagctagatgagtactggccatgggaacagtgggcaagagcagatctgctccactccacgcacatggcacaggtcccaccctcagcttcctcctgccctggctcttgcccttgctctgccctggcctatgccgctggaattggatgaatctttatcttctgatcctgaggttttgcttcaaattgatggtgttactgaagacaaactggaaaaatatggtgcggaagtgatttcagtattacagaaatactctgaatggacatcgccagctgaagacagttccccagggataagcctgtccagcagcagaggccccggaagaagtgccgctgaggagctcgacgaggaaatacccgtatcttcccactactttgcaagtaaaaccagaaatgaaaggaagaggaaaaagatgccagcctcccaaaggtctaagaggagaaaaactgcttccagtggttccaaggcaaagggggggtctgccacatgtagaaagatatcttccaaaacgaaatcctccagcatcattggatccagttcagcctcacatacttctcaagcgacatcaggagccaatagcaaattggggattatggctccaccgaagcctataaatagaccgtttcttaagccttcatatgcattctcataacaaccgaatctcaatgtacatagaccctctttcttgtttgtcagcatctgaccatctgtgactataaagctgttattcttgttataccatttgaagtttttactcgtctctattaatatttaaataaatgctggggggtgatagttcttctttttaaaataaacattttcttttgaatagctgttttggtgccgctgcaagtgttgtggccgttgttctcagaacgtctgaggcagcagctggatcatctcaggcagagctttgagcataaagaaaccagaagccaaaggaagagccacgcgtgg

SEQ ID NO: 296084 - DNA, 4633 bp, Homo sapiens
gcgcggcggccgtggttgcggcgcgggaagtttggatcctggttccgtccgctaggagtctgcgtgcgaggattatggctgctgttcctcaaaataatctacaggagcaactagaacgtcactcagccagaacacttaataataaattaagtctttcaaaaccaaaattttcaggtttcacttttaaaaagaaaacatcttcagataacaatgtatctgtaactaatgtgtcagtagcaaaaacacctgtattaagaaataaagatgttaatgttaccgaagacttttccttcagtgaacctctacccaacaccacaaatcagcaaagggtcaaggacttctttaaaaatgctccagcaggacaggaaacacagagaggtggatcaaaatcattattgccagatttcttgcagactccgaaggaagttgtatgcactacccaaaacacaccaactgtaaagaaatcccgggatactgctctcaagaaattagaatttagttcttcaccagattctttaagtaccatcaatgattgggatgatatggatgactttgatacttctgagacttcaaaatcatttgttacaccaccccaaagtcactttgtaagagtaagcactgctcagaaatcaaaaaagggtaagagaaacttttttaaagcacagctttatacaacaaacacagtaaagactgatttgcctccaccctcctctgaaagcgagcaaatagatttgactgaggaacagaaggatgactcagaatggttaagcagcgatgtgatttgcatcgatgatggccccattgctgaagtgcatataaatgaagatgctcaggaaagtgactctctgaaaactcatttggaagatgaaagagataatagcgaaaagaagaagaatttggaagaagctgaattacattcaactgagaaagttccatgtattgaatttgatgatgatgattatgatacggattttgttccaccttctccagaagaaattatttctgcttcttcttcctcttcaaaatgccttagtacgttaaaggaccttgacacctctgacagaaaagaggatgttcttagcacatcaaaagatcttttgtcaaaacctgagaaaatgagtatgcaggagctgaatccagaaaccagcacagactgtgacgctagacagataagtttacagcagcagcttattcatgtgatggagcacatctgtaaattaattgatactattcctgatgataaactgaaacttttggattgtgggaacgaactgcttcagcagcggaacataagaaggaaacttctaacggaagtagattttaataaaagtgatgccagtcttcttggctcattgtggagatacaggcctgattcacttgatggccctatggagggtgattcctgccctacagggaattctatgaaggagttaaatttttcacaccttccctcaaattctgtttctcctggggactgtttactgactaccaccctaggaaagacaggattctctgccaccaggaagaatctttttgaaaggcctttattcaatacccatttacagaagtcctttgtaagtagcaactgggctgaaacaccaagactaggaaaaaaaaatgaaagctcttatttcccaggaaatgttctcacaagcactgctgtgaaagatcagaataaacatactgcttcaataaatgacttagaaagagaaacccaaccttcctatgatattgataattttgacatagatgactttgatgatgatgatgactgggaagacataatgcataatttagcagccagcaaatcttccacagctgcctatcaacccatcaaggaaggtcggccaattaaatcagtatcagaaagactttcctcagccaagacagactgtcttccagtgtcatctactgctcaaaatataaacttctcagagtcaattcagaattatactgacaagtcagcacaaaatttagcatccagaaatctgaaacatgagcgtttccaaagtcttagttttcctcatacaaaggaaatgatgaagatttttcataaaaaatttggcctgcataattttagaactaatcagctagaggcgatcaatgctgcactgcttggtgaagactgttttatcctgatgccgactggaggtggtaagagtttgtgttaccagctccctgcctgtgtttctcctggggtcactgttgtcatttctcccttgagatcacttatcgtagatcaagtccaaaagctgacttccttggatattccagctacatatctgacaggtgataagactgactcagaagctacaaatatttacctccagttatcaaaaaaagacccaatcataaaacttctatatgtcactccagaaaagatctgtgcaagtaacagactcatttctactctggagaatctctatgagaggaagctcttggcacgttttgttattgatgaagcacattgtgtcagtcagtggggacatgattttcgtcaagattacaaaagaatgaatatgcttcgccagaagtttccttctgttccggtgatggctcttacggccacagctaatcccagggtacagaaggacatcctgactcagctgaagattctcagacctcaggtgtttagcatgagctttaacagacataatctgaaatactatgtattaccgaaaaagcctaaaaaggtggcatttgattgcctagaatggatcagaaagcaccacccatatgattcagggataatttactgcctctccaggcgagaatgtgacaccatggctgacacgttacagagagatgggctcgctgctcttgcttaccatgctggcctcagtgattctgccagagatgaagtgcagcagaagtggattaatcaggatggctgtcaggttatctgtgctacaattgcatttggaatggggattgacaaaccggacgtgcgatttgtgattcatgcatctctccctaaatctgtggagggttactaccaagaatctggcagagctggaagagatggggaaatatctcactgcctgcttttctatacctatcatgatgtgaccagactgaaaagacttataatgatggaaaaagatggaaaccatcatacaagagaaactcacttcaataatttgtatagcatggtacattactgtgaaaatataacggaatgcaggagaatacagcttttggcctactttggtgaaaatggatttaatcctgatttttgtaagaaacacccagatgtttcttgtgataattgctgtaaaacaaaggattataaaacaagagatgtgactgacgatgtgaaaagtattgtaagatttgttcaagaacatagttcatcacaaggaatgagaaatataaaacatgtaggtccttctggaagatttactatgaatatgctggtcgacattttcttggggagtaagagtgcaaaaatccagtcaggtatatttggaaaaggatctgcttattcacgacacaatgccgaaagactttttaaaaagctgatacttgacaagattttggatgaagacttatatatcaatgccaatgaccaggcgatcgcttatgtgatgctcggaaataaagcccaaactgtactaaatggcaatttaaaggtagactttatggaaacagaaaattccagcagtgtgaaaaaacaaaaagcgttagtagcaaaagtgtctcagagggaagagatggttaaaaaatgtcttggagaacttacagaagtctgcaaatctctggggaaagtttttggtgtccattacttcaatatttttaataccgtcactctcaagaagcttgcagaatctttatcttctgatcctgaggttttgcttcaaattgatggtgttactgaagacaaactggaaaaatatggtgcggaagtgatttcagtattacagaaatactctgaatggacatcgccagctgaagacagttccccagggataagcctgtccagcagcagaggccccggaagaagtgccgctgaggagctcgacgaggaaatacccgtatcttcccactactttgcaagtaaaaccagaaatgaaaggaagaggaaaaagatgccagcctcccaaaggtctaagaggagaaaaactgcttccagtggttccaaggcaaagggggggtctgccacatgtagaaagatatcttccaaaacgaaatcctccagcatcattggatccagttcagcctcacatacttctcaagcgacatcaggagccaatagcaaattggggattatggctccaccgaagcctataaatagaccgtttcttaagccttcatatgcattctcataacaaccgaatctcaatgtacatagaccctctttcttgtttgtcagcatctgaccatctgtgactataaagctgttattcttgttataccatttgaagtttttactcgtctctattaatatttaaataaatgctggggggtgatagttcttctttttaaaataaacattttcttttgaatagctgttttggtgccgctgcaagtgttgtggccgttgttctcagaacgtctgaggcagcagctggatcatctcaggcagagctttgagcataaagaaaccagaagccaaaggaagagccacgcgtgg

SEQ ID NO: 296085 - DNA, 4684 bp, Homo sapiens
agacagtatataacagagaagagagacctgtttttcaaactcctcttttccaaaacctctgtagctggccctcaagattctccatcttctggccacaatttacctttttcagctttatctccacttatgcccttgcaataacccagtggttttaatgagtcaaaccaacaatctagaaagcatatcattttctttaattataatgttattgtttaaaaaataatattaaaaagttacactgttttgatttagttagaaagttgcattccaaaattattctttaggaaaatacagttgattcccagatgtcaagcaaatagaaatgtcctttttaaaatctttctttcatagtctgacactttccccatacttgtcattcagtttgcttaaatcttatctccttggcaaagccttctaaagttccaaaaaatgttacctttctttggatttccacagtatcctctctttaacactcattcagtactaatttattttgttatttgtaaagtattttttctatgtaatcagactgaccaggtttatatgttaatatgtttttgtataatctgtgtggtgaggtaattatatatgcagacacacaaaaacacatgtacatatatttgcataataagagaagtccagaaaaagtgctttgaaatctcagaaaaaagagacattaataatcacttgctggagaagtaatgctttggctggggctagaagaacaggtgtgatttgggtacgaagagattggaatggcaggttttccaaattgagaggatcagtggcaaaatcccaaaataggcaatgcagggcttatatgaagaatgtaagtggtacagtatgactgaagatttgtgttactgaaaggacatgatcggagataatgttgaaaagggctctttctggacaactttgaggaccagctaaagaagttttataattgaggaaatttaaaaaactacttctcttttctgttatatattgtctgatcagtggtagaaaaatattaagggtttcaaaattatacatttattgagtctagcctatagtatgattggcttaacattttttttatttgcagtacgttaaaggaccttgacacctctgacagaaaagaggatgttcttagcacatcaaaagatcttttgtcaaaacctgagaaaatgagtatgcaggagctgaatccagaaaccagcacagactgtgacgctagacagataagtttacagcagcagcttattcatgtgatggagcacatctgtaaattaattgatactattcctgatgataaactgaaacttttggattgtgggaacgaactgcttcagcagcggaacataagaaggaaacttctaacggaagtagattttaataaaagtgatgccagtcttcttggctcattgtggagatacaggcctgattcacttgatggccctatggagggtgattcctgccctacagggaattctatgaaggagttaaatttttcacaccttccctcaaattctgtttctcctggggactgtttactgactaccaccctaggaaagacaggattctctgccaccaggaagaatctttttgaaaggcctttattcaatacccatttacagaagtcctttgtaagtagcaactgggctgaaacaccaagactaggaaaaaaaaatgaaagctcttatttcccaggaaatgttctcacaagcactgctgtgaaagatcagaataaacatactgcttcaataaatgacttagaaagagaaacccaaccttcctatgatattgataattttgacatagatgactttgatgatgatgatgactgggaagacataatgcataatttagcagccagcaaatcttccacagctgcctatcaacccatcaaggaaggtcggccaattaaatcagtatcagaaagactttcctcagccaagacagactgtcttccagtgtcatctactgctcaaaatataaacttctcagagtcaattcagaattatactgacaagtcagcacaaaatttagcatccagaaatctgaaacatgagcgtttccaaagtcttagttttcctcatacaaaggaaatgatgaagatttttcataaaaaatttggcctgcataattttagaactaatcagctagaggcgatcaatgctgcactgcttggtgaagactgttttatcctgatgccgactggaggtggtaagagtttgtgttaccagctccctgcctgtgtttctcctggggtcactgttgtcatttctcccttgagatcacttatcgtagatcaagtccaaaagctgacttccttggatattccagctacatatctgacaggtgataagactgactcagaagctacaaatatttacctccagttatcaaaaaaagacccaatcataaaacttctatatgtcactccagaaaagatctgtgcaagtaacagactcatttctactctggagaatctctatgagaggaagctcttggcacgttttgttattgatgaagcacattgtgtcagtcagtggggacatgattttcgtcaagattacaaaagaatgaatatgcttcgccagaagtttccttctgttccggtgatggctcttacggccacagctaatcccagggtacagaaggacatcctgactcagctgaagattctcagacctcaggtgtttagcatgagctttaacagacataatctgaaatactatgtattaccgaaaaagcctaaaaaggtggcatttgattgcctagaatggatcagaaagcaccacccatatgattcagggataatttactgcctctccaggcgagaatgtgacaccatggctgacacgttacagagagatgggctcgctgctcttgcttaccatgctggcctcagtgattctgccagagatgaagtgcagcagaagtggattaatcaggatggctgtcaggttatctgtgctacaattgcatttggaatggggattgacaaaccggacgtgcgatttgtgattcatgcatctctccctaaatctgtggagggttactaccaagaatctggcagagctggaagagatggggaaatatctcactgcctgcttttctatacctatcatgatgtgaccagactgaaaagacttataatgatggaaaaagatggaaaccatcatacaagagaaactcacttcaataatttgtatagcatggtacattactgtgaaaatataacggaatgcaggagaatacagcttttggcctactttggtgaaaatggatttaatcctgatttttgtaagaaacacccagatgtttcttgtgataattgctgtaaaacaaaggattataaaacaagagatgtgactgacgatgtgaaaagtattgtaagatttgttcaagaacatagttcatcacaaggaatgagaaatataaaacatgtaggtccttctggaagatttactatgaatatgctggtcgacattttcttggggagtaagagtgcaaaaatccagtcaggtatatttggaaaaggatctgcttattcacgacacaatgccgaaagactttttaaaaagctgatacttgacaagattttggatgaagacttatatatcaatgccaatgaccaggcgatcgcttatgtgatgctcggaaataaagcccaaactgtactaaatggcaatttaaaggtagactttatggaaacagaaaattccagcagtgtgaaaaaacaaaaagcgttagtagcaaaagtgtctcagagggaagagatggttaaaaaatgtcttggagaacttacagaagtctgcaaatctctggggaaagtttttggtgtccattacttcaatatttttaataccgtcactctcaagaagcttgcagaatctttatcttctgatcctgaggttttgcttcaaattgatggtgttactgaagacaaactggaaaaatatggtgcggaagtgatttcagtattacagaaatactctgaatggacatcgccagctgaagacagttccccagggataagcctgtccagcagcagaggccccggaagaagtgccgctgaggagctcgacgaggaaatacccgtatcttcccactactttgcaagtaaaaccagaaatgaaaggaagaggaaaaagatgccagcctcccaaaggtctaagaggagaaaaactgcttccagtggttccaaggcaaagggggggtctgccacatgtagaaagatatcttccaaaacgaaatcctccagcatcattggatccagttcagcctcacatacttctcaagcgacatcaggagccaatagcaaattggggattatggctccaccgaagcctataaatagaccgtttcttaagccttcatatgcattctcataacaaccgaatctcaatgtacatagaccctctttcttgtttgtcagcatctgaccatctgtgactataaagctgttattcttgttataccatttgaagtttttactcgtctctattaatatttaaataaatgctggggggtgatagttcttctttttaaaataaacattttcttttgaatagctgttttggtgccgctgcaagtgttgtggccgttgttctcagaacgtctgaggcagcagctggatcatctcaggcagagctttgagcataaagaaaccagaagccaaaggaagagccacgcgtgg

SEQ ID NO: 296086 - DNA, 3623 bp, Homo sapiens
gcgcggcggccgtggttgcggcgcgggaagtttggatcctggttccgtccgctaggagtctgcgtgcgaggattatggctgctgttcctcaaaataatctacaggagcaactagaacgtcactcagccagaacacttaataataaattaagtctttcaaaaccaaaattttcaggtttcacttttaaaaagaaaacatcttcagataacaatgtatctgtaactaatgtgtcagtagcaaaaacacctgtattaagaaataaagatgttaatgttaccgaagacttttccttcagtgaacctctacccaacaccacaaatcagcaaagggtcaaggacttctttaaaaatgctccagcaggacaggaaacacagagaggtggatcaaaatcattattgccagatttcttgcagactccgaaggaagttgtatgcactacccaaaacacaccaactgtaaagaaatcccgggatactgctctcaagaaattagaatttagttcttcaccagattctttaagtaccatcaatgattgggatgatatggatgactttgatacttctgagacttcaaaatcatttgttacaccaccccaaagtcactttgtaagagtaagcactgctcagaaatcaaaaaagggtaagagaaacttttttaaagcacagctttatacaacaaacacagtaaagactgatttgcctccaccctcctctgaaagcgagcaaatagatttgactgaggaacagaaggatgactcagaatggttaagcagcgatgtgatttgcatcgatgatggccccattgctgaagtgcatataaatgaagatgctcaggaaagtgactctctgaaaactcatttggaagatgaaagagataatagcgaaaagaagaagaatttggaagaagctgaattacattcaactgagaaagttccatgtattgaatttgatgatgatgattatgatacggattttgttccaccttctccagaagaaattatttctgcttcttcttcctcttcaaaatgccttagtacgttaaaggaccttgacacctctgacagaaaagaggatgttcttagcacatcaaaagatcttttgtcaaaacctgagaaaatgagtatgcaggagctgaatccagaaaccagcacagactgtgacgctagacagataagtttacagcagcagcttattcatgtgatggagcacatctgtaaattaattgatactattcctgatgataaactgaaacttttggattgtgggaacgaactgcttcagcagcggaacataagaaggaaacttctaacggaagtagattttaataaaagtgatgccagtcttcttggctcattgtggagatacaggcctgattcacttgatggccctatggagggtgattcctgccctacagggaattctatgaaggagttaaatttttcacaccttccctcaaattctgtttctcctggggactgtttactgactaccaccctaggaaagacaggattctctgccaccaggaagaatctttttgaaaggcctttattcaatacccatttacagaagtcctttgtaagtagcaactgggctgaaacaccaagactaggaaaaaaaaatgaaagctcttatttcccaggaaatgttctcacaagcactgctgtgaaagatcagaataaacatactgcttcaataaatgacttagaaagagaaacccaaccttcctatgatattgataattttgacatagatgactttgatgatgatgatgactgggaagacataatgcataatttagcagccagcaaatcttccacagctgcctatcaacccatcaaggaaggtcggccaattaaatcagtatcagaaagactttcctcagccaagacagactgtcttccagtgtcatctactgctcaaaatataaacttctcagagtcaattcagaattatactgacaagtcagcacaaaatttagcatccagaaatctgaaacatgagcgtttccaaagtcttagttttcctcatacaaaggaaatgatgaagatttttcataaaaaatttggcctgcataattttagaactaatcagctagaggcgatcaatgctgcactgcttggtgaagactgttttatcctgatgccgactggaggtggtaagagtttgtgttaccagctccctgcctgtgtttctcctggggtcactgttgtcatttctcccttgagatcacttatcgtagatcaagtccaaaagctgacttccttggatattccagctacatatctgacaggtgataagactgactcagaagctacaaatatttacctccagttatcaaaaaaagacccaatcataaaacttctatatgtcactccagaaaagatctgtgcaagtaacagactcatttctactctggagaatctctatgagaggaagctcttggcacgttttgttattgatgaagcacattgtgtcagtcagtggggacatgattttcgtcaagattacaaaagaatgaatatgcttcgccagaagtttccttctgttccggtgatggctcttacggccacagctaatcccagggtacagaaggacatcctgactcagctgaagattctcagacctcaggtgtttagcatgagctttaacagacataatctgaaatactatgtattaccgaaaaagcctaaaaaggtggcatttgattgcctagaatggatcagaaagcaccacccatatgattcagggataatttactgcctctccaggcgagaatgtgacaccatggctgacacgttacagagagatgggctcgctgctcttgcttaccatgctggcctcagtgattctgccagagatgaagtgcagcagaagtggattaatcaggatggctgtcaggttatctgtgctacaattgcatttggaatggggattgacaaaccggacgtgcgatttgtgattcatgcatctctccctaaatctgtggagggttactaccaagaatctggcagagctggaagagatggggaaatatctcactgcctgcttttctatacctatcatgatgtgaccagactgaaaagacttataatgatggaaaaagatggaaaccatcatacaagagaaactcacttcaataatttgtatagcatggtacattactgtgaaaatataacggaatgcaggagaatacagcttttggcctactttggtgaaaatggatttaatcctgatttttgtaagaaacacccagatgtttcttgtgataattgctgtaaaacaaaggattataaaacaagagatgtgactgacgatgtgaaaagtattgtaagatttgttcaagaacatagttcatcacaaggaatgagaaatataaaacatgtaggtccttctggaagatttactatgaatatgctggtcgacattttcttggggagtaagagtgcaaaaatccagtcaggtatatttggaaaaggatctgcttattcacgacacaatgccgaaagactttttaaaaagctgatacttgacaagattttggatgaagacttatatatcaatgccaatgaccaggcgatcgcttatgtgatgctcggaaataaatcactggcctcgttggcctca

SEQ ID NO: 296087 - DNA, 3540 bp, Homo sapiens
gatcatcatgccactatgtttttgatttgtttacttttcaaaccactcctttaacattcgtattcatgtttttaagattgggaaaaaagcgaatatattttgctacaatttctatttggtatgaaaactacagatttgcttttgtggcctaccagagtaaactacttatatttaatacgttgttctcttttctctcttcagaaggaaacttctaacggaagtagattttaataaaagtgatgccagtcttcttggctcattgtggagatacaggcctgattcacttgatggccctatggagggtgattcctgccctacagggaattctatgaaggagttaaatttttcacaccttccctcaaattctgtttctcctggggactgtttactgactaccaccctaggaaagacaggattctctgccaccaggaagaatctttttgaaaggcctttattcaatacccatttacagaagtcctttgtaagtagcaactgggctgaaacaccaagactaggaaaaaaaaatgaaagctcttatttcccaggaaatgttctcacaagcactgctgtgaaagatcagaataaacatactgcttcaataaatgacttagaaagagaaacccaaccttcctatgatattgataattttgacatagatgactttgatgatgatgatgactgggaagacataatgcataatttagcagccagcaaatcttccacagctgcctatcaacccatcaaggaaggtcggccaattaaatcagtatcagaaagactttcctcagccaagacagactgtcttccagtgtcatctactgctcaaaatataaacttctcagagtcaattcagaattatactgacaagtcagcacaaaatttagcatccagaaatctgaaacatgagcgtttccaaagtcttagttttcctcatacaaaggaaatgatgaagatttttcataaaaaatttggcctgcataattttagaactaatcagctagaggcgatcaatgctgcactgcttggtgaagactgttttatcctgatgccgactggaggtggtaagagtttgtgttaccagctccctgcctgtgtttctcctggggtcactgttgtcatttctcccttgagatcacttatcgtagatcaagtccaaaagctgacttccttggatattccagctacatatctgacaggtgataagactgactcagaagctacaaatatttacctccagttatcaaaaaaagacccaatcataaaacttctatatgtcactccagaaaagatctgtgcaagtaacagactcatttctactctggagaatctctatgagaggaagctcttggcacgttttgttattgatgaagcacattgtgtcagtcagtggggacatgattttcgtcaagattacaaaagaatgaatatgcttcgccagaagtttccttctgttccggtgatggctcttacggccacagctaatcccagggtacagaaggacatcctgactcagctgaagattctcagacctcaggtgtttagcatgagctttaacagacataatctgaaatactatgtattaccgaaaaagcctaaaaaggtggcatttgattgcctagaatggatcagaaagcaccacccatatgattcagggataatttactgcctctccaggcgagaatgtgacaccatggctgacacgttacagagagatgggctcgctgctcttgcttaccatgctggcctcagtgattctgccagagatgaagtgcagcagaagtggattaatcaggatggctgtcaggttatctgtgctacaattgcatttggaatggggattgacaaaccggacgtgcgatttgtgattcatgcatctctccctaaatctgtggagggttactaccaagaatctggcagagctggaagagatggggaaatatctcactgcctgcttttctatacctatcatgatgtgaccagactgaaaagacttataatgatggaaaaagatggaaaccatcatacaagagaaactcacttcaataatttgtatagcatggtacattactgtgaaaatataacggaatgcaggagaatacagcttttggcctactttggtgaaaatggatttaatcctgatttttgtaagaaacacccagatgtttcttgtgataattgctgtaaaacaaaggattataaaacaagagatgtgactgacgatgtgaaaagtattgtaagatttgttcaagaacatagttcatcacaaggaatgagaaatataaaacatgtaggtccttctggaagatttactatgaatatgctggtcgacattttcttggggagtaagagtgcaaaaatccagtcaggtatatttggaaaaggatctgcttattcacgacacaatgccgaaagactttttaaaaagctgatacttgacaagattttggatgaagacttatatatcaatgccaatgaccaggcgatcgcttatgtgatgctcggaaataaagcccaaactgtactaaatggcaatttaaaggtagactttatggaaacagaaaattccagcagtgtgaaaaaacaaaaagcgttagtagcaaaagtgtctcagagggaagagatggttaaaaaatgtcttggagaacttacagaagtctgcaaatctctggggaaagtttttggtgtccattacttcaatatttttaataccgtcactctcaagaagcttgcagaatctttatcttctgatcctgaggttttgcttcaaattgatggtgttactgaagacaaactggaaaaatatggtgcggaagtgatttcagtattacagaaatactctgaatggacatcgccagctgaagacagttccccagggataagcctgtccagcagcagaggccccggaagaagtgccgctgaggagctcgacgaggaaatacccgtatcttcccactactttgcaagtaaaaccagaaatgaaaggaagaggaaaaagatgccagcctcccaaaggtctaagaggagaaaaactgcttccagtggttccaaggcaaagggggggtctgccacatgtagaaagatatcttccaaaacgaaatcctccagcatcattggatccagttcagcctcacatacttctcaagcgacatcaggagccaatagcaaattggggattatggctccaccgaagcctataaatagaccgtttcttaagccttcatatgcattctcataacaaccgaatctcaatgtacatagaccctctttcttgtttgtcagcatctgaccatctgtgactataaagctgttattcttgttataccatttgaagtttttactcgtctctattaatatttaaataaatgctggggggtgatagttcttctttttaaaataaacattttcttttgaatagctgttttggtgccgctgcaagtgttgtggccgttgttctcagaacgtctgaggcagcagctggatcatctcaggcagagctttgagcataaagaaaccagaagccaaaggaagagccacgcgtgg

SEQ ID NO: 296088 - DNA, 2371 bp, Homo sapiens
tttttttttggtataagtagctctcagacttttacccacatgagtttccattaaaattgtacaagctttgactttaaatcagctgatgaatagaaggagttgatgtgtgatcagctggtgctattgggaaaactgatgataagcagtggagcaggtaagaacgtattgttcctgaaccattggaggaactagcagcagtgacctctgaggagccctgggaacaccctggagctcctgagcaacacgttgcttgtgatcactgacctggatatcatgactgtgtgagcaacaccccccacacctcagtagcaaaaacagagaacagtggcagcacatcgtggggctgactgcagttgattctggctctcttacatgagaatgccaagtcatacaagaaagtgcctgccatgctgagcttctctttaccttcttgggttttaatggcattgcaagttatcagtataaaaactcatattagttatactaaatagttggaccaagttaagatattaggttgttatgtagtgtgcattttaaagtaaaacaaatgatagagcttttagaagcatctattatgaaaatgttccttcaagtctgtgccttatgaatctaataagcttttgcttttatatcaggttatctgtgctacaattgcatttggaatggggattgacaaaccggacgtgcgatttgtgattcatgcatctctccctaaatctgtggagggttactaccaagaatctggcagagctggaagagatggggaaatatctcactgcctgcttttctatacctatcatgatgtgaccagactgaaaagacttataatgatggaaaaagatggaaaccatcatacaagagaaactcacttcaataatttgtatagcatggtacattactgtgaaaatataacggaatgcaggagaatacagcttttggcctactttggtgaaaatggatttaatcctgatttttgtaagaaacacccagatgtttcttgtgataattgctgtaaaacaaaggattataaaacaagagatgtgactgacgatgtgaaaagtattgtaagatttgttcaagaacatagttcatcacaaggaatgagaaatataaaacatgtaggtccttctggaagatttactatgaatatgctggtcgacattttcttggggagtaagagtgcaaaaatccagtcaggtatatttggaaaaggatctgcttattcacgacacaatgccgaaagactttttaaaaagctgatacttgacaagattttggatgaagacttatatatcaatgccaatgaccaggcgatcgcttatgtgatgctcggaaataaagcccaaactgtactaaatggcaatttaaaggtagactttatggaaacagaaaattccagcagtgtgaaaaaacaaaaagcgttagtagcaaaagtgtctcagagggaagagatggttaaaaaatgtcttggagaacttacagaagtctgcaaatctctggggaaagtttttggtgtccattacttcaatatttttaataccgtcactctcaagaagcttgcagaatctttatcttctgatcctgaggttttgcttcaaattgatggtgttactgaagacaaactggaaaaatatggtgcggaagtgatttcagtattacagaaatactctgaatggacatcgccagctgaagacagttccccagggataagcctgtccagcagcagaggccccggaagaagtgccgctgaggagctcgacgaggaaatacccgtatcttcccactactttgcaagtaaaaccagaaatgaaaggaagaggaaaaagatgccagcctcccaaaggtctaagaggagaaaaactgcttccagtggttccaaggcaaagggggggtctgccacatgtagaaagatatcttccaaaacgaaatcctccagcatcattggatccagttcagcctcacatacttctcaagcgacatcaggagccaatagcaaattggggattatggctccaccgaagcctataaatagaccgtttcttaagccttcatatgcattctcataacaaccgaatctcaatgtacatagaccctctttcttgtttgtcagcatctgaccatctgtgactataaagctgttattcttgttataccatttgaagtttttactcgtctctattaatatttaaataaatgctggggggtgatagttcttctttttaaaataaacattttcttttgaatagctgttttggtgccgctgcaagtgttgtggccgttgttctcagaacgtctgaggcagcagctggatcatctcaggcagagctttgagcataaagaaaccagaagccaaaggaagagccacgcgtgg

SEQ ID NO: 296089 - DNA, 536 bp, Homo sapiens
gggttggtcacaagtcagaaaattaagaaacagtcctgcacatttcagaaagacaaatccagaacaaatttatatgaagggccgcggtcctttattccataagtagtaaaggaaacttaccttacctagggggctcgtaggcagaaaatgcacaaggacacattaggcccagggaagtggtattgtagctctgtgcaggttgagaggaagaaggtcattcatttttggtttcatttaacattttgatttttttctttgtcacatttcagggggtctgccacatgtagaaagatatcttccaaaacgaaatcctccagcatcattggatccagttcagcctcacatacttctcaagcgacatcaggagccaatagcaaattggggattatggctccaccgaagcctataaatagaccgtttcttaagccttcatatgcattctcataacaaccgaatctcaatgtacatagaccctctttcttgtttgtcagcatctgaccatctgtgactataaagctgttattcttgttatacca

SEQ ID NO: 296090 - DNA, 458 bp, Homo sapiens
gtcatggttggaggaagggagaagaggaaggaaagaataaaagtagtggtaggtgctgtagaaaaagtcaaggaaatacttgatttgggactttggcaagtttttggtggctttgagacttgtagggaaggaaagccagtaaagagtttaagaactgtgctgcagggaaacgtgtgccagtgattctgcagggcaagggaaatgctaaagctgtactttcactgtattcatgtactgatttttcttaacgttgattattttcctagacaagtcagcacaaaatttagcatccagaaatctgaaacatgagcgtttccaaagtcttagttttcctcatacaaaggaaatgatgaagatttttcataaaaaatttggcctgcataattttagaactaatcagctagaggcgatcaatgctgcactgcttggtgaagactgttttatcctgatgccgactg

SEQ ID NO: 296091 - DNA, 454 bp, Homo sapiens
gatatgaagaaattaagatcttttcaaatttgcaaaagctgaaagactgtcacccacaggtctgcactgcaagaaaagttaaaggatgtcctttgggcagaaggaaaatgcctgccttctgaaggaaataagcactggaaatagtaacaacatgggtaaatgtagcatttattatttaaacctctttaaaagacagttatttaaataaaagtcatagtgtaggatttataatatatgtaagagtaaaatggatgaccacaatagcttgaagattaggagaggagaatcatgctattgtaaagttctcatacacaaggtgacgtgctaccatttgaagatagagtgtgataagttacagatatgtgctgtaaaccctaaagcagctgctaaaatgacataccaaaaaatcatacctattaaactatcaaaagataaaatggaattattttaaaaa

SEQ ID NO: 296092 - DNA, 1172 bp, Homo sapiens
cggggcgtgccccgccagcggaggccgggaggaccaggaacccaggagagcatggccacgctgcgccggcttcgggaggcgccgcggcacttactggtttgcgagaaatccaacttcggcaaccacaagtcgcgccaccggcatcttgtgcagacgcactactataactacagggtttcatttctcattcctgaatgtgggatactatcggaagaactgaaaaacctggtcatgaacactggaccctattactttgtgaagaatttacctcttcatgaattaattacacctgaattcatcagtacctttataaagaaaggttcttgctatgcactaacatacaatacacatattgatgaagataatactgttgccctgctaccaaatgggaaattaattttgtcactggataaagacacttatgaagaaactggacttcagggtcatccatctcagttttctggcagaaaaattatgaaatttattgtttccattgatttgatggaattatccttaaacttggattctaagaagtatgaaagaatatcttggtctttcaaagaaaagaagccattgaaatttgattttcttttggcttggcataaaacaggttcagaagaatcgacaatgatgtcatatttttccaagtaccaaattcaggagcatcagccaaaagtagcactgagcacgttgagagatctccagtgcccagtgctgcagagcagcgagctggagggaacgccagaggtgtcctgccgggctctggagctcttcgactggctcggcgccgtcttcagtaatgtcgacctaaataatgagcctaataatttcatatcaacctattgctgtcctgagccaagcacagtggtggcaaaagcttatttgtgtacaatcactggcttcatacttccagagaagatctgtctcctattggaacatctctgtcactactttgatgaaccgaagttagctccatgggttacactgtccgttcaaggctttgcagacagccctgtttcttgggaaaaaaatgaacatggttttcgaaaaggaggagaacatttatataactttgtgatttttaataatcaggactattggcttcagatggctgttggggcaaatgatcactgtccaccataaaaaataaaaattaaaaatcgtgtttactt

SEQ ID NO: 296093 - DNA, 1103 bp, Homo sapiens
cggggcgtgccccgccagcggaggccgggaggaccaggaacccaggagagcatggccacgctgcgccggcttcgggaggcgccgcggcacttactggtttgcgagaaatccaacttcggcaaccacaagtcgcgccaccggcatcttgtgcagacgcactactataactacagggtttcatttctcattcctgaatgtgggatactatcggaagaactgaaaaacctggtcatgaacactggaccctattactttgtgaagaatttacctcttcatgaattaattacacctgaattcatcagtacctttataaagaaagggaaattaattttgtcactggataaagacacttatgaagaaactggacttcagggtcatccatctcagttttctggcagaaaaattatgaaatttattgtttccattgatttgatggaattatccttaaacttggattctaagaagtatgaaagaatatcttggtctttcaaagaaaagaagccattgaaatttgattttcttttggcttggcataaaacaggttcagaagaatcgacaatgatgtcatatttttccaagtaccaaattcaggagcatcagccaaaagtagcactgagcacgttgagagatctccagtgcccagtgctgcagagcagcgagctggagggaacgccagaggtgtcctgccgggctctggagctcttcgactggctcggcgccgtcttcagtaatgtcgacctaaataatgagcctaataatttcatatcaacctattgctgtcctgagccaagcacagtggtggcaaaagcttatttgtgtacaatcactggcttcatacttccagagaagatctgtctcctattggaacatctctgtcactactttgatgaaccgaagttagctccatgggttacactgtccgttcaaggctttgcagacagccctgtttcttgggaaaaaaatgaacatggttttcgaaaaggaggagaacatttatataactttgtgatttttaataatcaggactattggcttcagatggctgttggggcaaatgatcactgtccaccataaaaaataaaaattaaaaatcgtgtttactt

SEQ ID NO: 296094 - DNA, 1397 bp, Homo sapiens
cggggcgtgccccgccagcggaggccgggaggaccaggaacccaggagagcatggccacgctgcgccggcttcgggaggcgccgcggcacttactggtttgcgagaaatccaacttcggcaaccacaagtcgcgccaccggcatcttgtgcagacgcactactataactacagggtttcatttctcattcctgaatgtgggatactatcggaagaactgaaaaacctggtcatgaacactggaccctattactttgtgaagaatttacctcttcatgaattaattacacctgaattcatcagtacctttataaagaaaggttcttgctatgcactaacatacaatacacatattgatgaagataatactgttgccctgctaccaaatgggaaattaattttgtcactggataaagacacttatgaagaaactggacttcagggtcatccatctcagttttctggcagaaaaattatgaaatttattgtttccattgatttgatggaattatccttaaacttggattctaagaagtatgaaagaatatcttggtctttcaaagaaaagaagccattgaaatttgattttcttttggcttggcataaaacaggttcagaagaatcgacaatgatgtcatatttttccaagtaccaaattcaggagcatcagccaaaagtagcactgagcacgttgagagatctccagtgcccagtgctgcagagcagcgagctggagggaacgccagaggtgtcctgccgggctctggagctcttcgactggctcggcgccgtcttcagtaatgtcgacctaaataatgagcctaataatttcatatcaacctattgctgtcctgagccaagcacagtggtggcaaaagcttatttgtgtacaatcactggcttcatacttccagagaagatctgtctcctattggaacatctctggtaactggcagaagcaaaacagattgtctttggaggaactcggagagtttcaaggaatgtctgcactgcaagaaaagttaaaggatgtcctttgggcagaaggaaaatgcctgccttctgaaggaaataagcactggaaatagtaacaacatgggtaaatgtagcatttattatttaaacctctttaaaagacagttatttaaataaaagtcatagtgtaggatttataatatatgtaagagtaaaatggatgaccacaatagcttgaagattaggagaggagaatcatgctattgtaaagttctcatacacaaggtgacgtgctaccatttgaagatagagtgtgataagttacagatatgtgctgtaaaccctaaagcagctgctaaaatgacataccaaaaaatcatacctattaaactatcaaaagataaaatggaattattttaaaaa

SEQ ID NO: 296095 - DNA, 829 bp, Homo sapiens
cggggcgtgccccgccagcggaggccgggaggaccaggaacccaggagagcatggccacgctgcgccggcttcgggaggcgccgcggcacttactggtttgcgagaaatccaacttcggcaaccacaagtcgcgccaccggcatcttgtgcagacgcactactataactacagggtttcatttctcattcctgaatgtgggatactatcggaagaactgaaaaacctggtcatgaacactggaccctattactttgtgaagaatttacctcttcatgaattaattacacctgaattcatcagtacctttataaagaaaggttcttgctatgcactaacatacaatacacatattgatgaagataatactgttgccctgctaccaaatgggaaattaattttgtcactggataaagacacttatgaagaaactggacttcagggtcatccatctcagttttctggcagaaaaattatgaaatttattgtttccattgatttgatggaattatccttaaacttggattctaagaagtatgaaagaatatcttggtctttcaaagaaaagaagccattgaaatttgattttcttttggcttggcataaaacaggttcagaagaatcgacaatgatgtcatatttttccaagtaccaaattcaggagcatcagccaaaagtagcactgagcacgttgagagatctccagtgcccagtgctgcagagcagcgagctggagggaacgccagaggtgtcctgccgggctctggagctcttcgactggctcggcgccgtcttcagtaatgtcgacctcagggtaccgagctgcgatg

SEQ ID NO: 296096 - DNA, 765 bp, Homo sapiens
agtatagattttttcattttgggaggtggtatataaataaaatgtacattgaaaggaactcaaatcgcctattgcaaagaccgtacattgagtataatcctatttagtaagcatatcttctcagtcttcccttttgaaatgtcagatttaagtcttgaaggttttcctttttaagcccaacatcctttttcacatttattggtttagtactttgactttcttcgataggaaggctggatatgaaaaatctggtgaattatcctgcaacgtttcagttaactgagactctgagaacagtactcttaataggagggaaaggatccttaaacgcctgtggggttttttgttttgggttctttttgtcttaaagacctcccagaatgagggtgggaacagctgaggtttgtttcatgtgttgtatattagttaatccttatggagttcacagtgtgacatcaggaacttatcacacacctcttgattttcaaaaattaaagctaagatctaagctttattagaatatcagaaatactacttatcctgaataaattttttaaaatgcagacattcctaactctcttttaaaactctgtttaacaactacctttttttcagtcactactttgatgaaccgaagttagctccatgggttacactgtccgttcaaggctttgcagacagccctgtttcttgggaaaaaaatgaacatggttttcgaaaaggaggagaacatttatataactttgtgatttttaataatcagga

SEQ ID NO: 296097 - DNA, 204 bp, Homo sapiens
tcttgtaaaaataatccactaacatcttgcaggtgtaatttcttgttttaaatttttcctctgtactttctcttccaggttcttgctatgcactaacatacaatacacatattgatgaagataatactgttgccctgctaccaaatggtaacactttattttttcatctttctttaattgttaaaaaaaaatgcatactgtaaa

SEQ ID NO: 296098 - DNA, 418 bp, Homo sapiens
  misc_feature (29)..(29): n is a, c, g, or t
  misc_feature (40)..(40): n is a, c, g, or t
tctgccattaaaattacctacttaatcangataagcacgnatttttgttgcccttggttttacctgtaagactgtggaactattttaccttaagacctgaaaaagttttctggaaaggataaccctcccaatatccctagcagcagcagcaaaccaaagtcaaagtatccctggcacgacacacttggctgacttatgttctgtgcgcattctggcaggaattctgtctcttcagagactcatcctcaaaacaagacttgacactgtgtccttgccccagtcctaggaactgtggcacacagagatgttcattttaaaaacggatttcatgaaacactcttgtacttatgtttataagagagcactgggtagccaagtgatcttcccattcacagagttagtaaacctctgtactaca

SEQ ID NO: 296099 - DNA, 773 bp, Homo sapiens
gcttgtaccatccgttgggcacgcgagctccgcttgatctgtgactgtggtcataccctcgctctaccttagaatgattctggacttgactggttgtttgtgacttcttagctctggagccctaggctcggtggggggcgcagtcgcttgctgatactataactcgcggcattgcgctcgtgcatgatgggtcacttacatggcaatctatcacatgggtgttccaactcgtatctcgactctcattctccctgtgactcaggtgagcaaaaacatttccttccttatttcatccagtacccatgaaatttcctctctgtgtttcatgtgtcccaggtcccccaaaaaacaggtggtggtggattatacatggctttcagtagtggggtgatgaaaatgttctctctggtaaagcatgctgacactgtttatcttgtgtaataggccccaatcttcatctccttcttcattgctttgagagagatggccaaccttcctgtgcccagcctgcagacaggtggcctctggtggttccaggatctcacggtatccgatcccatctacatattaccactggcagtcactgctacaatgtgggctgttcttgaggtaagcccagattggccaagtgccaggcctgcaaagtgaactgggattggagggtaaagtagttgtacagaatggtcatccttcacttgctggagaaagagttgatgggtaagagattagagacagattcactgaaactgacagctttcccgacttttccaccc

SEQ ID NO: 296100 - DNA, 1717 bp, Homo sapiens
  misc_feature (78)..(78): n is a, c, g, or t
atggtaacgtggctttacagatttttacccacttcaaatatggccgccaagctccgttctcttttaccgcctgatctncggctacaattctggcttcatgcccgcctccaaaagtgcttcctctcgaggggttgtggttcttactgcgcaggcgcaaaagcaagtcctcttccgccgggcaaaatggcgatgggactaatgtgcggacgccgggagcttctgcgcttgctacagtccgggcgtcgggtccacagcgtcgcagggccctcgcaatggcttgggaaaccgctgaccacacggctcctattcccagtagccccgtgctgctgtcgcccacactacctcttccttgcggcttccggcccccgcagcctcagtacctctgctatctcttttgcagaagtccaggttcaggcccctcctgttgttgctgcaactccctcacccacagcagtacctgaggtggcttctggagagactgcagatgtagtccaaactgctgcagagcagagcttcgctgaactggggctggggtcatacaccccagtgggactgatccagaatttactggaatttatgcatgttgatctgggcctaccttggtggggggccattgctgcatgtacagtctttgcccgctgcctgatttttcctctcatcgtgacgggccagcgagaggcagccaggatccacaatcacttgccagagatccagaagttttccagtcgaatcagagaggccaagttagcaggagaccatattgagtattacaaggcttcctcggagatggcactttaccagaaaaaacatggtattaaactctataaacctctcattctccctgtgactcaggccccaatcttcatctccttcttcattgctttgagagagatggccaaccttcctgtgcccagcctgcagacaggtggcctctggtggttccaggatctcacggtatccgatcccatctacatattaccactggcagtcactgctacaatgtgggctgttcttgagctaggtgctgagacaggtgtgcaaagttctgaccttcagtggatgagaaatgtcatcagaatgatgcccctgataaccttgcccataaccatgcatttccccacggcagtgtttatgtactggctctcctccaatttgttttccctggtccaagtatcctgtctccggattccagcagtacgcactgtacttaaaatcccccagcgtgttgtacatgacctggacaaattacctccacgggaaggcttcctagagagcttcaaaaaaggctggaaaaatgctgaaatgacgcgtcagctgcgagagcgtgaacaacgcatgcggaatcagttggagctagcagccaggggtcctttacgacagacctttacccacaaccctctcctacaacctggaaaggataaccctcccaatatccctagcagcagcagcaaaccaaagtcaaagtatccctggcacgacacacttggctgacttatgttctgtgcgcattctggcaggaattctgtctcttcagagactcatcctcaaaacaagacttgacactgtgtccttgccccagtcctaggaactgtggcacacagagatgttcattttaaaaacggatttcatgaaacactcttgtacttatgtttataagagagcactgggtagccaagtgatcttcccattcacagagttagtaaacctctgtactaca

SEQ ID NO: 296101 - DNA, 1595 bp, Homo sapiens
ccacaacttccccccttttccccccaaaaaaaaaggaaaattggaaaattaaccgggcaaaatggcgatgggactaatgtgcggacgccgggagcttctgcgcttgctacagtccgggcgtcgggtccacagcgtcgcagggccctcgcaatggcttgggaaaccgctgaccacacggctcctattcccagtagccccgtgctgctgtcgcccacactacctcttccttgcggcttccggcccccgcagcctcagtacctctgctatctcttttgcagaagtccaggttcaggcccctcctgttgttgctgcaactccctcacccacagcagtacctgaggtggcttctggagagactgcagatgtagtccaaactgctgcagagcagagcttcgctgaactggggctggggtcatacaccccagtgggactgatccagaatttactggaatttatgcatgttgatctgggcctaccttggtggggggccattgctgcatgtacagtctttgcccgctgcctgatttttcctctcatcgtgacgggccagcgagaggcagccaggatccacaatcacttgccagagatccagaagttttccagtcgaatcagagaggccaagttagcaggagaccatattgagtattacaaggcttcctcggagatggcactttaccagaaaaaacatggtattaaactctataaacctctcattctccctgtgactcaggccccaatcttcatctccttcttcattgctttgagagagatggccaaccttcctgtgcccagcctgcagacaggtggcctctggtggttccaggatctcacggtatccgatcccatctacatattaccactggcagtcactgctacaatgtgggctgttcttgagctaggtgctgagacaggtgtgcaaagttctgaccttcagtggatgagaaatgtcatcagaatgatgcccctgataaccttgcccataaccatgcatttccccacggcagtgtttatgtactggctctcctccaatttgttttccctggtccaagtatcctgtctccggattccagcagtacgcactgtacttaaaatcccccagcgtgttgtacatgacctggacaaattacctccacgggaaggcttcctagagagcttcaaaaaaggctggaaaaatgctgaaatgacgcgtcagctgcgagagcgtgaacaacgcatgcggaatcagttggagctagcagccaggggtcctttacgacagacctttacccacaaccctctcctacaacctggaaaggataaccctcccaatatccctagcagcagcagcaaaccaaagtcaaagtatccctggcacgacacacttggctgacttatgttctgtgcgcattctggcaggaattctgtctcttcagagactcatcctcaaaacaagacttgacactgtgtccttgccccagtcctaggaactgtggcacacagagatgttcattttaaaaacggatttcatgaaacactcttgtacttatgtttataagagagcactgggtagccaagtgatcttcccattcacagagttagtaaacctctgtactaca

SEQ ID NO: 296102 - DNA, 2652 bp, Homo sapiens
  misc_feature (78)..(78): n is a, c, g, or t
atggtaacgtggctttacagatttttacccacttcaaatatggccgccaagctccgttctcttttaccgcctgatctncggctacaattctggcttcatgcccgcctccaaaagtgcttcctctcgaggggttgtggttcttactgcgcaggcgcaaaagcaagtcctcttccgccgggcaaaatggcgatgggactaatgtgcggacgccgggagcttctgcgcttgctacagtccgggcgtcgggtccacagcgtcgcagggccctcgcaatggcttgggaaaccgctgaccacacggctcctattcccagtagccccgtgctgctgtcgcccacactacctcttccttgcggcttccggcccccgcagcctcagtacctctgctatctcttttgcagaagtccaggttcaggcccctcctgttgttgctgcaactccctcacccacagcagtacctgaggtggcttctggagagactgcagatgtagtccaaactgctgcagagcagagcttcgctgaactggggctggggtcatacaccccagtgggactgatccagaatttactggaatttatgcatgttgatctgggcctaccttggtggggggccattgctgcatgtacagtctttgcccgctgcctgatttttcctctcatcgtgacgggccagcgagaggcagccaggatccacaatcacttgccagagatccagaagttttccagtcgaatcagagaggccaagttagcaggagaccatattgagtattacaaggcttcctcggagatggcactttaccagaaaaaacatggtattaaactctataaacctctcattctccctgtgactcaggccccaatcttcatctccttcttcattgctttgagagagatggccaaccttcctgtgcccagcctgcagacaggtggcctctggtggttccaggatctcacggtatccgatcccatctacatattaccactggcagtcactgctacaatgtgggctgttcttgagctaggtgctgagacaggtgtgcaaagttctgaccttcagtggatgagaaatgtcatcagaatgatgcccctgataaccttgcccataaccatgcatttccccacggcagtgtttatgtactggctctcctccaatttgttttccctggtccaagtatcctgtctccggattccagcagtacgcactgtacttaaaatcccccagcgtgttgtacatgacctggacaaattacctccacgggaaggcttcctagagagcttcaaaaaaggctggaaaaatgctgaaatgacgcgtcagctgcgagagcgtgaacaacgcatgcggaatcagttggagctagcagccaggggtcctttacgacagacctttacccacaaccctctcctacaacctggaaaggataaccctcccaatatccctagcagcagcagcaaaccaaagtcaaagtatccctggcacgacacacttggctgacttatgttctgtgcgcattctggcaggaattctgtctcttcagagactcatcctcaaaacaagacttgacactgtgtccttgccccagtcctaggaactgtggcacacagagatgttcattttaaaaacggatttcatgaaacactcttgtacttatgtttataagagagcactgggtagccaagtgatcttcccattcacagagttagtaaacctctgtactacaaaaaaaaaaaaaaaaaaaaaaaaaaaaaaaaaaaaaaaaaaaaaaacaaaaaaaaaaaaaaacaaaaaagaagaggggggccgcgcgcgcgccaaaaaacctccccgccggggggcgcgccccacgcgcgcgcccccccccttgtagcgagacaaagagggacgcgcacacctaagaagaggatgcgacgataatatagaaaagaaacagaacgactacgccgccgccagtcactaatcaacaacaaacacaaaagaggaggaaacaaaacaacgagagagcagatggaagaaaaacatgagaggagacgagagaccacaccacacactcgcgtggagcaggagagaaacaacatacttgggcagcgaaccacacacacccacccccgccacacggcacgatattataaaaccccccccccatcgcgcgggacacaacaacacaaacaccacccatccacaaagcgcagcggacatcaacagcgggacgtacacaacaacacaacgcacgaagcgcaccagcaagcacagtcgacgggagacgaagaacagaaaatagtgagcgctccaccgaacacgaacgacaaaatacaacatcaccaaacaaccaaccaaccaattattcccaccgccggcggagccctgttcaagagaaccataaaaaaagcgccgcacagaccgcagacggcacacaccagcccacgcccagcacaccacccgtcggagcgcgccgcacgaacccacagaccacgaccagaacaacggcgcgccacgaacacaacgcctcgacaggcgaagcgccccaccgacgccgcactgcagacgcagcgcccgcgacaggcccacgcagcagacccagcgcgcgcagacgcagggataccgaccacgcacacacgcccacccacaccagcccgagcgagccacgataaagcccac

SEQ ID NO: 296103 - DNA, 2001 bp, Homo sapiens
  misc_feature (78)..(78): n is a, c, g, or t
atggtaacgtggctttacagatttttacccacttcaaatatggccgccaagctccgttctcttttaccgcctgatctncggctacaattctggcttcatgcccgcctccaaaagtgcttcctctcgaggggttgtggttcttactgcgcaggcgcaaaagcaagtcctcttccgccgggcaaaatggcgatgggactaatgtgcggacgccgggagcttctgcgcttgctacagtccgggcgtcgggtccacagcgtcgcagggccctcgcaatggcttgggaaaccgctgaccacacggctcctattcccagtagccccgtgctgctgtcgcccacactacctcttccttgcggcttccggcccccgcagcctcagtacctctgctatctcttttgcagaagtccaggttcaggcccctcctgttgttgctgcaactccctcacccacagcagtacctgaggtggcttctggagagactgcagatgtagtccaaactgctgcagagcagagcttcgctgaactggggctggggtcatacaccccagtgggactgatccagaatttactggaatttatgcatgttgatctgggcctaccttggtggggggccattgctgcatgtacagtctttgcccgctgcctgatttttcctctcatcgtgacgggccagcgagaggcagccaggatccacaatcacttgccagagatccagaagttttccagtcgaatcagagaggccaagttagcaggagaccatattgagtattacaaggcttcctcggagatggcactttaccagaaaaaacatggtattaaactctataaacctctcattctccctgtgactcaggccccaatcttcatctccttcttcattgctttgagagagatggccaaccttcctgtgcccagcctgcagacaggtggcctctggtggttccaggatctcacggtatccgatcccatctacatattaccactggcagtcactgctacaatgtgggctgttcttgagctaggtgctgagacaggtgtgcaaagttctgaccttcagtggatgagaaatgtcatcagaatgatgcccctgataaccttgcccataaccatgcatttccccacggcagtgtttatgtactggctctcctccaatttgttttccctggtccaagtatcctgtctccggattccagcagtacgcactgtacttaaaatcccccagcgtgttgtacatgacctggacaaattacctccacgggaaggcttcctagagagcttcaaaaaaggctggaaaaatgctgaaatgacgcgtcagctgcgagagcgtgaacaacgcatgcggaatcagttggagctagcagccaggggtcctttacgacagacctttacccacaaccctctcctacaacctggaaaggataaccctcccaatatccctagcagcagcagcaaaccaaagtcaaagtatccctggcacgacacacttggctgacttatgttctgtgcgcattctggcaggaattctgtctcttcagagactcatcctcaaaacaagacttgacactgtgtccttgccccagtcctaggaactgtggcacacagagatgttcattttaaaaacggatttcatgaaacactcttgtacttatgtttataagagagcactgggtagccaagtgatcttcccattcacagagttagtaaacctctgtactacaaaaaaaaaaaaaaaaaagatttcggccgcaaatctttttttttttttttttttctctgcaatgctcagccattttacttgagacataaaaaaagttttaagagtagttgttttgctttttcgatttaaacattcatgagaacggatgggacggtagtgctgtggtgtggacttgtgtctgagtggccatgccggtcgggtccttcagaccacatactggtacgggtctgccttcccttggtctggcgtggcaaagggctgcccagcctagagagaaggggtggc

SEQ ID NO: 296104 - DNA, 2258 bp, Homo sapiens
  misc_feature (78)..(78): n is a, c, g, or t
atggtaacgtggctttacagatttttacccacttcaaatatggccgccaagctccgttctcttttaccgcctgatctncggctacaattctggcttcatgcccgcctccaaaagtgcttcctctcgaggggttgtggttcttactgcgcaggcgcaaaagcaagtcctcttccgccgggcaaaatggcgatgggactaatgtgcggacgccgggagcttctgcgcttgctacagtccgggcgtcgggtccacagcgtcgcagggccctcgcaatggcttgggaaaccgctgaccacacggctcctattcccagtagccccgtgctgctgtcgcccacactacctcttccttgcggcttccggcccccgcagcctcagtacctctgctatctcttttgcagaagtccaggttcaggcccctcctgttgttgctgcaactccctcacccacagcagtacctgaggtggcttctggagagactgcagatgtagtccaaactgctgcagagcagagcttcgctgaactggggctggggtcatacaccccagtgggactgatccagaatttactggaatttatgcatgttgatctgggcctaccttggtggggggccattgctgcatgtacagtctttgcccgctgcctgatttttcctctcatcgtgacgggccagcgagaggcagccaggatccacaatcacttgccagagatccagaagttttccagtcgaatcagagaggccaagttagcaggagaccatattgagtattacaaggcttcctcggagatggcactttaccagaaaaaacatggtattaaactctataaacctctcattctccctgtgactcaggccccaatcttcatctccttcttcattgctttgagagagatggccaaccttcctgtgcccagcctgcagacaggtggcctctggtggttccaggatctcacggtatccgatcccatctacatattaccactggcagtcactgctacaatgtgggctgttcttgagctaggtgctgagacaggtgtgcaaagttctgaccttcagtggatgagaaatgtcatcagaatgatgcccctgataaccttgcccataaccatgcatttccccacggcagtgtttatgtactggctctcctccaatttgttttccctggtccaagtatcctgtctccggattccagcagtacgcactgtacttaaaatcccccagcgtgttgtacatgacctggacaaattacctccacgggaaggcttcctagagagcttcaaaaaaggctggaaaaatgctgaaatgacgcgtcagctgcgagagcgtgaacaacgcatgcggaatcagttggagctagcagccaggggtcctttacgacagacctttacccacaaccctctcctacaacctggaaaggataaccctcccaatatccctagcagcagcagcaaaccaaagtcaaagtatccctggcacgacacacttggctgacttatgttctgtgcgcattctggcaggaattctgtctcttcagagactcatcctcaaaacaagacttgacactgtgtccttgccccagtcctaggaactgtggcacacagagatgttcattttaaaaacggatttcatgaaacactcttgtacttatgtttataagagagcactgggtagccaagtgatcttcccattcacagagttagtaaacctctgtactacatacatgctgcttcctgatacttattgaacagggaaatgagtgtgcacttcagaaaactgaagaatacccagcattttgggaggccgaggtgggtggatcacctgagatcaggagtttgagaccagcctggccaacatggggaaacgccatctctgctgttttacaaaaatagccacacgtggtggtgcacacctgtagtcccagctactcgggaggctgaggcaggagaattgcttgaatccgagaggcggaggttgcagtgagccaagatcgcaccaccgcactccagcctgggcaatagagggagactgtctcaaaaaaaaaagaaaactgaagaatagagtgagtcatgattgcttttgctggcccatggccttggaaaatataatgttttaacctggcattaagggtttaaacttccacccaggcgcagtggctcacgccagtaatcccagcacttttgggaggccaaggcgggcggatcacgaagtcagcagatcgagaccatcctggccaacatggtgaaaccccgtctctacta

SEQ ID NO: 296105 - DNA, 1507 bp, Homo sapiens
  misc_feature (78)..(78): n is a, c, g, or t
atggtaacgtggctttacagatttttacccacttcaaatatggccgccaagctccgttctcttttaccgcctgatctncggctacaattctggcttcatgcccgcctccaaaagtgcttcctctcgaggggttgtggttcttactgcgcaggcgcaaaagcaagtcctcttccgccgggcaaaatggcgatgggactaatgtgcggacgccgggagcttctgcgcttgctacagtccgggcgtcgggtccacagcgtcgcagggccctcgcaatggcttgggaaaccgctgaccacacggctcctattcccagtagccccgtgctgctgtcgcccacactacctcttccttgcggcttccggcccccgcagcctcagtacctctgctatctcttttgcagaagtccaggttcaggcccctcctgttgttgctgcaactccctcacccacagcagtacctgaggtggcttctggagagactgcagatgtagtccaaactgctgcagagcagagcttcgctgaactggggctggggtcatacaccccagtgggactgatccagaatttactggaatttatgcatgttgatctgggcctaccttggtggggggccattgctgcatgtacagtctttgcccgctgcctgatttttcctctcatcgtgacgggccagcgagaggcagccaggatccacaatcacttgccagagatccagaagttttccagtcgaatcagagaggccaagttagcaggagaccatattgagtattacaaggcttcctcggagatggcactttaccagaaaaaacatggtattaaactctataaacctctcattctccctgtgactcaggccccaatcttcatctccttcttcattgctttgagagagatggccaaccttcctgtgcccagcctgcagacaggtggcctctggtggttccaggatctcacggtatccgatcccatctacatattaccactggcagtcactgctacaatgtgggctgttcttgagctaggtgctgagacaggtgtgcaaagttctgaccttcagtggatgagaaatgtcatcagaatgatgcccctgataaccttgcccataaccatgcatttccccacggcagtgtttatgtactggctctcctccaatttgttttccctggtccaagtatcctgtctccggattccagcagtacgcactgtacttaaaatcccccagcgtgttgtacatgacctggacaaattacctccacgggaaggcttcctagagagcttcaaaaaaggctggaaaaatgctgaaatgacgcgtcagctgcgagagcgtgaacaacgcatgcggaatcagttggagctagcagccaggggtcctttacgacagacctttacccacaaccctctcctacaacctggaaaggataaccctcccaatatccctagcagcagcagcaaaccaaagtcaaagtatccctggcactgtttggactctgggcactgtttggactctg

SEQ ID NO: 296106 - DNA, 2078 bp, Homo sapiens
ccacaacttccccccttttccccccaaaaaaaaaggaaaattggaaaattaaccgggcaaaatggcgatgggactaatgtgcggacgccgggagcttctgcgcttgctacagtccgggcgtcgggtaaggatgccccggggcagagcaccgggatgctgccctgacccagtgaaccaggccccaggacagctcgtgctaggggtatcagcagacgctgacctgctcaccgggacctgaatgtcatgacctcgggtcatgtgaggacgcgctagggttagtccccgacactatgggcccagcagcccggtgtcagcttctggaattggcttggctcctggcgagagcacctcggcctcgttctcagggccctccgatgtgggtctgcgataactgagatgcggggaacccaggttcgagcttcgctctgcaggcaccacccgctgcatgccttcgggctagcggtctgcgcgcggtgatagcaatgtcctcccctgtagtggccgagctgcctgcttcttggggagttagcataatgaatcccgtttgcacccacgcgaggacttctgctcccggtaaaggggctccatcatccttttacacgctcaggtccacagcgtcgcagggccctcgcaatggcttgggaaaccgctgaccacacggctcctattcccagtagccccgtgctgctgtcgcccacactacctcttccttgcggcttccggcccccgcagcctcagtacctctgctatctcttttgcagaagtccaggttcaggcccctcctgttgttgctgcaactccctcacccacagcagtacctgaggtggcttctggagagactgcagatgtagtccaaactgctgcagagcagagcttcgctgaactggggctggggtcatacaccccagtgggactgatccagaatttactggaatttatgcatgttgatctgggcctaccttggtggggggccattgctgcatgtacagtctttgcccgctgcctgatttttcctctcatcgtgacgggccagcgagaggcagccaggatccacaatcacttgccagagatccagaagttttccagtcgaatcagagaggccaagttagcaggagaccatattgagtattacaaggcttcctcggagatggcactttaccagaaaaaacatggtattaaactctataaacctctcattctccctgtgactcaggccccaatcttcatctccttcttcattgctttgagagagatggccaaccttcctgtgcccagcctgcagacaggtggcctctggtggttccaggatctcacggtatccgatcccatctacatattaccactggcagtcactgctacaatgtgggctgttcttgagctaggtgctgagacaggtgtgcaaagttctgaccttcagtggatgagaaatgtcatcagaatgatgcccctgataaccttgcccataaccatgcatttccccacggcagtgtttatgtactggctctcctccaatttgttttccctggtccaagtatcctgtctccggattccagcagtacgcactgtacttaaaatcccccagcgtgttgtacatgacctggacaaattacctccacgggaaggcttcctagagagcttcaaaaaaggctggaaaaatgctgaaatgacgcgtcagctgcgagagcgtgaacaacgcatgcggaatcagttggagctagcagccaggggtcctttacgacagacctttacccacaaccctctcctacaacctggaaaggataaccctcccaatatccctagcagcagcagcaaaccaaagtcaaagtatccctggcacgacacacttggctgacttatgttctgtgcgcattctggcaggaattctgtctcttcagagactcatcctcaaaacaagacttgacactgtgtccttgccccagtcctaggaactgtggcacacagagatgttcattttaaaaacggatttcatgaaacactcttgtacttatgtttataagagagcactgggtagccaagtgatcttcccattcacagagttagtaaacctctgtactaca

SEQ ID NO: 296107 - DNA, 1745 bp, Homo sapiens
ccacaacttccccccttttccccccaaaaaaaaaggaaaattggaaaattaaccgggcaaaatggcgatgggactaatgtgcggacgccgggagcttctgcgcttgctacagtccgggcgtcgggtaaggatgccccggggcagagcaccgggatgctgccctgacccagtgaaccaggccccaggacagctcgtgctaggggtatcagcagacgctgacctgctcaccgggacctgaatgtcatgacctcgggtcatgtgaggacgcgctagggtccacagcgtcgcagggccctcgcaatggcttgggaaaccgctgaccacacggctcctattcccagtagccccgtgctgctgtcgcccacactacctcttccttgcggcttccggcccccgcagcctcagtacctctgctatctcttttgcagaagtccaggttcaggcccctcctgttgttgctgcaactccctcacccacagcagtacctgaggtggcttctggagagactgcagatgtagtccaaactgctgcagagcagagcttcgctgaactggggctggggtcatacaccccagtgggactgatccagaatttactggaatttatgcatgttgatctgggcctaccttggtggggggccattgctgcatgtacagtctttgcccgctgcctgatttttcctctcatcgtgacgggccagcgagaggcagccaggatccacaatcacttgccagagatccagaagttttccagtcgaatcagagaggccaagttagcaggagaccatattgagtattacaaggcttcctcggagatggcactttaccagaaaaaacatggtattaaactctataaacctctcattctccctgtgactcaggccccaatcttcatctccttcttcattgctttgagagagatggccaaccttcctgtgcccagcctgcagacaggtggcctctggtggttccaggatctcacggtatccgatcccatctacatattaccactggcagtcactgctacaatgtgggctgttcttgagctaggtgctgagacaggtgtgcaaagttctgaccttcagtggatgagaaatgtcatcagaatgatgcccctgataaccttgcccataaccatgcatttccccacggcagtgtttatgtactggctctcctccaatttgttttccctggtccaagtatcctgtctccggattccagcagtacgcactgtacttaaaatcccccagcgtgttgtacatgacctggacaaattacctccacgggaaggcttcctagagagcttcaaaaaaggctggaaaaatgctgaaatgacgcgtcagctgcgagagcgtgaacaacgcatgcggaatcagttggagctagcagccaggggtcctttacgacagacctttacccacaaccctctcctacaacctggaaaggataaccctcccaatatccctagcagcagcagcaaaccaaagtcaaagtatccctggcacgacacacttggctgacttatgttctgtgcgcattctggcaggaattctgtctcttcagagactcatcctcaaaacaagacttgacactgtgtccttgccccagtcctaggaactgtggcacacagagatgttcattttaaaaacggatttcatgaaacactcttgtacttatgtttataagagagcactgggtagccaagtgatcttcccattcacagagttagtaaacctctgtactaca

SEQ ID NO: 296108 - DNA, 1423 bp, Homo sapiens
  misc_feature (78)..(78): n is a, c, g, or t
atggtaacgtggctttacagatttttacccacttcaaatatggccgccaagctccgttctcttttaccgcctgatctncggctacaattctggcttcatgcccgcctccaaaagtgcttcctctcgaggggttgtggttcttactgcgcaggcgcaaaagcaagtcctcttccgccgggcaaaatggcgatgggactaatgtgcggacgccgggagcttctgcgcttgctacagtccgggcgtcgggtccacagcgtcgcagggccctcgcaatggcttgggaaaccgctgaccacacggctcctattcccagtagccccgtgctgctgtcgcccacactacctcttccttgcggcttccggcccccgcagcctcagtacctctgctatctcttttgcagaagtccaggttcaggcccctcctgttgttgctgcaactccctcacccacagcagtacctgaggtggcttctggagagactgcagatgtagtccaaactgctgcagagcagagcttcgctgaactggggctggggtcatacaccccagtgggactgatccagaatttactggaatttatgcatgttgatctgggcctaccttggtggggggccattgctgcatgtacagtctttgcccgctgcctgatttttcctctcatcgtgacgggccagcgagaggcagccaggatccacaatcacttgccagagatccagaagttttccagtcgaatcagagaggccaagttagcaggagaccatattgagtattacaaggcttcctcggagatggcactttaccagaaaaaacatggtattaaactctataaacctctcattctccctgtgactcaggccccaatcttcatctccttcttcattgctttgagagagatggccaaccttcctgtgcccagcctgcagacaggtggcctctggtggttccaggatctcacggtatccgatcccatctacatattaccactggcagtcactgctacaatgtgggctgttcttgagctaggtgctgagacaggtgtgcaaagttctgaccttcagtggatgagaaatgtcatcagaatgatgcccctgataaccttgcccataaccatgcatttccccacggcagtgtttatgtactggctctcctccaatttgttttccctggtccaagtatcctgtctccggattccagcagtacgcactgtacttaaaatcccccagcgtgttgtacatgacctggacaaattacctccacgggaaggcttcctagagagcttcaaaaaaggctggaaaaatgctgaaatgacgcgtcagctgcgagagcgtgaacaacgcatgcggaatcagttggagctagcagccagggctcccctagcacagacctttacccgcgaccctataatacaaggggtttggaagcagg

SEQ ID NO: 296109 - DNA, 1899 bp, Homo sapiens
  misc_feature (78)..(78): n is a, c, g, or t
atggtaacgtggctttacagatttttacccacttcaaatatggccgccaagctccgttctcttttaccgcctgatctncggctacaattctggcttcatgcccgcctccaaaagtgcttcctctcgaggggttgtggttcttactgcgcaggcgcaaaagcaagtcctcttccgccgggcaaaatggcgatgggactaatgtgcggacgccgggagcttctgcgcttgctacagtccgggcgtcgggtccacagcgtcgcagggccctcgcaatggcttgggaaaccgctgaccacacggctcctattcccagtagccccgtgctgctgtcgcccacactacctcttccttgcggcttccggcccccgcagcctcagtacctctgctatctcttttgcagaagtccaggttcaggcccctcctgttgttgctgcaactccctcacccacagcagtacctgaggtggcttctggagagactgcagatgtagtccaaactgctgcagagcagagcttcgctgaactggggctggggtcatacaccccagtgggactgatccagaatttactggaatttatgcatgttgatctgggcctaccttggtggggggccattgctgcatgtacagtctttgcccgctgcctgatttttcctctcatcgtgacgggccagcgagaggcagccaggatccacaatcacttgccagagatccagaagttttccagtcgaatcagagaggccaagttagcaggagaccatattgagtattacaaggcttcctcggagatggcactttaccagaaaaaacatggtattaaactctataaacctctcattctccctgtgactcaggtgagcaaaaacatttccttccttatttcatccagtacccatgaaatttcctctctgtgtttcatgtgtcccaggtcccccaaaaaacaggtggtggtggattatacatggctttcagtagtggggtgatgaaaatgttctctctggtaaagcatgctgacactgtttatcttgtgtaataggccccaatcttcatctccttcttcattgctttgagagagatggccaaccttcctgtgcccagcctgcagacaggtggcctctggtggttccaggatctcacggtatccgatcccatctacatattaccactggcagtcactgctacaatgtgggctgttcttgagctaggtgctgagacaggtgtgcaaagttctgaccttcagtggatgagaaatgtcatcagaatgatgcccctgataaccttgcccataaccatgcatttccccacggcagtgtttatgtactggctctcctccaatttgttttccctggtccaagtatcctgtctccggattccagcagtacgcactgtacttaaaatcccccagcgtgttgtacatgacctggacaaattacctccacgggaaggcttcctagagagcttcaaaaaaggctggaaaaatgctgaaatgacgcgtcagctgcgagagcgtgaacaacgcatgcggaatcagttggagctagcagccaggggtcctttacgacagacctttacccacaaccctctcctacaacctggaaaggataaccctcccaatatccctagcagcagcagcaaaccaaagtcaaagtatccctggcacgacacacttggctgacttatgttctgtgcgcattctggcaggaattctgtctcttcagagactcatcctcaaaacaagacttgacactgtgtccttgccccagtcctaggaactgtggcacacagagatgttcattttaaaaacggatttcatgaaacactcttgtacttatgtttataagagagcactgggtagccaagtgatcttcccattcacagagttagtaaacctctgtactaca

SEQ ID NO: 296110 - DNA, 1725 bp, Homo sapiens
ccacaacttccccccttttccccccaaaaaaaaaggaaaattggaaaattaaccgggcaaaatggcgatgggactaatgtgcggacgccgggagcttctgcgcttgctacagtccgggcgtcggcacatcacgcgtcgacagaggccctctcaactggctttgggaaatcgttgtaccactacggcgtcctattcccagtagccaccgttcctgctgtcagcctcacacgtatcgctctttcctttgccgtgtcttcacaggtcaccccgtctagcacatcatgtacttctactgactatcatcgttcttgctggaatttccaggttctaggcgcaccttccttgattgttgggctgtcggacatcccatccacgcacgactagtcgacgttacctgagagttggcttctggagagacttgcgagaagtgtaggtcgcaaaactagcttgcagtagtcaccacgcttctgctgaaactggtggcctgggtggtcactacctatccccatgctgcggaccttggatccacgtaatgtttacgtgtgcatacttgtactgtctctgttctgcaactctcgggggctagcccttgggtgcgggcgcgtccacttggctgtctttgatgcaggagtacagtctttgcccgctgcctgatttttcctctcatcgtgacgggccagcgagaggcagccaggatccacaatcacttgccagagatccagaagttttccagtcgaatcagagaggccaagttagcaggagaccatattgagtattacaaggcttcctcggagatggcactttaccagaaaaaacatggtattaaactctataaacctctcattctccctgtgactcaggccccaatcttcatctccttcttcattgctttgagagagatggccaaccttcctgtgcccagcctgcagacaggtggcctctggtggttccaggatctcacggtatccgatcccatctacatattaccactggcagtcactgctacaatgtgggctgttcttgagctaggtgctgagacaggtgtgcaaagttctgaccttcagtggatgagaaatgtcatcagaatgatgcccctgataaccttgcccataaccatgcatttccccacggcagtgtttatgtactggctctcctccaatttgttttccctggtccaagtatcctgtctccggattccagcagtacgcactgtacttaaaatcccccagcgtgttgtacatgacctggacaaattacctccacgggaaggcttcctagagagcttcaaaaaaggctggaaaaatgctgaaatgacgcgtcagctgcgagagcgtgaacaacgcatgcggaatcagttggagctagcagccaggggtcctttacgacagacctttacccacaaccctctcctacaacctggaaaggataaccctcccaatatccctagcagcagcagcaaaccaaagtcaaagtatccctggcacgacacacttggctgacttatgttctgtgcgcattctggcaggaattctgtctcttcagagactcatcctcaaaacaagacttgacactgtgtccttgccccagtcctaggaactgtggcacacagagatgttcattttaaaaacggatttcatgaaacactcttgtacttatgtttataagagagcactgggtagccaagtgatcttcccattcacagagttagtaaacctctgtactaca

SEQ ID NO: 296111 - DNA, 1369 bp, Homo sapiens
ccacaacttccccccttttccccccaaaaaaaaaggaaaattggaaaattaaccgggcaaaatggcgatgggactaatgtgcggacgccgggagcttctgcgcttgctacagtccgggcgtcgggtaaggatgccccggggcagagcaccgggatgctgccctgacccagtgaaccaggccccaggacagctcgtgctaggggtatcagcagacgctgacctgctcaccgggacctgaatgtcatgacctcgggtcatgtgaggacgcgctagggtacagtctttgcccgctgcctgatttttcctctcatcgtgacgggccagcgagaggcagccaggatccacaatcacttgccagagatccagaagttttccagtcgaatcagagaggccaagttagcaggagaccatattgagtattacaaggcttcctcggagatggcactttaccagaaaaaacatggtattaaactctataaacctctcattctccctgtgactcaggccccaatcttcatctccttcttcattgctttgagagagatggccaaccttcctgtgcccagcctgcagacaggtggcctctggtggttccaggatctcacggtatccgatcccatctacatattaccactggcagtcactgctacaatgtgggctgttcttgagctaggtgctgagacaggtgtgcaaagttctgaccttcagtggatgagaaatgtcatcagaatgatgcccctgataaccttgcccataaccatgcatttccccacggcagtgtttatgtactggctctcctccaatttgttttccctggtccaagtatcctgtctccggattccagcagtacgcactgtacttaaaatcccccagcgtgttgtacatgacctggacaaattacctccacgggaaggcttcctagagagcttcaaaaaaggctggaaaaatgctgaaatgacgcgtcagctgcgagagcgtgaacaacgcatgcggaatcagttggagctagcagccaggggtcctttacgacagacctttacccacaaccctctcctacaacctggaaaggataaccctcccaatatccctagcagcagcagcaaaccaaagtcaaagtatccctggcacgacacacttggctgacttatgttctgtgcgcattctggcaggaattctgtctcttcagagactcatcctcaaaacaagacttgacactgtgtccttgccccagtcctaggaactgtggcacacagagatgttcattttaaaaacggatttcatgaaacactcttgtacttatgtttataagagagcactgggtagccaagtgatcttcccattcacagagttagtaaacctctgtactaca

SEQ ID NO: 296112 - DNA, 1853 bp, Homo sapiens
ccacaacttccccccttttccccccaaaaaaaaaggaaaattggaaaattaaccgggcaaaatggcgatgggactaatgtgcggacgccgggagcttctgcgcttgctacagtccgggcgtcgggtccacagcgtcgcagggccctcgcaatggcttgggaaaccgctgaccacacggctcctattcccagtagccccgtgctgctgtcgcccacactacctcttccttgcggcttccggcccccgcagcctcagtacctctgctatctcttttgcagaagtccaggttcaggcccctcctgttgttgctgcaactccctcacccacagcagtacctgaggtggcttctggagagactgcagatgtagtccaaactgctgcagagcagagcttcgctgaactggggctggggtcatacaccccagtgggactgatccagaatttactggaatttatgcatgttgatctgggcctaccttggtggggggccattgctgcatgtacagtctttgcccgctgcctgatttttcctctcatcgtgacgggccagcgagaggcagccaggatccacaatcacttgccagagatccagaagttttccagtcgaatcagagaggccaagttagcaggagaccatattgagtgtgagtcagttgcagaatgagcgtgggagaagtccacatttgcacttttccttacattctgctgggggaaaggaacaatgtaaatcagaagttgccacagtcgggaaagttctaaaggtttatctgtttcttagacctaatgctcccaaggagtggccagggttggttagaaatttcacaggccaggtagataatgaggatgttcacctccactgatgtaactgttaccccaaccattaatttcccctcacctcacagattacaaggcttcctcggagatggcactttaccagaaaaaacatggtattaaactctataaacctctcattctccctgtgactcaggccccaatcttcatctccttcttcattgctttgagagagatggccaaccttcctgtgcccagcctgcagacaggtggcctctggtggttccaggatctcacggtatccgatcccatctacatattaccactggcagtcactgctacaatgtgggctgttcttgagctaggtgctgagacaggtgtgcaaagttctgaccttcagtggatgagaaatgtcatcagaatgatgcccctgataaccttgcccataaccatgcatttccccacggcagtgtttatgtactggctctcctccaatttgttttccctggtccaagtatcctgtctccggattccagcagtacgcactgtacttaaaatcccccagcgtgttgtacatgacctggacaaattacctccacgggaaggcttcctagagagcttcaaaaaaggctggaaaaatgctgaaatgacgcgtcagctgcgagagcgtgaacaacgcatgcggaatcagttggagctagcagccaggggtcctttacgacagacctttacccacaaccctctcctacaacctggaaaggataaccctcccaatatccctagcagcagcagcaaaccaaagtcaaagtatccctggcacgacacacttggctgacttatgttctgtgcgcattctggcaggaattctgtctcttcagagactcatcctcaaaacaagacttgacactgtgtccttgccccagtcctaggaactgtggcacacagagatgttcattttaaaaacggatttcatgaaacactcttgtacttatgtttataagagagcactgggtagccaagtgatcttcccattcacagagttagtaaacctctgtactaca

SEQ ID NO: 296113 - DNA, 1449 bp, Homo sapiens
  misc_feature (78)..(78): n is a, c, g, or t
  misc_feature (1250)..(1250): n is a, c, g, or t
  misc_feature (1334)..(1334): n is a, c, g, or t
  misc_feature (1383)..(1383): n is a, c, g, or t
  misc_feature (1413)..(1413): n is a, c, g, or t
  misc_feature (1428)..(1428): n is a, c, g, or t
  misc_feature (1441)..(1441): n is a, c, g, or t
atggtaacgtggctttacagatttttacccacttcaaatatggccgccaagctccgttctcttttaccgcctgatctncggctacaattctggcttcatgcccgcctccaaaagtgcttcctctcgaggggttgtggttcttactgcgcaggcgcaaaagcaagtcctcttccgccgggcaaaatggcgatgggactaatgtgcggacgccgggagcttctgcgcttgctacagtccgggcgtcgggtccacagcgtcgcagggccctcgcaatggcttgggaaaccgctgaccacacggctcctattcccagtagccccgtgctgctgtcgcccacactacctcttccttgcggcttccggcccccgcagcctcagtacctctgctatctcttttgcagaagtccaggttcaggcccctcctgttgttgctgcaactccctcacccacagcagtacctgaggtggcttctggagagactgcagatgtagtccaaactgctgcagagcagagcttcgctgaactggggctggggtcatacaccccagtgggactgatccagaatttactggaatttatgcatgttgatctgggcctaccttggtggggggccattgctgcatgtacagtctttgcccgctgcctgatttttcctctcatcgtgacgggccagcgagaggcagccaggatccacaatcacttgccagagatccagaagttttccagtcgaatcagagaggccaagttagcaggagaccatattgagtattacaaggcttcctcggagatggcactttaccagaaaaaacatggtattaaactctataaacctctcattctccctgtgactcaggccccaatcttcatctccttcttcattgctttgagagagatggccaaccttcctgtgcccagcctgcagacaggtggcctctggtggttccaggatctcacggtatccgatcccatctacatattaccactggcagtcactgctacaatgtgggctgttcttgagctaggtgctgagacaggtgtgcaaagttctgaccttcagtggatgagaaatgtcatcagaatgatgcccctgataaccttgcccataaccatgcatttccccacgcatcagcagtgtcctggcttggcactcacagcaaggccactgctgatgctgatggggctgctgttttctttcttgtcttattcatttgcaaaacctttactgatgacttttaccacagtcacacatantatctcatttaaacctcacagcaactctgtgagggattgttatctccattttatgggatgaggaagctgactctgagagatgantttccaaattcatccaactggaagaaaaaggaagtctctgggggacttngaatccagaactgtttcaggttccaagttncagggggttcaattntatttaaggccantccatgga

SEQ ID NO: 296114 - DNA, 2035 bp, Homo sapiens
ccacaacttccccccttttccccccaaaaaaaaaggaaaattggaaaattaaccgggcaaaatggcgatgggactaatgtgcggacgccgggagcttctgcgcttgctacagtccgggcgtcgggtccacagcgtcgcagggccctcgcaatggcttgggaaaccgctgaccacacggctcctattcccagtagccccgtgctgctgtcgcccacactacctcttccttgcggcttccggcccccgcagcctcagtacctctgctatctcttttgcagaagtccaggttcaggcccctcctgttgttgctgcaactccctcacccacagcagtacctgaggtggcttctggagagactgcagatgtagtccaaactgctgcagagcagagcttcgctgaactggggctggggtcatacaccccagtgggactgatccagaatttactggaatttatgcatgttgatctgggcctaccttggtggggggccattgctgcatgtacagtctttgcccgctgcctgatttttcctctcatcgtgacgggccagcgagaggcagccaggatccacaatcacttgccagagatccagaagttttccagtcgaatcagagaggccaagttagcaggagaccatattgagtgtgagtcagttgcagaatgagcgtgggagaagtccacatttgcacttttccttacattctgctgggggaaaggaacaatgtaaatcagaagttgccacagtcgggaaagttctaaaggtttatctgtttcttagacctaatgctcccaaggagtggccagggttggttagaaatttcacaggccaggtagataatgaggatgttcacctccactgatgtaactgttaccccaaccattaatttcccctcacctcacagattacaaggcttcctcggagatggcactttaccagaaaaaacatggtattaaactctataaacctctcattctccctgtgactcaggtgagcaaaaacatttccttccttatttcatccagtacccatgaaatttcctctctgtgtttcatgtgtcccaggtcccccaaaaaacaggtggtggtggattatacatggctttcagtagtggggtgatgaaaatgttctctctggtaaagcatgctgacactgtttatcttgtgtaataggccccaatcttcatctccttcttcattgctttgagagagatggccaaccttcctgtgcccagcctgcagacaggtggcctctggtggttccaggatctcacggtatccgatcccatctacatattaccactggcagtcactgctacaatgtgggctgttcttgagctaggtgctgagacaggtgtgcaaagttctgaccttcagtggatgagaaatgtcatcagaatgatgcccctgataaccttgcccataaccatgcatttccccacggcagtgtttatgtactggctctcctccaatttgttttccctggtccaagtatcctgtctccggattccagcagtacgcactgtacttaaaatcccccagcgtgttgtacatgacctggacaaattacctccacgggaaggcttcctagagagcttcaaaaaaggctggaaaaatgctgaaatgacgcgtcagctgcgagagcgtgaacaacgcatgcggaatcagttggagctagcagccaggggtcctttacgacagacctttacccacaaccctctcctacaacctggaaaggataaccctcccaatatccctagcagcagcagcaaaccaaagtcaaagtatccctggcacgacacacttggctgacttatgttctgtgcgcattctggcaggaattctgtctcttcagagactcatcctcaaaacaagacttgacactgtgtccttgccccagtcctaggaactgtggcacacagagatgttcattttaaaaacggatttcatgaaacactcttgtacttatgtttataagagagcactgggtagccaagtgatcttcccattcacagagttagtaaacctctgtactaca

SEQ ID NO: 296115 - DNA, 1451 bp, Homo sapiens
ccacaacttccccccttttccccccaaaaaaaaaggaaaattggaaaattaaccgggcaaaatggcgatgggactaatgtgcggacgccgggagcttctgcgcttgctacagtccgggcgtcgggtccacagcgtcgcagggccctcgcaatggcttgggaaaccgctgaccacacggctcctattcccagtagccccgtgctgctgtcgcccacactacctcttccttgcggcttccggcccccgcagcctcagtacctctgctatctcttttgcagaagtccaggttcaggcccctcctgttgttgctgcaactccctcacccacagcagtacctgaggtggcttctggagagactgcagatgtagtccaaactgctgcagagcagagcttcgctgaactggggctggggtcatacaccccagtgggactgatccagaatttactggaatttatgcatgttgatctgggcctaccttggtggggggccattgctgcatattacaaggcttcctcggagatggcactttaccagaaaaaacatggtattaaactctataaacctctcattctccctgtgactcaggccccaatcttcatctccttcttcattgctttgagagagatggccaaccttcctgtgcccagcctgcagacaggtggcctctggtggttccaggatctcacggtatccgatcccatctacatattaccactggcagtcactgctacaatgtgggctgttcttgagctaggtgctgagacaggtgtgcaaagttctgaccttcagtggatgagaaatgtcatcagaatgatgcccctgataaccttgcccataaccatgcatttccccacggcagtgtttatgtactggctctcctccaatttgttttccctggtccaagtatcctgtctccggattccagcagtacgcactgtacttaaaatcccccagcgtgttgtacatgacctggacaaattacctccacgggaaggcttcctagagagcttcaaaaaaggctggaaaaatgctgaaatgacgcgtcagctgcgagagcgtgaacaacgcatgcggaatcagttggagctagcagccaggggtcctttacgacagacctttacccacaaccctctcctacaacctggaaaggataaccctcccaatatccctagcagcagcagcaaaccaaagtcaaagtatccctggcacgacacacttggctgacttatgttctgtgcgcattctggcaggaattctgtctcttcagagactcatcctcaaaacaagacttgacactgtgtccttgccccagtcctaggaactgtggcacacagagatgttcattttaaaaacggatttcatgaaacactcttgtacttatgtttataagagagcactgggtagccaagtgatcttcccattcacagagttagtaaacctctgtactaca

SEQ ID NO: 296116 - DNA, 1633 bp, Homo sapiens
ccacaacttccccccttttccccccaaaaaaaaaggaaaattggaaaattaaccgggcaaaatggcgatgggactaatgtgcggacgccgggagcttctgcgcttgctacagtccgggcgtcgggtccacagcgtcgcagggccctcgcaatggcttgggaaaccgctgaccacacggctcctattcccagtagccccgtgctgctgtcgcccacactacctcttccttgcggcttccggcccccgcagcctcagtacctctgctatctcttttgcagaagtccaggttcaggcccctcctgttgttgctgcaactccctcacccacagcagtacctgaggtggcttctggagagactgcagatgtagtccaaactgctgcagagcagagcttcgctgaactggggctggggtcatacaccccagtgggactgatccagaatttactggaatttatgcatgttgatctgggcctaccttggtggggggccattgctgcatattacaaggcttcctcggagatggcactttaccagaaaaaacatggtattaaactctataaacctctcattctccctgtgactcaggtgagcaaaaacatttccttccttatttcatccagtacccatgaaatttcctctctgtgtttcatgtgtcccaggtcccccaaaaaacaggtggtggtggattatacatggctttcagtagtggggtgatgaaaatgttctctctggtaaagcatgctgacactgtttatcttgtgtaataggccccaatcttcatctccttcttcattgctttgagagagatggccaaccttcctgtgcccagcctgcagacaggtggcctctggtggttccaggatctcacggtatccgatcccatctacatattaccactggcagtcactgctacaatgtgggctgttcttgagctaggtgctgagacaggtgtgcaaagttctgaccttcagtggatgagaaatgtcatcagaatgatgcccctgataaccttgcccataaccatgcatttccccacggcagtgtttatgtactggctctcctccaatttgttttccctggtccaagtatcctgtctccggattccagcagtacgcactgtacttaaaatcccccagcgtgttgtacatgacctggacaaattacctccacgggaaggcttcctagagagcttcaaaaaaggctggaaaaatgctgaaatgacgcgtcagctgcgagagcgtgaacaacgcatgcggaatcagttggagctagcagccaggggtcctttacgacagacctttacccacaaccctctcctacaacctggaaaggataaccctcccaatatccctagcagcagcagcaaaccaaagtcaaagtatccctggcacgacacacttggctgacttatgttctgtgcgcattctggcaggaattctgtctcttcagagactcatcctcaaaacaagacttgacactgtgtccttgccccagtcctaggaactgtggcacacagagatgttcattttaaaaacggatttcatgaaacactcttgtacttatgtttataagagagcactgggtagccaagtgatcttcccattcacagagttagtaaacctctgtactaca

SEQ ID NO: 296117 - DNA, 1013 bp, Homo sapiens
  misc_feature (4)..(4): n is a, c, g, or t
  misc_feature (18)..(18): n is a, c, g, or t
  misc_feature (23)..(23): n is a, c, g, or t
ctgnggaagagggatatngggancgggttatcctttcaagttagcaggagaccatattgagtattacaaggcttcctcggagatggcactttaccagaaaaaacatggtattaaactctataaacctctcattctccctgtgactcaggccccaatcttcatctccttcttcattgctttgagagagatggccaaccttcctgtgcccagcctgcagacaggtggcctctggtggttccaggatctcacggtatccgatcccatctacatattaccactggcagtcactgctacaatgtgggctgttcttgagctaggtgctgagacaggtgtgcaaagttctgaccttcagtggatgagaaatgtcatcagaatgatgcccctgataaccttgcccataaccatgcatttccccacggcagtgtttatgtactggctctcctccaatttgttttccctggtccaagtatcctgtctccggattccagcagtacgcactgtacttaaaatcccccagcgtgttgtacatgacctggacaaattacctccacgggaaggcttcctagagagcttcaaaaaaggctggaaaaatgctgaaatgacgcgtcagctgcgagagcgtgaacaacgcatgcggaatcagttggagctagcagccaggggtcctttacgacagacctttacccacaaccctctcctacaacctggaaaggataaccctcccaatatccctagcagcagcagcaaaccaaagtcaaagtatccctggcacgacacacttggctgacttatgttctgtgcgcattctggcaggaattctgtctcttcagagactcatcctcaaaacaagacttgacactgtgtccttgccccagtcctaggaactgtggcacacagagatgttcattttaaaaacggatttcatgaaacactcttgtacttatgtttataagagagcactgggtagccaagtgatcttcccattcacagagttagtaaacctctgtactaca

SEQ ID NO: 296118 - DNA, 889 bp, Homo sapiens
gcttcctcggagatggcactttaccagaaaaaacatggtattaaactctataaacctctcattctccctgtgttcaggcccctcctgttgttgctgcaactccctcacccacagcagtacctgaggtggcttctggagagactgcagatgtagtccaaactgctgcagagcagagcttcgctgaactggggctggggtcatacaccccagtgggactgatccagaatttactggaatttatgcatgttgatctgggcctaccttggtggggggccattgctgcatgtacagtctttgcccgctgcctgatttttcctctcatcgtgacgggccagcgagaggcagccaggatccacaatcacttgccagagatccagaagttttccagtcgaatcagagaggccaagttagcaggagaccatattgagtgaaggcttcctagagagcttcaaaaaaggctggaaaaatgctgaaatgacgcgtcagctgcgagagcgtgaacaacgcatgcggaatcagttggagctagcagccaggggtcctttacgacagacctttacccacaaccctctcctacaacctggaaaggataaccctcccaatatccctagcagcagcagcaaaccaaagtcaaagtatccctggcacgacacacttggctgacttatgttctgtgcgcattctggcaggaattctgtctcttcagagactcatcctcaaaacaagacttgacactgtgtccttgccccagtcctaggaactgtggcacacagagatgttcattttaaaaacggatttcatgaaacactcttgtacttatgtttataagagagcactgggtagccaagtgatcttcccattcacagagttagtaaacctctgtactaca

SEQ ID NO: 296119 - DNA, 1035 bp, Homo sapiens
  misc_feature (78)..(78): n is a, c, g, or t
atggtaacgtggctttacagatttttacccacttcaaatatggccgccaagctccgttctcttttaccgcctgatctncggctacaattctggcttcatgcccgcctccaaaagtgcttcctctcgaggggttgtggttcttactgcgcaggcgcaaaagcaagtcctcttccgccgggcaaaatggcgatgggactaatgtgcggacgccgggagcttctgcgcttgctacagtccgggcgtcgggtccacagcgtcgcagggccctcgcaatggcttgggaaaccgctgaccacacggctcctattcccagtagccccgtgctgctgtcgcccacactacctcttccttgcggcttccggcccccgcagcctcagtacctctgctatctcttttgcagaagtccaggttcaggcccctcctgttgttgctgcaactccctcacccacagcagtacctgaggtggcttctggagagactgcagatgtagtccaaactgctgcagagcagagcttcgctgaactggggctggggtcatacaccccagtgggactgatccagaatttactggaatttatgcatgttgatctgggcctaccttggtggggggccattgctgcatgtacagtctttgcccgctgcctgatttttcctctcatcgtgacgggccagcgagaggcagccaggatccacaatcacttgccagagatccagaagttttccagtcgaatcagagaggccaagttagcaggagaccatattgagtattacaaggcttcctcggagatggcactttaccagaaaaaacatggtattaaactctataaacctctcattctccctgtgactcagcccccaatcttcatctccttcttcattggtttgaggaacagtgggctccttgtgggtcccaggaatctcacggaatccgatcccatctaaatattaaccaatggctgatcacctgggaacattgtggctggctcttgggcaacgggccgaacagggtgtgaaaggttctgccttcaatggctg

SEQ ID NO: 296120 - DNA, 1363 bp, Homo sapiens
  misc_feature (78)..(78): n is a, c, g, or t
atggtaacgtggctttacagatttttacccacttcaaatatggccgccaagctccgttctcttttaccgcctgatctncggctacaattctggcttcatgcccgcctccaaaagtgcttcctctcgaggggttgtggttcttactgcgcaggcgcaaaagcaagtcctcttccgccgggcaaaatggcgatgggactaatgtgcggacgccgggagcttctgcgcttgctacagtccgggcgtcgggtccacagcgtcgcagggccctcgcaatggcttgggaaaccgctgaccacacggctcctattcccagtagccccgtgctgctgtcgcccacactacctcttccttgcggcttccggcccccgcagcctcagtacctctgctatctcttttgcagaagtccaggttcaggcccctcctgttgttgctgcaactccctcacccacagcagtacctgaggtggcttctggagagactgcagatgtagtccaaactgctgcagagcagagcttcgctgaactggggctggggtcatacaccccagtgggactgatccagaatttactggaatttatgcatgttgatctgggcctaccttggtggggggccattgctgcatgtacagtctttgcccgctgcctgatttttcctctcatcgtgacgggccagcgagaggcagccaggatccacaatcacttgccagagatccagaagttttccagtcgaatcagagaggccaagttagcaggagaccatattgagtattacaaggcttcctcggagatggcactttaccagaaaaaacatggtattaaactctataaacctctcattctccctgtgactcaggtgagcaaaaacatttccttccttatttcatccagtacccatgaaatttcctctctgtgtttcatgtgtcccaggtcccccaaaaaacaggtggtggtggattatacatggctttcagtagtggggtgatgaaaatgttctctctggtaaagcatgctgacactgtttatcttgtgtaataggccccaatcttcatctccttcttcattgctttgagagagatggccaaccttcctgtgcccagcctgcagacaggtggcctctggtggttccaggatctcacggtatccgatcccatctacatattaccactggcagtcactgctacaatgtgggctgttcttgaggtaagcccagattggccaagtgccaggcctgcaaagtgaactgggattggagggtaaagtagttgtacagaatggtcatccttcacttgctggagaaagagttgatgggtaagagattagagacagattcactgaaactgacagctttcccgacttttccaccc

SEQ ID NO: 296121 - DNA, 509 bp, Homo sapiens
ccacaacttccccccttttccccccaaaaaaaaaggaaaattggaaaattaaccgggcaaaatggcgatgggactaatgtgcggacgccgggagcttctgcgcttgctacagtccgggcgtcgggtccacagcgtcgcagggccctcgcaatggcttgggaaaccgctgaccacacggctcctattcccagtagccccgtgctgctgtcgcccacactacctcttccttgcggcttccggcccccgcagcctcagtacctctgctatctcttttgcagaagtccaggttcaggcccctcctgttgttgctgcaactccctcacccacagcagtacctgaggtggcttctggagagactgcagatgtagtccaaactgctgcagaaacaaaaaactttcgctgaaacttggggggctggggggtctataacccccccaaggtgggaactggtccccaaaaatttccttgggaattttattcgcccttgttggaaaccgcggggggggcgc

SEQ ID NO: 296122 - DNA, 438 bp, Homo sapiens
tttactcatatcacctcattcgaactgccagtaacataattgctaaatccactcctgtcagctttttgtttgaggaaacaaacaggattcctaatcatctgcttagagaagttaatgccatacttttgtgatgccaaattagagaactgagccttaaagcaactaattcattcccctgaccttatttctgggcctcttaggcatgagtcatagaatggacaaggcaagaataagaccctttcagtaaggacctaaaagccttcaaccttctagctgcagaactgctttaatttcactccaatcctagtttgtattttccaggtacagtctttgcccgctgcctgatttttcctctcatcgtgacgggccagcgagaggcagccaggatccacaatcacttgccagagatccagaagttttccagtcgaatcagagagg

SEQ ID NO: 296123 - DNA, 1067 bp, Homo sapiens
gcgcagctccgagggctggcggctcggggcgccgaggcttccgcgcccgctggttcctcgctccggggcggagctcgcgatagcgaccgggagcagggcgcggggcgggacccaggtccgaggcgaggaagccggaagccaggcgcggggagcctcccccttcgactgcagcctcgctccgtgccttctgcgcgcctgggatcccggagcctgcctaggttctgtgcgctcccgcccaggccggtgcccgccgcccgcctgcgccccaggcaggtcccaggcctccggctgctcccggccgaagccccgagtgcgagatcgagcgtcctgagcgcctgaccgcagccctggatcgcctgcggcagcgcggcctggaacagaggtgtctgcggttgtcagcccgcgaggcctcggaagaggagctgggcctggtgcacagagtacctttcactgcgcgcggctggccgcaggggctggactgcagctggtggacgctgtgctcactggagctgtgcaaaatgggcttgccctggtgaggcctcccgggcaccatggccagagggcggctgccaacgggttctgcgtgttcaacaacgtggccatagcagctgcacatgccaagcagaaacacgggctacacaggatcctcgtcgtggactgggatgtgcaccatggccaggggatccagtatctctttgaggatgaccccagcgtcctttacttctcctggcaccgctatgagcatgggcgcttctggcctttcctgcgagagtcagatgcagacgcagtggggcggggacagggcctcggcttcactgtcaacctgccctggaaccagtggatgggcaacgctgactacgtggtgcttctgactggtgtccagtggcttgagggcaatgaggcagcaagtgtttcgccactcaacagtgctggagtgtgccggggcggtctgtgcgtgctgaggcggtacacctggagtcgggggagcacggcttaaacaactgttgtggccgcccctgttggaatggcatgatctaaaccccaagcggtgccacctgaacccaatg

SEQ ID NO: 296124 - DNA, 2704 bp, Homo sapiens
gcgcagctccgagggctggcggctcggggcgccgaggcttccgcgcccgctggttcctcgctccggggcggagctcgcgatagcgaccgggagcagggcgcggggcgggacccaggtccgaggcgaggaagccggaagccaggcgcggggagcctcccccttcgactgcagcctcgctccgtgccttctgcgcgcctgggatcccggagcctgcctaggttctgtgcgctcccgcccaggccggtgcccgccgcccgcctgcgccccaggcaggtcccaggcctccggctgctcccggccgaaggtggggacaggcagtggcaggcaccactagcgagggcgtttgggaacccagggtgaccacggcgcagccatggggaccgcgcttgtgtaccatgaggacatgacggccacccggctgctctgggacgaccccgagtgcgagatcgagcgtcctgagcgcctgaccgcagccctggatcgcctgcggcagcgcggcctggaacagaggtgtctgcggttgtcagcccgcgaggcctcggaagaggagctgggcctggtgcacagcccagagtatgtatccctggtcagggagacccaggtcctaggcaaggaggagctgcaggcgctgtccggacagttcgacgccatctacttccacccgagtacctttcactgcgcgcggctggccgcaggggctggactgcagctggtggacgctgtgctcactggagctgtgcaaaatgggcttgccctggtgaggcctcccgggcaccatggccagagggcggctgccaacgggttctgcgtgttcaacaacgtggccatagcagctgcacatgccaagcagaaacacgggctacacaggatcctcgtcgtggactgggatgtgcaccatggccaggggatccagtatctctttgaggatgaccccagcgtcctttacttctcctggcaccgctatgagcatgggcgcttctggcctttcctgcgagagtcagatgcagacgcagtggggcggggacagggcctcggcttcactgtcaacctgccctggaaccaggttgggatgggaaacgctgactacgtggctgccttcctgcacctgctgctcccactggcctttgagtttgaccctgagctggtgctggtctcggcaggatttgactcagccatcggggaccctgaggggcaaatgcaggccacgccagagtgcttcgcccacctcacacagctgctgcaggtgctggccggcggccgggtctgtgccgtgctggagggcggctaccacctggagtcactggcggagtcagtgtgcatgacagtacagacgctgctgggtgacccggccccacccctgtcagggccaatggcgccatgtcagagtgccctagagtccatccagagtgcccgtgctgcccaggccccgcactggaagagcctccagcagcaagatgtgaccgctgtgccgatgagccccagcagccactccccagaggggaggcctccacctctgctgcctgggggtccagtgtgtaaggcagctgcatctgcaccgagctccctcctggaccagccgtgcctctgccccgcaccctctgtccgcaccgctgttgccctgacaacgccggatatcacattggttctgccccctgacgtcatccaacaggaagcgtcagccctgagggaggagacagaagcctgggccaggccacacgagtccctggcccgggaggaggccctcactgcacttgggaagctcctgtacctcttagatgggatgctggatgggcaggtgaacagtggtatagcagccactccagcctctgctgcagcagccaccctggatgtggctgttcggagaggcctgtcccacggagcccagaggctgctgtgcgtggccctgggacagctggaccggcctccagacctcgcccatgacgggaggagtctgtggctgaacatcaggggcaaggaggcggctgccctatccatgttccatgtctccacgccactgccagtgatgaccggtggtttcctgagctgcatcttgggcttggtgctgcccctggcctatggcttccagcctgacctggtgctggtggcgctggggcctggccatggcctgcagggcccccacgctgcactcctggctgcaatgcttcgggggctggcagggggccgagtcctggccctcctggaggagaactccacaccccagctagcagggatcctggcccgggtgctgaatggagaggcacctcctagcctaggcccttcctctgtggcctccccagaggacgtccaggccctgatgtacctgagagggcagctggagcctcagtggaagatgttgcagtgccatcctcacctggtggcttgaaatcggccaaggtgggagcatttacaccgcagaaatgacaccgcacgccagcgccccgcggccgcgatccggaccccaagcccacggctccctcgactctggggcacggaaccccgcccactcccaatccccgcgccccgccctctcccacccgtgcttcccccgctccacccctcacctcacctcgcccccgccccacccatcgcgccccggcccgtcccatcgaggcccatgcaacccacgctcggtcccgttccggcccctgcgccccgctgcgcttcgctccccgcccttgcgccgttagtaaacatcgctcaaacg

SEQ ID NO: 296125 - DNA, 2683 bp, Homo sapiens
  misc_feature (2648)..(2648): n is a, c, g, or t
gcgcagctccgagggctggcggctcggggcgccgaggcttccgcgcccgctggttcctcgctccggggcggagctcgcgatagcgaccgggagcagggcgcggggcgggacccaggtccgaggcgaggaagccggaagccaggcgcggggagcctcccccttcgactgcagcctcgctccgtgccttctgcgcgcctgggatcccggagcctgcctaggttctgtgcgctcccgcccaggccggtgcccgccgcccgcctgcgccccaggcaggtcccaggcctccggctgctcccggccgaaggtggggacaggcagtggcaggcaccactagcgagggcgtttgggaacccagggtgaccacggcgcagccatggggaccgcgcttgtgtaccatgaggacatgacggccacccggctgctctgggacgaccccgagtgcgagatcgagcgtcctgagcgcctgaccgcagccctggatcgcctgcggcagcgcggcctggaacagaggtgtctgcggttgtcagcccgcgaggcctcggaagaggagctgggcctggtgcacagcccagagtatgtatccctggtcagggagacccaggtcctaggcaaggaggagctgcaggcgctgtccggacagttcgacgccatctacttccacccgagtacctttcactgcgcgcggctggccgcaggggctggactgcagctggtggacgctgtgctcactggagctgtgcaaaatgggcttgccctggtgaggcctcccgggcaccatggccagagggcggctgccaacgggttctgcgtgttcaacaacgtggccatagcagctgcacatgccaagcagaaacacgggctacacaggatcctcgtcgtggactgggatgtgcaccatggccaggggatccagtatctctttgaggatgaccccagcgtcctttacttctcctggcaccgctatgagcatgggcgcttctggcctttcctgcgagagtcagatgcagacgcagtggggcggggacagggcctcggcttcactgtcaacctgccctggaaccaggttgggatgggaaacgctgactacgtggctgccttcctgcacctgctgctcccactggcctttgagtttgaccctgagctggtgctggtctcggcaggatttgactcagccatcggggaccctgaggggcaaatgcaggccacgccagagtgcttcgcccacctcacacagctgctgcaggtgctggccggcggccgggtctgtgccgtgctggagggcggctaccacctggagtcactggcggagtcagtgtgcatgacagtacagacgctgctgggtgacccggccccacccctgtcagggccaatggcgccatgtcagagtgccctagagtccatccagagtgcccgtgctgcccaggccccgcactggaagagcctccagcagcaagatgtgaccgctgtgccgatgagccccagcagccactccccagaggggaggcctccacctctgctgcctgggggtccagtgtgtaaggcagctgcatctgcaccgagctccctcctggaccagccgtgcctctgccccgcaccctctgtccgcaccgctgttgccctgacaacgccggatatcacattggttctgccccctgacgtcatccaacaggaagcgtcagccctgagggaggagacagaagcctgggccaggccacacgagtccctggcccgggaggaggccctcactgcacttgggaagctcctgtacctcttagatgggatgctggatgggcaggtgaacagtggtatagcagccactccagcctctgctgcagcagccaccctggatgtggctgttcggagaggcctgtcccacggagcccagaggctgctgtgcgtggccctgggacagctggaccggcctccagacctcgcccatgacgggaggagtctgtggctgaacatcaggggcaaggaggcggctgccctatccatgttccatgtctccacgccactgccagtgatgaccggtggtttcctgagctgcatcttgggcttggtgctgcccctggcctatggcttccagcctgacctggtgctggtggcgctggggcctggccatggcctgcagggcccccacgctgcactcctggctgcaatgcttcgggggctggcagggggccgagtcctggccctcctggaggagaactccacaccccagctagcagggatcctggcccgggtgctgaatggagaggcacctcctagcctaggcccttcctctgtggcctccccagaggacgtccaggccctgatgtacctgagagggcagctggagcctcagtggaagatgttgcagtgccatcctcacctggtggcttgaaatcggccaaggtgggagcatttacaccgcagaaatgacaccgcacgccagcgccccgcggccgcgatccggaccccaagcccacggctccctcgactctggggcacggaaccccgcccactcccaatccccgcgccccgccctctcccacccgtgcttcccccgctccaccctacctactgccccgccaccatggcccgccgtccatgagccagcaccagctcgtcaagtcgccggcccgctgcgcttatgactccccgcgccnttgcgcccgttaggaaaaccttgaaccgtcggtcc

SEQ ID NO: 296126 - DNA, 2644 bp, Homo sapiens
gcgcagctccgagggctggcggctcggggcgccgaggcttccgcgcccgctggttcctcgctccggggcggagctcgcgatagcgaccgggagcagggcgcggggcgggacccaggtccgaggcgaggaagccggaagccaggcgcggggagcctcccccttcgactgcagcctcgctccgtgccttctgcgcgcctgggatcccggagcctgcctaggttctgtgcgctcccgcccaggccggtgcccgccgcccgcctgcgccccaggcaggtcccaggcctccggctgctcccggccgaaggtggggacaggcagtggcaggcaccactagcgagggcgtttgggaacccagggtgaccacggcgcagccatggggaccgcgcttgtgtaccatgaggacatgacggccacccggctgctctgggacgaccccgagtgcgagatcgagcgtcctgagcgcctgaccgcagccctggatcgcctgcggcagcgcggcctggaacagaggtgtctgcggttgtcagcccgcgaggcctcggaagaggagctgggcctggtgcacagcccagagtatgtatccctggtcagggagacccaggtcctaggcaaggaggagctgcaggcgctgtccggacagttcgacgccatctacttccacccgagtacctttcactgcgcgcggctggccgcaggggctggactgcagctggtggacgctgtgctcactggagctgtgcaaaatgggcttgccctggtgaggcctcccgggcaccatggccagagggcggctgccaacgggttctgcgtgttcaacaacgtggccatagcagctgcacatgccaagcagaaacacgggctacacaggatcctcgtcgtggactgggatgtgcaccatggccaggggatccagtatctctttgaggatgaccccagcgtcctttacttctcctggcaccgctatgagcatgggcgcttctggcctttcctgcgagagtcagatgcagacgcagtggggcggggacagggcctcggcttcactgtcaacctgccctggaaccaggttgggatgggaaacgctgactacgtggctgccttcctgcacctgctgctcccactggcctttgaggggcaaatgcaggccacgccagagtgcttcgcccacctcacacagctgctgcaggtgctggccggcggccgggtctgtgccgtgctggagggcggctaccacctggagtcactggcggagtcagtgtgcatgacagtacagacgctgctgggtgacccggccccacccctgtcagggccaatggcgccatgtcagagtgccctagagtccatccagagtgcccgtgctgcccaggccccgcactggaagagcctccagcagcaagatgtgaccgctgtgccgatgagccccagcagccactccccagaggggaggcctccacctctgctgcctgggggtccagtgtgtaaggcagctgcatctgcaccgagctccctcctggaccagccgtgcctctgccccgcaccctctgtccgcaccgctgttgccctgacaacgccggatatcacattggttctgccccctgacgtcatccaacaggaagcgtcagccctgagggaggagacagaagcctgggccaggccacacgagtccctggcccgggaggaggccctcactgcacttgggaagctcctgtacctcttagatgggatgctggatgggcaggtgaacagtggtatagcagccactccagcctctgctgcagcagccaccctggatgtggctgttcggagaggcctgtcccacggagcccagaggctgctgtgcgtggccctgggacagctggaccggcctccagacctcgcccatgacgggaggagtctgtggctgaacatcaggggcaaggaggcggctgccctatccatgttccatgtctccacgccactgccagtgatgaccggtggtttcctgagctgcatcttgggcttggtgctgcccctggcctatggcttccagcctgacctggtgctggtggcgctggggcctggccatggcctgcagggcccccacgctgcactcctggctgcaatgcttcgggggctggcagggggccgagtcctggccctcctggaggagaactccacaccccagctagcagggatcctggcccgggtgctgaatggagaggcacctcctagcctaggcccttcctctgtggcctccccagaggacgtccaggccctgatgtacctgagagggcagctggagcctcagtggaagatgttgcagtgccatcctcacctggtggcttgaaatcggccaaggtgggagcatttacaccgcagaaatgacaccgcacgccagcgccccgcggccgcgatccggaccccaagcccacggctccctcgactctggggcacggaaccccgcccactcccaatccccgcgccccgccctctcccacccgtgcttcccccgctccacccctcacctcacctcgcccccgccccacccatcgcgccccggcccgtcccatcgaggcccatgcaacccacgctcggtcccgttccggcccctgcgccccgctgcgcttcgctccccgcccttgcgccgttagtaaacatcgctcaaacg

SEQ ID NO: 296127 - DNA, 2576 bp, Homo sapiens
gcgcagctccgagggctggcggctcggggcgccgaggcttccgcgcccgctggttcctcgctccggggcggagctcgcgatagcgaccgggagcagggcgcggggcgggacccaggtccgaggcgaggaagccggaagccaggcgcggggagcctcccccttcgactgcagcctcgctccgtgccttctgcgcgcctgggatcccggagcctgcctaggttctgtgcgctcccgcccaggccggtgcccgccgcccgcctgcgccccaggcaggtcccaggcctccggctgctcccggccgaagccccgagtgcgagatcgagcgtcctgagcgcctgaccgcagccctggatcgcctgcggcagcgcggcctggaacagaggtgtctgcggttgtcagcccgcgaggcctcggaagaggagctgggcctggtgcacagcccagagtatgtatccctggtcagggagacccaggtcctaggcaaggaggagctgcaggcgctgtccggacagttcgacgccatctacttccacccgagtacctttcactgcgcgcggctggccgcaggggctggactgcagctggtggacgctgtgctcactggagctgtgcaaaatgggcttgccctggtgaggcctcccgggcaccatggccagagggcggctgccaacgggttctgcgtgttcaacaacgtggccatagcagctgcacatgccaagcagaaacacgggctacacaggatcctcgtcgtggactgggatgtgcaccatggccaggggatccagtatctctttgaggatgaccccagcgtcctttacttctcctggcaccgctatgagcatgggcgcttctggcctttcctgcgagagtcagatgcagacgcagtggggcggggacagggcctcggcttcactgtcaacctgccctggaaccaggttgggatgggaaacgctgactacgtggctgccttcctgcacctgctgctcccactggcctttgagtttgaccctgagctggtgctggtctcggcaggatttgactcagccatcggggaccctgaggggcaaatgcaggccacgccagagtgcttcgcccacctcacacagctgctgcaggtgctggccggcggccgggtctgtgccgtgctggagggcggctaccacctggagtcactggcggagtcagtgtgcatgacagtacagacgctgctgggtgacccggccccacccctgtcagggccaatggcgccatgtcagagtgccctagagtccatccagagtgcccgtgctgcccaggccccgcactggaagagcctccagcagcaagatgtgaccgctgtgccgatgagccccagcagccactccccagaggggaggcctccacctctgctgcctgggggtccagtgtgtaaggcagctgcatctgcaccgagctccctcctggaccagccgtgcctctgccccgcaccctctgtccgcaccgctgttgccctgacaacgccggatatcacattggttctgccccctgacgtcatccaacaggaagcgtcagccctgagggaggagacagaagcctgggccaggccacacgagtccctggcccgggaggaggccctcactgcacttgggaagctcctgtacctcttagatgggatgctggatgggcaggtgaacagtggtatagcagccactccagcctctgctgcagcagccaccctggatgtggctgttcggagaggcctgtcccacggagcccagaggctgctgtgcgtggccctgggacagctggaccggcctccagacctcgcccatgacgggaggagtctgtggctgaacatcaggggcaaggaggcggctgccctatccatgttccatgtctccacgccactgccagtgatgaccggtggtttcctgagctgcatcttgggcttggtgctgcccctggcctatggcttccagcctgacctggtgctggtggcgctggggcctggccatggcctgcagggcccccacgctgcactcctggctgcaatgcttcgggggctggcagggggccgagtcctggccctcctggaggagaactccacaccccagctagcagggatcctggcccgggtgctgaatggagaggcacctcctagcctaggcccttcctctgtggcctccccagaggacgtccaggccctgatgtacctgagagggcagctggagcctcagtggaagatgttgcagtgccatcctcacctggtggcttgaaatcggccaaggtgggagcatttacaccgcagaaatgacaccgcacgccagcgccccgcggccgcgatccggaccccaagcccacggctccctcgactctggggcacggaaccccgcccactcccaatccccgcgccccgccctctcccacccgtgcttcccccgctccacccctcacctcacctcgcccccgccccacccatcgcgccccggcccgtcccatcgaggcccatgcaacccacgctcggtcccgttccggcccctgcgccccgctgcgcttcgctccccgcccttgcgccgttagtaaacatcgctcaaacg

SEQ ID NO: 296128 - DNA, 2607 bp, Homo sapiens
gcgcagctccgagggctggcggctcggggcgccgaggcttccgcgcccgctggttcctcgctccggggcggagctcgcgatagcgaccgggagcagggcgcggggcgggacccaggtccgaggcgaggaagccggaagccaggcgcggggagcctcccccttcgactgcagcctcgctccgtgccttctgcgcgcctgggatcccggagcctgcctaggttctgtgcgctcccgcccaggccggtgcccgccgcccgcctgcgccccaggcaggtcccaggcctccggctgctcccggccgaaggtggggacaggcagtggcaggcaccactagcgagggcgtttgggaacccagggtgaccacggcgcagccatggggaccgcgcttgtgtaccatgaggacatgacggccacccggctgctctgggacgaccccgagtgcgagatcgagcgtcctgagcgcctgaccgcagccctggatcgcctgcggcagcgcggcctggaacagaggtgtctgcggttgtcagcccgcgaggcctcggaagaggagctgggcctggtgcacagagtacctttcactgcgcgcggctggccgcaggggctggactgcagctggtggacgctgtgctcactggagctgtgcaaaatgggcttgccctggtgaggcctcccgggcaccatggccagagggcggctgccaacgggttctgcgtgttcaacaacgtggccatagcagctgcacatgccaagcagaaacacgggctacacaggatcctcgtcgtggactgggatgtgcaccatggccaggggatccagtatctctttgaggatgaccccagcgtcctttacttctcctggcaccgctatgagcatgggcgcttctggcctttcctgcgagagtcagatgcagacgcagtggggcggggacagggcctcggcttcactgtcaacctgccctggaaccaggttgggatgggaaacgctgactacgtggctgccttcctgcacctgctgctcccactggcctttgagtttgaccctgagctggtgctggtctcggcaggatttgactcagccatcggggaccctgaggggcaaatgcaggccacgccagagtgcttcgcccacctcacacagctgctgcaggtgctggccggcggccgggtctgtgccgtgctggagggcggctaccacctggagtcactggcggagtcagtgtgcatgacagtacagacgctgctgggtgacccggccccacccctgtcagggccaatggcgccatgtcagagtgccctagagtccatccagagtgcccgtgctgcccaggccccgcactggaagagcctccagcagcaagatgtgaccgctgtgccgatgagccccagcagccactccccagaggggaggcctccacctctgctgcctgggggtccagtgtgtaaggcagctgcatctgcaccgagctccctcctggaccagccgtgcctctgccccgcaccctctgtccgcaccgctgttgccctgacaacgccggatatcacattggttctgccccctgacgtcatccaacaggaagcgtcagccctgagggaggagacagaagcctgggccaggccacacgagtccctggcccgggaggaggccctcactgcacttgggaagctcctgtacctcttagatgggatgctggatgggcaggtgaacagtggtatagcagccactccagcctctgctgcagcagccaccctggatgtggctgttcggagaggcctgtcccacggagcccagaggctgctgtgcgtggccctgggacagctggaccggcctccagacctcgcccatgacgggaggagtctgtggctgaacatcaggggcaaggaggcggctgccctatccatgttccatgtctccacgccactgccagtgatgaccggtggtttcctgagctgcatcttgggcttggtgctgcccctggcctatggcttccagcctgacctggtgctggtggcgctggggcctggccatggcctgcagggcccccacgctgcactcctggctgcaatgcttcgggggctggcagggggccgagtcctggccctcctggaggagaactccacaccccagctagcagggatcctggcccgggtgctgaatggagaggcacctcctagcctaggcccttcctctgtggcctccccagaggacgtccaggccctgatgtacctgagagggcagctggagcctcagtggaagatgttgcagtgccatcctcacctggtggcttgaaatcggccaaggtgggagcatttacaccgcagaaatgacaccgcacgccagcgccccgcggccgcgatccggaccccaagcccacggctccctcgactctggggcacggaaccccgcccactcccaatccccgcgccccgccctctcccacccgtgcttcccccgctccacccctcacctcacctcgcccccgccccacccatcgcgccccggcccgtcccatcgaggcccatgcaacccacgctcggtcccgttccggcccctgcgccccgctgcgcttcgctccccgcccttgcgccgttagtaaacatcgctcaaacg

SEQ ID NO: 296129 - DNA, 2479 bp, Homo sapiens
gcgcagctccgagggctggcggctcggggcgccgaggcttccgcgcccgctggttcctcgctccggggcggagctcgcgatagcgaccgggagcagggcgcggggcgggacccaggtccgaggcgaggaagccggaagccaggcgcggggagcctcccccttcgactgcagcctcgctccgtgccttctgcgcgcctgggatcccggagcctgcctaggttctgtgcgctcccgcccaggccggtgcccgccgcccgcctgcgccccaggcaggtcccaggcctccggctgctcccggccgaagccccgagtgcgagatcgagcgtcctgagcgcctgaccgcagccctggatcgcctgcggcagcgcggcctggaacagaggtgtctgcggttgtcagcccgcgaggcctcggaagaggagctgggcctggtgcacagagtacctttcactgcgcgcggctggccgcaggggctggactgcagctggtggacgctgtgctcactggagctgtgcaaaatgggcttgccctggtgaggcctcccgggcaccatggccagagggcggctgccaacgggttctgcgtgttcaacaacgtggccatagcagctgcacatgccaagcagaaacacgggctacacaggatcctcgtcgtggactgggatgtgcaccatggccaggggatccagtatctctttgaggatgaccccagcgtcctttacttctcctggcaccgctatgagcatgggcgcttctggcctttcctgcgagagtcagatgcagacgcagtggggcggggacagggcctcggcttcactgtcaacctgccctggaaccaggttgggatgggaaacgctgactacgtggctgccttcctgcacctgctgctcccactggcctttgagtttgaccctgagctggtgctggtctcggcaggatttgactcagccatcggggaccctgaggggcaaatgcaggccacgccagagtgcttcgcccacctcacacagctgctgcaggtgctggccggcggccgggtctgtgccgtgctggagggcggctaccacctggagtcactggcggagtcagtgtgcatgacagtacagacgctgctgggtgacccggccccacccctgtcagggccaatggcgccatgtcagagtgccctagagtccatccagagtgcccgtgctgcccaggccccgcactggaagagcctccagcagcaagatgtgaccgctgtgccgatgagccccagcagccactccccagaggggaggcctccacctctgctgcctgggggtccagtgtgtaaggcagctgcatctgcaccgagctccctcctggaccagccgtgcctctgccccgcaccctctgtccgcaccgctgttgccctgacaacgccggatatcacattggttctgccccctgacgtcatccaacaggaagcgtcagccctgagggaggagacagaagcctgggccaggccacacgagtccctggcccgggaggaggccctcactgcacttgggaagctcctgtacctcttagatgggatgctggatgggcaggtgaacagtggtatagcagccactccagcctctgctgcagcagccaccctggatgtggctgttcggagaggcctgtcccacggagcccagaggctgctgtgcgtggccctgggacagctggaccggcctccagacctcgcccatgacgggaggagtctgtggctgaacatcaggggcaaggaggcggctgccctatccatgttccatgtctccacgccactgccagtgatgaccggtggtttcctgagctgcatcttgggcttggtgctgcccctggcctatggcttccagcctgacctggtgctggtggcgctggggcctggccatggcctgcagggcccccacgctgcactcctggctgcaatgcttcgggggctggcagggggccgagtcctggccctcctggaggagaactccacaccccagctagcagggatcctggcccgggtgctgaatggagaggcacctcctagcctaggcccttcctctgtggcctccccagaggacgtccaggccctgatgtacctgagagggcagctggagcctcagtggaagatgttgcagtgccatcctcacctggtggcttgaaatcggccaaggtgggagcatttacaccgcagaaatgacaccgcacgccagcgccccgcggccgcgatccggaccccaagcccacggctccctcgactctggggcacggaaccccgcccactcccaatccccgcgccccgccctctcccacccgtgcttcccccgctccacccctcacctcacctcgcccccgccccacccatcgcgccccggcccgtcccatcgaggcccatgcaacccacgctcggtcccgttccggcccctgcgccccgctgcgcttcgctccccgcccttgcgccgttagtaaacatcgctcaaacg

SEQ ID NO: 296130 - DNA, 2788 bp, Homo sapiens
gcgcagctccgagggctggcggctcggggcgccgaggcttccgcgcccgctggttcctcgctccggggcggagctcgcgatagcgaccgggagcagggcgcggggcgggacccaggtccgaggcgaggaagccggaagccaggcgcggggagcctcccccttcgactgcagcctcgctccgtgccttctgcgcgcctgggatcccggagcctgcctaggttctgtgcgctcccgcccaggccggtgcccgccgcccgcctgcgccccaggcaggtcccaggcctccggctgctcccggccgaagccccgagtgcgagatcgagcgtcctgagcgcctgaccgcagccctggatcgcctgcggcagcgcggcctggaacagaggtgtctgcggttgtcagcccgcgaggcctcggaagaggagctgggcctggtgcacagcccagagtatgtatccctggtcagggagacccaggtcctaggcaaggaggagctgcaggcgctgtccggacagttcgacgccatctacttccacccgagtacctttcactgcgcgcggctggccgcaggggctggactgcagctggtggacgctgtgctcactggagctgtgcaaaatgggcttgccctggtgaggcctcccgggcaccatggccagagggcggctgccaacgggttctgcgtgttcaacaacgtggccatagcagctgcacatgccaagcagaaacacgggctacacaggatcctcgtcgtggactgggatgtgcaccatggccaggggatccagtatctctttgaggatgaccccagcgtcctttacttctcctggcaccgctatgagcatgggcgcttctggcctttcctgcgagagtcagatgcagacgcagtggggcggggacagggcctcggcttcactgtcaacctgccctggaaccaggttgggatgggaaacgctgactacgtggctgccttcctgcacctgctgctcccactggcctttgaggtgactgcacggagggctcccccagggcagccgggtgggagggggaccttgtgcctggagtgcgccagtgaaggcaggaggagggttatgagctgtcccactcctgtgtggctggggaaggtgctcaggaggggatgggatgggcctggctcgccctcacctgggctccagcccctctctgtcgaccctccccactccggcctggcctgtagtttgaccctgagctggtgctggtctcggcaggatttgactcagccatcggggaccctgaggggcaaatgcaggccacgccagagtgcttcgcccacctcacacagctgctgcaggtgctggccggcggccgggtctgtgccgtgctggagggcggctaccacctggagtcactggcggagtcagtgtgcatgacagtacagacgctgctgggtgacccggccccacccctgtcagggccaatggcgccatgtcagagtgccctagagtccatccagagtgcccgtgctgcccaggccccgcactggaagagcctccagcagcaagatgtgaccgctgtgccgatgagccccagcagccactccccagaggggaggcctccacctctgctgcctgggggtccagtgtgtaaggcagctgcatctgcaccgagctccctcctggaccagccgtgcctctgccccgcaccctctgtccgcaccgctgttgccctgacaacgccggatatcacattggttctgccccctgacgtcatccaacaggaagcgtcagccctgagggaggagacagaagcctgggccaggccacacgagtccctggcccgggaggaggccctcactgcacttgggaagctcctgtacctcttagatgggatgctggatgggcaggtgaacagtggtatagcagccactccagcctctgctgcagcagccaccctggatgtggctgttcggagaggcctgtcccacggagcccagaggctgctgtgcgtggccctgggacagctggaccggcctccagacctcgcccatgacgggaggagtctgtggctgaacatcaggggcaaggaggcggctgccctatccatgttccatgtctccacgccactgccagtgatgaccggtggtttcctgagctgcatcttgggcttggtgctgcccctggcctatggcttccagcctgacctggtgctggtggcgctggggcctggccatggcctgcagggcccccacgctgcactcctggctgcaatgcttcgggggctggcagggggccgagtcctggccctcctggaggagaactccacaccccagctagcagggatcctggcccgggtgctgaatggagaggcacctcctagcctaggcccttcctctgtggcctccccagaggacgtccaggccctgatgtacctgagagggcagctggagcctcagtggaagatgttgcagtgccatcctcacctggtggcttgaaatcggccaaggtgggagcatttacaccgcagaaatgacaccgcacgccagcgccccgcggccgcgatccggaccccaagcccacggctccctcgactctggggcacggaaccccgcccactcccaatccccgcgccccgccctctcccacccgtgcttcccccgctccacccctcacctcacctcgcccccgccccacccatcgcgccccggcccgtcccatcgaggcccatgcaacccacgctcggtcccgttccggcccctgcgccccgctgcgcttcgctccccgcccttgcgccgttagtaaacatcgctcaaacg

SEQ ID NO: 296131 - DNA, 2637 bp, Homo sapiens
gcgcagctccgagggctggcggctcggggcgccgaggcttccgcgcccgctggttcctcgctccggggcggagctcgcgatagcgaccgggagcagggcgcggggcgggacccaggtccgaggcgaggaagccggaagccaggcgcggggagcctcccccttcgactgcagcctcgctccgtgccttctgcgcgcctgggatcccggagcctgcctaggttctgtgcgctcccgcccaggccggtgcccgccgcccgcctgcgccccaggcaggtcccaggcctccggctgctcccggccgaaggtggggacaggcagtggcaggcaccactagcgagggcgtttgggaacccagggtgaccacggcgcagccatggggaccgcgcttgtgtaccatgaggacatgacggccacccggctgctctgggacgaccccgagtgcgagatcgagcgtcctgagcgcctgaccgcagccctggatcgcctgcggcagcgcggcctggaacagaggtgtctgcggttgtcagcccgcgaggcctcggaagaggagctgggcctggtgcacagagtacctttcactgcgcgcggctggccgcaggggctggactgcagctggtggacgctgtgctcactggagctgtgcaaaatgggcttgccctggtgaggcctcccgggcaccatggccagagggcggctgccaacgggttctgcgtgttcaacaacgtggccatagcagctgcacatgccaagcagaaacacgggctacacaggatcctcgtcgtggactgggatgtgcaccatggccaggggatccagtatctctttgaggatgaccccagcgtcctttacttctcctggcaccgctatgagcatgggcgcttctggcctttcctgcgagagtcagatgcagacgcagtggggcggggacagggcctcggcttcactgtcaacctgccctggaaccagttcaggatgtagcctgggatgtcctgccaggttgggatgggaaacgctgactacgtggctgccttcctgcacctgctgctcccactggcctttgagtttgaccctgagctggtgctggtctcggcaggatttgactcagccatcggggaccctgaggggcaaatgcaggccacgccagagtgcttcgcccacctcacacagctgctgcaggtgctggccggcggccgggtctgtgccgtgctggagggcggctaccacctggagtcactggcggagtcagtgtgcatgacagtacagacgctgctgggtgacccggccccacccctgtcagggccaatggcgccatgtcagagtgccctagagtccatccagagtgcccgtgctgcccaggccccgcactggaagagcctccagcagcaagatgtgaccgctgtgccgatgagccccagcagccactccccagaggggaggcctccacctctgctgcctgggggtccagtgtgtaaggcagctgcatctgcaccgagctccctcctggaccagccgtgcctctgccccgcaccctctgtccgcaccgctgttgccctgacaacgccggatatcacattggttctgccccctgacgtcatccaacaggaagcgtcagccctgagggaggagacagaagcctgggccaggccacacgagtccctggcccgggaggaggccctcactgcacttgggaagctcctgtacctcttagatgggatgctggatgggcaggtgaacagtggtatagcagccactccagcctctgctgcagcagccaccctggatgtggctgttcggagaggcctgtcccacggagcccagaggctgctgtgcgtggccctgggacagctggaccggcctccagacctcgcccatgacgggaggagtctgtggctgaacatcaggggcaaggaggcggctgccctatccatgttccatgtctccacgccactgccagtgatgaccggtggtttcctgagctgcatcttgggcttggtgctgcccctggcctatggcttccagcctgacctggtgctggtggcgctggggcctggccatggcctgcagggcccccacgctgcactcctggctgcaatgcttcgggggctggcagggggccgagtcctggccctcctggaggagaactccacaccccagctagcagggatcctggcccgggtgctgaatggagaggcacctcctagcctaggcccttcctctgtggcctccccagaggacgtccaggccctgatgtacctgagagggcagctggagcctcagtggaagatgttgcagtgccatcctcacctggtggcttgaaatcggccaaggtgggagcatttacaccgcagaaatgacaccgcacgccagcgccccgcggccgcgatccggaccccaagcccacggctccctcgactctggggcacggaaccccgcccactcccaatccccgcgccccgccctctcccacccgtgcttcccccgctccacccctcacctcacctcgcccccgccccacccatcgcgccccggcccgtcccatcgaggcccatgcaacccacgctcggtcccgttccggcccctgcgccccgctgcgcttcgctccccgcccttgcgccgttagtaaacatcgctcaaacg

SEQ ID NO: 296132 - DNA, 2606 bp, Homo sapiens
gcgcagctccgagggctggcggctcggggcgccgaggcttccgcgcccgctggttcctcgctccggggcggagctcgcgatagcgaccgggagcagggcgcggggcgggacccaggtccgaggcgaggaagccggaagccaggcgcggggagcctcccccttcgactgcagcctcgctccgtgccttctgcgcgcctgggatcccggagcctgcctaggttctgtgcgctcccgcccaggccggtgcccgccgcccgcctgcgccccaggcaggtcccaggcctccggctgctcccggccgaaggtggggacaggcagtggcaggcaccactagcgagggcgtttgggaacccagggtgaccacggcgcagccatggggaccgcgcttgtgtaccatgaggacatgacggccacccggctgctctgggacgaccccgagtgcgagatcgagcgtcctgagcgcctgaccgcagccctggatcgcctgcggcagcgcggcctggaacagaggtgtctgcggttgtcagcccgcgaggcctcggaagaggagctgggcctggtgcacagcccagagtatgtatccctggtcagggagacccaggtcctaggcaaggaggagctgcaggcgctgtccggacagttcgacgccatctacttccacccggcctcccgggcaccatggccagagggcggctgccaacgggttctgcgtgttcaacaacgtggccatagcagctgcacatgccaagcagaaacacgggctacacaggatcctcgtcgtggactgggatgtgcaccatggccaggggatccagtatctctttgaggatgaccccagcgtcctttacttctcctggcaccgctatgagcatgggcgcttctggcctttcctgcgagagtcagatgcagacgcagtggggcggggacagggcctcggcttcactgtcaacctgccctggaaccaggttgggatgggaaacgctgactacgtggctgccttcctgcacctgctgctcccactggcctttgagtttgaccctgagctggtgctggtctcggcaggatttgactcagccatcggggaccctgaggggcaaatgcaggccacgccagagtgcttcgcccacctcacacagctgctgcaggtgctggccggcggccgggtctgtgccgtgctggagggcggctaccacctggagtcactggcggagtcagtgtgcatgacagtacagacgctgctgggtgacccggccccacccctgtcagggccaatggcgccatgtcagagtgccctagagtccatccagagtgcccgtgctgcccaggccccgcactggaagagcctccagcagcaagatgtgaccgctgtgccgatgagccccagcagccactccccagaggggaggcctccacctctgctgcctgggggtccagtgtgtaaggcagctgcatctgcaccgagctccctcctggaccagccgtgcctctgccccgcaccctctgtccgcaccgctgttgccctgacaacgccggatatcacattggttctgccccctgacgtcatccaacaggaagcgtcagccctgagggaggagacagaagcctgggccaggccacacgagtccctggcccgggaggaggccctcactgcacttgggaagctcctgtacctcttagatgggatgctggatgggcaggtgaacagtggtatagcagccactccagcctctgctgcagcagccaccctggatgtggctgttcggagaggcctgtcccacggagcccagaggctgctgtgcgtggccctgggacagctggaccggcctccagacctcgcccatgacgggaggagtctgtggctgaacatcaggggcaaggaggcggctgccctatccatgttccatgtctccacgccactgccagtgatgaccggtggtttcctgagctgcatcttgggcttggtgctgcccctggcctatggcttccagcctgacctggtgctggtggcgctggggcctggccatggcctgcagggcccccacgctgcactcctggctgcaatgcttcgggggctggcagggggccgagtcctggccctcctggaggagaactccacaccccagctagcagggatcctggcccgggtgctgaatggagaggcacctcctagcctaggcccttcctctgtggcctccccagaggacgtccaggccctgatgtacctgagagggcagctggagcctcagtggaagatgttgcagtgccatcctcacctggtggcttgaaatcggccaaggtgggagcatttacaccgcagaaatgacaccgcacgccagcgccccgcggccgcgatccggaccccaagcccacggctccctcgactctggggcacggaaccccgcccactcccaatccccgcgccccgccctctcccacccgtgcttcccccgctccacccctcacctcacctcgcccccgccccacccatcgcgccccggcccgtcccatcgaggcccatgcaacccacgctcggtcccgttccggcccctgcgccccgctgcgcttcgctccccgcccttgcgccgttagtaaacatcgctcaaacg

SEQ ID NO: 296133 - DNA, 2728 bp, Homo sapiens
gcgcagctccgagggctggcggctcggggcgccgaggcttccgcgcccgctggttcctcgctccggggcggagctcgcgatagcgaccgggagcagggcgcggggcgggacccaggtccgaggcgaggaagccggaagccaggcgcggggagcctcccccttcgactgcagcctcgctccgtgccttctgcgcgcctgggatcccggagcctgcctaggttctgtgcgctcccgcccaggccggtgcccgccgcccgcctgcgccccaggcaggtcccaggcctccggctgctcccggccgaagccccgagtgcgagatcgagcgtcctgagcgcctgaccgcagccctggatcgcctgcggcagcgcggcctggaacagaggtgtctgcggttgtcagcccgcgaggcctcggaagaggagctgggcctggtgcacagcccagagtatgtatccctggtcagggagacccaggtcctaggcaaggaggagctgcaggcgctgtccggacagttcgacgccatctacttccacccgagtacctttcactgcgcgcggctggccgcaggggctggactgcagctggtggacgctgtgctcactggagctgtgcaaaatgggcttgccctggtgaggcctcccgggcaccatggccagagggcggctgccaacgggttctgcgtgttcaacaacgtggccatagcagctgcacatgccaagcagaaacacgggctacacaggatcctcgtcgtggactgggatgtgcaccatggccaggggatccagtatctctttgaggatgaccccagcgtcctttacttctcctggcaccgctatgagcatgggcgcttctggcctttcctgcgagagtcagatgcagacgcagtggggcggggacagggcctcggcttcactgtcaacctgccctggaaccaggttgggatgggaaacgctgactacgtggctgccttcctgcacctgctgctcccactggcctttgagtttgaccctgagctggtgctggtctcggcaggatttgactcagccatcggggaccctgaggggcaaatgcaggccacgccagagtgcttcgcccacctcacacagctgctgcaggtgctggccggcggccgggtctgtgccgtgctggagggcggctaccacctggagtcactggcggagtcagtgtgcatgacagtacagacgctgctgggtgacccggccccacccctgtcagggccaatggcgccatgtcagaggtgcgaggggaggtagggcgggcagggccggggtgtgagaccaggtgtcacgactgttgtgtctccctcacagtgccctagagtccatccagagtgcccgtgctgcccaggccccgcactggaagagcctccagcagcaaggtcagtgtggccgggtgctaggctgcaggatcccacctcgggctcctgtgcagtggctatgactccgaactgtccctagatgtgaccgctgtgccgatgagccccagcagccactccccagaggggaggcctccacctctgctgcctgggggtccagtgtgtaaggcagctgcatctgcaccgagctccctcctggaccagccgtgcctctgccccgcaccctctgtccgcaccgctgttgccctgacaacgccggatatcacattggttctgccccctgacgtcatccaacaggaagcgtcagccctgagggaggagacagaagcctgggccaggccacacgagtccctggcccgggaggaggccctcactgcacttgggaagctcctgtacctcttagatgggatgctggatgggcaggtgaacagtggtatagcagccactccagcctctgctgcagcagccaccctggatgtggctgttcggagaggcctgtcccacggagcccagaggctgctgtgcgtggccctgggacagctggaccggcctccagacctcgcccatgacgggaggagtctgtggctgaacatcaggggcaaggaggcggctgccctatccatgttccatgtctccacgccactgccagtgatgaccggtggtttcctgagctgcatcttgggcttggtgctgcccctggcctatggcttccagcctgacctggtgctggtggcgctggggcctggccatggcctgcagggcccccacgctgcactcctggctgcaatgcttcgggggctggcagggggccgagtcctggccctcctggaggagaactccacaccccagctagcagggatcctggcccgggtgctgaatggagaggcacctcctagcctaggcccttcctctgtggcctccccagaggacgtccaggccctgatgtacctgagagggcagctggagcctcagtggaagatgttgcagtgccatcctcacctggtggcttgaaatcggccaaggtgggagcatttacaccgcagaaatgacaccgcacgccagcgccccgcggccgcgatccggaccccaagcccacggctccctcgactctggggcacggaaccccgcccactcccaatccccgcgccccgccctctcccacccgtgcttcccccgctccacccctcacctcacctcgcccccgccccacccatcgcgccccggcccgtcccatcgaggcccatgcaacccacgctcggtcccgttccggcccctgcgccccgctgcgcttcgctccccgcccttgcgccgttagtaaacatcgctcaaacg

SEQ ID NO: 296134 - DNA, 2353 bp, Homo sapiens
gcgcagctccgagggctggcggctcggggcgccgaggcttccgcgcccgctggttcctcgctccggggcggagctcgcgatagcgaccgggagcagggcgcggggcgggacccaggtccgaggcgaggaagccggaagccaggcgcggggagcctcccccttcgactgcagcctcgctccgtgccttctgcgcgcctgggatcccggagcctgcctaggttctgtgcgctcccgcccaggccggtgcccgccgcccgcctgcgccccaggcaggtcccaggcctccggctgctcccggccgaagccccgagtgcgagatcgagcgtcctgagcgcctgaccgcagccctggatcgcctgcggcagcgcggcctggaacagaggtgtctgcggttgtcagcccgcgaggcctcggaagaggagctgggcctggtgcacagagtacctttcactgcgcgcggctggccgcaggggctggactgcagctggtggacgctgtgctcactggagctgtgcaaaatgggcttgccctggtgaggcctcccgggcaccatggccagagggcggctgccaacgggttctgcgtgttcaacaacgtggccatagcagctgcacatgccaagcagaaacacgggctacacaggatcctcgtcgtggactgggatgtgcaccatggccaggggatccagtatctctttgaggatgaccccagcgtcctttacttctcctggcaccgctatgagcatgggcgcttctggcctttcctgcgagagtcagatgcagacgcagtggggcggggacagggcctcggcttcactgtcaacctgccctggaaccaggggcaaatgcaggccacgccagagtgcttcgcccacctcacacagctgctgcaggtgctggccggcggccgggtctgtgccgtgctggagggcggctaccacctggagtcactggcggagtcagtgtgcatgacagtacagacgctgctgggtgacccggccccacccctgtcagggccaatggcgccatgtcagagtgccctagagtccatccagagtgcccgtgctgcccaggccccgcactggaagagcctccagcagcaagatgtgaccgctgtgccgatgagccccagcagccactccccagaggggaggcctccacctctgctgcctgggggtccagtgtgtaaggcagctgcatctgcaccgagctccctcctggaccagccgtgcctctgccccgcaccctctgtccgcaccgctgttgccctgacaacgccggatatcacattggttctgccccctgacgtcatccaacaggaagcgtcagccctgagggaggagacagaagcctgggccaggccacacgagtccctggcccgggaggaggccctcactgcacttgggaagctcctgtacctcttagatgggatgctggatgggcaggtgaacagtggtatagcagccactccagcctctgctgcagcagccaccctggatgtggctgttcggagaggcctgtcccacggagcccagaggctgctgtgcgtggccctgggacagctggaccggcctccagacctcgcccatgacgggaggagtctgtggctgaacatcaggggcaaggaggcggctgccctatccatgttccatgtctccacgccactgccagtgatgaccggtggtttcctgagctgcatcttgggcttggtgctgcccctggcctatggcttccagcctgacctggtgctggtggcgctggggcctggccatggcctgcagggcccccacgctgcactcctggctgcaatgcttcgggggctggcagggggccgagtcctggccctcctggaggagaactccacaccccagctagcagggatcctggcccgggtgctgaatggagaggcacctcctagcctaggcccttcctctgtggcctccccagaggacgtccaggccctgatgtacctgagagggcagctggagcctcagtggaagatgttgcagtgccatcctcacctggtggcttgaaatcggccaaggtgggagcatttacaccgcagaaatgacaccgcacgccagcgccccgcggccgcgatccggaccccaagcccacggctccctcgactctggggcacggaaccccgcccactcccaatccccgcgccccgccctctcccacccgtgcttcccccgctccacccctcacctcacctcgcccccgccccacccatcgcgccccggcccgtcccatcgaggcccatgcaacccacgctcggtcccgttccggcccctgcgccccgctgcgcttcgctccccgcccttgcgccgttagtaaacatcgctcaaacg

SEQ ID NO: 296135 - DNA, 2382 bp, Homo sapiens
gcgcagctccgagggctggcggctcggggcgccgaggcttccgcgcccgctggttcctcgctccggggcggagctcgcgatagcgaccgggagcagggcgcggggcgggacccaggtccgaggcgaggaagccggaagccaggcgcggggagcctcccccttcgactgcagcctcgctccgtgccttctgcgcgcctgggatcccggagcctgcctaggttctgtgcgctcccgcccaggccggtgcccgccgcccgcctgcgccccaggcaggtcccaggcctccggctgctcccggccgaagccccgagtgcgagatcgagcgtcctgagcgcctgaccgcagccctggatcgcctgcggcagcgcggcctggaacagaggtgtctgcggttgtcagcccgcgaggcctcggaagaggagctgggcctggtgcacagagtacctttcactgcgcgcggctggccgcaggggctggactgcagctggtggacgctgtgctcactggagctgtgcaaaatgggcttgccctggtgaggcctcccgggcaccatggccagagggcggctgccaacgggttctgcgtgttcaacaacgtggccatagcagctgcacatgccaagcagaaacacgggctacacaggatcctcgtcgtggactgggatgtgcaccatggccaggggatccagtatctctttgaggatgaccccagcgtcctttacttctcctggcaccgctatgagcatgggcgcttctggcctttcctgcgagagtcagatgcagacgcagtggggcggggacagggcctcggcttcactgtcaacctgccctggaaccaggatttgactcagccatcggggaccctgaggggcaaatgcaggccacgccagagtgcttcgcccacctcacacagctgctgcaggtgctggccggcggccgggtctgtgccgtgctggagggcggctaccacctggagtcactggcggagtcagtgtgcatgacagtacagacgctgctgggtgacccggccccacccctgtcagggccaatggcgccatgtcagagtgccctagagtccatccagagtgcccgtgctgcccaggccccgcactggaagagcctccagcagcaagatgtgaccgctgtgccgatgagccccagcagccactccccagaggggaggcctccacctctgctgcctgggggtccagtgtgtaaggcagctgcatctgcaccgagctccctcctggaccagccgtgcctctgccccgcaccctctgtccgcaccgctgttgccctgacaacgccggatatcacattggttctgccccctgacgtcatccaacaggaagcgtcagccctgagggaggagacagaagcctgggccaggccacacgagtccctggcccgggaggaggccctcactgcacttgggaagctcctgtacctcttagatgggatgctggatgggcaggtgaacagtggtatagcagccactccagcctctgctgcagcagccaccctggatgtggctgttcggagaggcctgtcccacggagcccagaggctgctgtgcgtggccctgggacagctggaccggcctccagacctcgcccatgacgggaggagtctgtggctgaacatcaggggcaaggaggcggctgccctatccatgttccatgtctccacgccactgccagtgatgaccggtggtttcctgagctgcatcttgggcttggtgctgcccctggcctatggcttccagcctgacctggtgctggtggcgctggggcctggccatggcctgcagggcccccacgctgcactcctggctgcaatgcttcgggggctggcagggggccgagtcctggccctcctggaggagaactccacaccccagctagcagggatcctggcccgggtgctgaatggagaggcacctcctagcctaggcccttcctctgtggcctccccagaggacgtccaggccctgatgtacctgagagggcagctggagcctcagtggaagatgttgcagtgccatcctcacctggtggcttgaaatcggccaaggtgggagcatttacaccgcagaaatgacaccgcacgccagcgccccgcggccgcgatccggaccccaagcccacggctccctcgactctggggcacggaaccccgcccactcccaatccccgcgccccgccctctcccacccgtgcttcccccgctccacccctcacctcacctcgcccccgccccacccatcgcgccccggcccgtcccatcgaggcccatgcaacccacgctcggtcccgttccggcccctgcgccccgctgcgcttcgctccccgcccttgcgccgttagtaaacatcgctcaaacg

SEQ ID NO: 296136 - DNA, 2594 bp, Homo sapiens
gcgcagctccgagggctggcggctcggggcgccgaggcttccgcgcccgctggttcctcgctccggggcggagctcgcgatagcgaccgggagcagggcgcggggcgggacccaggtccgaggcgaggaagccggaagccaggcgcggggagcctcccccttcgactgcagcctcgctccgtgccttctgcgcgcctgggatcccggagcctgcctaggttctgtgcgctcccgcccaggccggtgcccgccgcccgcctgcgccccaggcaggtcccaggcctccggctgctcccggccgaagccccgagtgcgagatcgagcgtcctgagcgcctgaccgcagccctggatcgcctgcggcagcgcggcctggaacagaggtgtctgcggttgtcagcccgcgaggcctcggaagaggagctgggcctggtgcacagagtacctttcactgcgcgcggctggccgcaggggctggactgcagctggtggacgctgtgctcactggagctgtgcaaaatgggcttgccctggtgaggcctcccgggcaccatggccagagggcggctgccaacgggttctgcgtgttcaacaacgtggccatagcagctgcacatgccaagcagaaacacgggctacacaggatcctcgtcgtggactgggatgtgcaccatggccaggggatccagtatctctttgaggatgaccccagttcaggatgtagcctgggatgtcctgccaggttgggatgggaaacgctgactacgtggctgccttcctgcacctgctgctcccactggcctttgaggtgactgcacggagggctcccccagggcagccgggtgggagggggaccttgtgcctggagtgcgccagtgaaggcaggaggagggttatgagctgtcccactcctgtgtggctggggaaggtgctcaggaggggatgggatgggcctggctcgccctcacctgggctccagcccctctctgtcgaccctccccactccggcctggcctgtagtttgaccctgagctggtgctggtctcggcaggatttgactcagccatcggggaccctgaggggcaaatgcaggccacgccagagtgcttcgcccacctcacacagctgctgcaggtgctggccggcggccgggtctgtgccgtgctggagggcggctaccacctggagtcactggcggagtcagtgtgcatgacagtacagacgctgctgggtgacccggccccacccctgtcagggccaatggcgccatgtcagagtgccctagagtccatccagagtgcccgtgctgcccaggccccgcactggaagagcctccagcagcaagatgtgaccgctgtgccgatgagccccagcagccactccccagaggggaggcctccacctctgctgcctgggggtccagtgtgtaaggcagctgcatctgcaccgagctccctcctggaccagccgtgcctctgccccgcaccctctgtccgcaccgctgttgccctgacaacgccggatatcacattggttctgccccctgacgtcatccaacaggaagcgtcagccctgagggaggagacagaagcctgggccaggccacacgagtccctggcccgggaggaggccctcactgcacttgggaagctcctgtacctcttagatgggatgctggatgggcaggtgaacagtggtatagcagccactccagcctctgctgcagcagccaccctggatgtggctgttcggagaggcctgtcccacggagcccagaggctgctgtgcgtggccctgggacagctggaccggcctccagacctcgcccatgacgggaggagtctgtggctgaacatcaggggcaaggaggcggctgccctatccatgttccatgtctccacgccactgccagtgatgaccggtggtttcctgagctgcatcttgggcttggtgctgcccctggcctatggcttccagcctgacctggtgctggtggcgctggggcctggccatggcctgcagggcccccacgctgcactcctggctgcaatgcttcgggggctggcagggggccgagtcctggccctcctggaggagaactccacaccccagctagcagggatcctggcccgggtgctgaatggagaggcacctcctagcctaggcccttcctctgtggcctccccagaggacgtccaggccctgatgtacctgagagggcagctggagcctcagtggaagatgttgcagtgccatcctcacctggtggcttgaaatcggccaaggtgggagcatttacaccgcagaaatgacaccgcacgccagcgccccgcggccgcgatccggaccccaagcccacggctccctcgactctggggcacggaaccccgcccactcccaatccccgcgccccgccctctcccacccgtgcttcccccgctccacccctcacctcacctcgcccccgccccacccatcgcgccccggcccgtcccatcgaggcccatgcaacccacgctcggtcccgttccggcccctgcgccccgctgcgcttcgctccccgcccttgcgccgttagtaaacatcgctcaaacg

SEQ ID NO: 296137 - DNA, 2922 bp, Homo sapiens
gcgcagctccgagggctggcggctcggggcgccgaggcttccgcgcccgctggttcctcgctccggggcggagctcgcgatagcgaccgggagcagggcgcggggcgggacccaggtccgaggcgaggaagccggaagccaggcgcggggagcctcccccttcgactgcagcctcgctccgtgccttctgcgcgcctgggatcccggagcctgcctaggttctgtgcgctcccgcccaggccggtgcccgccgcccgcctgcgccccaggcaggtcccaggcctccggctgctcccggccgaaggtggggacaggcagtggcaggcaccactagcgagggcgtttgggaacccagggtgaccacggcgcagccatggggaccgcgcttgtgtaccatgaggacatgacggccacccggctgctctgggacgaccccgagtgcgagatcgagcgtcctgagcgcctgaccgcagccctggatcgcctgcggcagcgcggcctggaacagaggtgtctgcggttgtcagcccgcgaggcctcggaagaggagctgggcctggtgcacagagtacctttcactgcgcgcggctggccgcaggggctggactgcagctggtggacgctgtgctcactggagctgtgcaaaatgggcttgccctggtgaggcctcccgggcaccatggccagagggcggctgccaacgggttctgcgtgttcaacaacgtggccatagcagctgcacatgccaagcagaaacacgggctacacaggatcctcgtcgtggactgggatgtgcaccatggccaggggatccagtatctctttgaggatgaccccagcgtcctttacttctcctggcaccgctatgagcatgggcgcttctggcctttcctgcgagagtcagatgcagacgcagtggggcggggacagggcctcggcttcactgtcaacctgccctggaaccagttcaggatgtagcctgggatgtcctgccaggttgggatgggaaacgctgactacgtggctgccttcctgcacctgctgctcccactggcctttgaggtgactgcacggagggctcccccagggcagccgggtgggagggggaccttgtgcctggagtgcgccagtgaaggcaggaggagggttatgagctgtcccactcctgtgtggctggggaaggtgctcaggaggggatgggatgggcctggctcgccctcacctgggctccagcccctctctgtcgaccctccccactccggcctggcctgtagtttgaccctgagctggtgctggtctcggcaggatttgactcagccatcggggaccctgaggggcaaatgcaggccacgccagagtgcttcgcccacctcacacagctgctgcaggtgctggccggcggccgggtctgtgccgtgctggagggcggctaccacctggagtcactggcggagtcagtgtgcatgacagtacagacgctgctgggtgacccggccccacccctgtcagggccaatggcgccatgtcagaggtgcgaggggaggtagggcgggcagggccggggtgtgagaccaggtgtcacgactgttgtgtctccctcacagtgccctagagtccatccagagtgcccgtgctgcccaggccccgcactggaagagcctccagcagcaagatgtgaccgctgtgccgatgagccccagcagccactccccagaggggaggcctccacctctgctgcctgggggtccagtgtgtaaggcagctgcatctgcaccgagctccctcctggaccagccgtgcctctgccccgcaccctctgtccgcaccgctgttgccctgacaacgccggatatcacattggttctgccccctgacgtcatccaacaggaagcgtcagccctgagggaggagacagaagcctgggccaggccacacgagtccctggcccgggaggaggccctcactgcacttgggaagctcctgtacctcttagatgggatgctggatgggcaggtgaacagtggtatagcagccactccagcctctgctgcagcagccaccctggatgtggctgttcggagaggcctgtcccacggagcccagaggctgctgtgcgtggccctgggacagctggaccggcctccagacctcgcccatgacgggaggagtctgtggctgaacatcaggggcaaggaggcggctgccctatccatgttccatgtctccacgccactgccagtgatgaccggtggtttcctgagctgcatcttgggcttggtgctgcccctggcctatggcttccagcctgacctggtgctggtggcgctggggcctggccatggcctgcagggcccccacgctgcactcctggctgcaatgcttcgggggctggcagggggccgagtcctggccctcctggaggagaactccacaccccagctagcagggatcctggcccgggtgctgaatggagaggcacctcctagcctaggcccttcctctgtggcctccccagaggacgtccaggccctgatgtacctgagagggcagctggagcctcagtggaagatgttgcagtgccatcctcacctggtggcttgaaatcggccaaggtgggagcatttacaccgcagaaatgacaccgcacgccagcgccccgcggccgcgatccggaccccaagcccacggctccctcgactctggggcacggaaccccgcccactcccaatccccgcgccccgccctctcccacccgtgcttcccccgctccacccctcacctcacctcgcccccgccccacccatcgcgccccggcccgtcccatcgaggcccatgcaacccacgctcggtcccgttccggcccctgcgccccgctgcgcttcgctccccgcccttgcgccgttagtaaacatcgctcaaacg

SEQ ID NO: 296138 - DNA, 1636 bp, Homo sapiens
gcgcagctccgagggctggcggctcggggcgccgaggcttccgcgcccgctggttcctcgctccggggcggagctcgcgatagcgaccgggagcagggcgcggggcgggacccaggtccgaggcgaggaagccggaagccaggcgcggggagcctcccccttcgactgcagcctcgctccgtgccttctgcgcgcctgggatcccggagcctgcctaggttctgtgcgctcccgcccaggccggtgcccgccgcccgcctgcgccccaggcaggtcccaggcctccggctgctcccggccgaaggtggggacaggcagtggcaggcaccactagcgagggcgtttgggaacccagggtgaccacggcgcagccatggggaccgcgcttgtgtaccatgaggacatgacggccacccggctgctctgggacgaccccgagtgcgagatcgagcgtcctgagcgcctgaccgcagccctggatcgcctgcggcagcgcggcctggaacagaggtgtctgcggttgtcagcccgcgaggcctcggaagaggagctgggcctggtgcacagcacattggttctgccccctgacgtcatccaacaggaagcgtcagccctgagggaggagacagaagcctgggccaggccacacgagtccctggcccgggaggaggccctcactgcacttgggaagctcctgtacctcttagatgggatgctggatgggcaggtgaacagtggtatagcagccactccagcctctgctgcagcagccaccctggatgtggctgttcggagaggcctgtcccacggagcccagaggctgctgtgcgtggccctgggacagctggaccggcctccagacctcgcccatgacgggaggagtctgtggctgaacatcaggggcaaggaggcggctgccctatccatgttccatgtctccacgccactgccagtgatgaccggtggtttcctgagctgcatcttgggcttggtgctgcccctggcctatggcttccagcctgacctggtgctggtggcgctggggcctggccatggcctgcagggcccccacgctgcactcctggctgcaatgcttcgggggctggcagggggccgagtcctggccctcctggaggagaactccacaccccagctagcagggatcctggcccgggtgctgaatggagaggcacctcctagcctaggcccttcctctgtggcctccccagaggacgtccaggccctgatgtacctgagagggcagctggagcctcagtggaagatgttgcagtgccatcctcacctggtggcttgaaatcggccaaggtgggagcatttacaccgcagaaatgacaccgcacgccagcgccccgcggccgcgatccggaccccaagcccacggctccctcgactctggggcacggaaccccgcccactcccaatccccgcgccccgccctctcccacccgtgcttcccccgctccacccctcacctcacctcgcccccgccccacccatcgcgccccggcccgtcccatcgaggcccatgcaacccacgctcggtcccgttccggcccctgcgccccgctgcgcttcgctccccgcccttgcgccgttagtaaacatcgctcaaacg

SEQ ID NO: 296139 - DNA, 2703 bp, Homo sapiens
gcgcagctccgagggctggcggctcggggcgccgaggcttccgcgcccgctggttcctcgctccggggcggagctcgcgatagcgaccgggagcagggcgcggggcgggacccaggtccgaggcgaggaagccggaagccaggcgcggggagcctcccccttcgactgcagcctcgctccgtgccttctgcgcgcctgggatcccggagcctgcctaggttctgtgcgctcccgcccaggccggtgcccgccgcccgcctgcgccccaggcaggtcccaggcctccggctgctcccggccgaagccccgagtgcgagatcgagcgtcctgagcgcctgaccgcagccctggatcgcctgcggcagcgcggcctggaacagaggtgtctgcggttgtcagcccgcgaggcctcggaagaggagctgggcctggtgcacagcccagagtatgtatccctggtcagggagacccaggtcctaggcaaggaggagctgcaggcgctgtccggacagttcgacgccatctacttccacccgagtacctttcactgcgcgcggctggccgcaggggctggactgcagctggtggacgctgtgctcactggagctgtgcaaaatgggcttgccctggtgaggcctcccgggcaccatggccagagggcggctgccaacgggttctgcgtgttcaacaacgtggccatagcagctgcacatgccaagcagaaacacgggctacacaggatcctcgtcgtggactgggatgtgcaccatggccaggggatccagtatctctttgaggatgaccccagcgtcctttacttctcctggcaccgctatgagcatgggcgcttctggcctttcctgcgagagtcagatgcagacgcagtggggcggggacagggcctcggcttcactgtcaacctgccctggaaccaggttgggatgggaaacgctgactacgtggctgccttcctgcacctgctgctcccactggcctttgaggtgactgcacggagggctcccccagggcagccgggtgggagggggaccttgtgcctggagtgcgccagtgaaggcaggaggagggttatgagctgtcccactcctgtgtggctggggaaggtgctcaggaggggatgggatgggcctggctcgccctcacctgggctccagcccctctctgtcgaccctccccactccggcctggcctgtagtttgaccctgagctggtgctggtctcggcaggatttgactcagccatcggggaccctgaggggcaaatgcaggccacgccagagtgcttcgcccacctcacacagctgctgcaggtgctggccggcggccgggtctgtgccgtgctggagggcggctaccacctggagtcactggcggagtcagtgtgcatgacagtacagacgctgctgggtgacccggccccacccctgtcagggccaatggcgccatgtcagagtgccctagagtccatccagagtgcccgtgctgcccaggccccgcactggaagagcctccagcagcaagatgtgaccgctgtgccgatgagccccagcagccactccccagaggggaggcctccacctctgctgcctgggggtccagtgtgtaaggcagctgcatctgcaccgagctccctcctggaccagccgtgcctctgccccgcaccctctgtccgcaccgctgttgccctgacaacgccggatatcacattggttctgccccctgacgtcatccaacaggaagcgtcagccctgagggaggagacagaagcctgggccaggtgaacagtggtatagcagccactccagcctctgctgcagcagccaccctggatgtggctgttcggagaggcctgtcccacggagcccagaggctgctgtgcgtggccctgggacagctggaccggcctccagacctcgcccatgacgggaggagtctgtggctgaacatcaggggcaaggaggcggctgccctatccatgttccatgtctccacgccactgccagtgatgaccggtggtttcctgagctgcatcttgggcttggtgctgcccctggcctatggcttccagcctgacctggtgctggtggcgctggggcctggccatggcctgcagggcccccacgctgcactcctggctgcaatgcttcgggggctggcagggggccgagtcctggccctcctggaggagaactccacaccccagctagcagggatcctggcccgggtgctgaatggagaggcacctcctagcctaggcccttcctctgtggcctccccagaggacgtccaggccctgatgtacctgagagggcagctggagcctcagtggaagatgttgcagtgccatcctcacctggtggcttgaaatcggccaaggtgggagcatttacaccgcagaaatgacaccgcacgccagcgccccgcggccgcgatccggaccccaagcccacggctccctcgactctggggcacggaaccccgcccactcccaatccccgcgccccgccctctcccacccgtgcttcccccgctccacccctcacctcacctcgcccccgccccacccatcgcgccccggcccgtcccatcgaggcccatgcaacccacgctcggtcccgttccggcccctgcgccccgctgcgcttcgctccccgcccttgcgccgttagtaaacatcgctcaaacg

SEQ ID NO: 296140 - DNA, 2703 bp, Homo sapiens
gcgcagctccgagggctggcggctcggggcgccgaggcttccgcgcccgctggttcctcgctccggggcggagctcgcgatagcgaccgggagcagggcgcggggcgggacccaggtccgaggcgaggaagccggaagccaggcgcggggagcctcccccttcgactgcagcctcgctccgtgccttctgcgcgcctgggatcccggagcctgcctaggttctgtgcgctcccgcccaggccggtgcccgccgcccgcctgcgccccaggcaggtcccaggcctccggctgctcccggccgaagccccgagtgcgagatcgagcgtcctgagcgcctgaccgcagccctggatcgcctgcggcagcgcggcctggaacagaggtgtctgcggttgtcagcccgcgaggcctcggaagaggagctgggcctggtgcacagcccagagtatgtatccctggtcagggagacccaggtcctaggcaaggaggagctgcaggcgctgtccggacagttcgacgccatctacttccacccgagtacctttcactgcgcgcggctggccgcaggggctggactgcagctggtggacgctgtgctcactggagctgtgcaaaatgggcttgccctggtgaggcctcccgggcaccatggccagagggcggctgccaacgggttctgcgtgttcaacaacgtggccatagcagctgcacatgccaagcagaaacacgggctacacaggatcctcgtcgtggactgggatgtgcaccatggccaggggatccagtatctctttgaggatgaccccagcgtcctttacttctcctggcaccgctatgagcatgggcgcttctggcctttcctgcgagagtcagatgcagacgcagtggggcggggacagggcctcggcttcactgtcaacctgccctggaaccaggttgggatgggaaacgctgactacgtggctgccttcctgcacctgctgctcccactggcctttgagtttgaccctgagctggtgctggtctcggcaggatttgactcagccatcggggaccctgaggggcaaatgcaggccacgccagagtgcttcgcccacctcacacagctgctgcaggtgctggccggcggccgggtctgtgccgtgctggagggcggctaccacctggagtcactggcggagtcagtgtgcatgacagtacagacgctgctgggtgacccggccccacccctgtcagggccaatggcgccatgtcagaggtgcgaggggaggtagggcgggcagggccggggtgtgagaccaggtgtcacgactgttgtgtctccctcacagtgccctagagtccatccagagtgcccgtgctgcccaggccccgcactggaagagcctccagcagcaagatgtgaccgctgtgccgatgagccccagcagccactccccagaggggaggcctccacctctgctgcctgggggtccagtgtgtaaggcagctgcatctgcaccgagctccctcctggaccagccgtgcctctgccccgcaccctctgtccgcaccgctgttgccctgacaacgccggatatcacattggttctgccccctgacgtcatccaacaggaagcgtcagccctgagggaggagacagaagcctgggccaggtgaacagtggtatagcagccactccagcctctgctgcagcagccaccctggatgtggctgttcggagaggcctgtcccacggagcccagaggtaagcctcacttggccatcctgagcctctgacggcaggacctgtgggcacccctatcctggctggccaagcacagagagttctgggaatggactctggacaacatgaacacctgtcctgaggccagctcttcttccaggctgctgtgcgtggccctgggacagctggaccggcctccagacctcgcccatgacgggaggagtctgtggctgaacatcaggggcaaggaggcggctgccctatccatgttccatgtctccacgccactgccagtgatgaccggtggtttcctgagctgcatcttgggcttggtgctgcccctggcctatggcttccagcctgacctggtgctggtggcgctggggcctggccatggcctgcagggcccccacgctgcactcctggctgcaatgcttcgggggctggcagggggccgagtcctggccctcctggaggagaactccacaccccagctagcagggatcctggcccgggtgctgaatggagaggcacctcctagcctaggcccttcctctgtggcctccccagaggacgtccaggccctgatgtacctgagagggcagctggagcctcagtggaagatgttgcagtgccatcctcacctggtggcttgaaatcggccaaggtgggagcatttacaccgcagaaatgacaccgcacgccagcgccccgcggccgcgatccggaccccaagcccacggctccctcgactctggggcacggaaccccgcccactcccaatccccgcgccccgccctctcccacccgtgcttcccccgctccacccctcacctcacctcgcccccgccccacccatcgcgccccggcccgtcccatcgaggcccatgcaacccacgctcggtcccgttccggcccctgcgccccgctgcgcttcgctccccgcccttgcgccgttagtaaacatcgctcaaacg

SEQ ID NO: 296141 - DNA, 1073 bp, Homo sapiens
tcgaagaaggtggtgttgattgcggtctgttagtagtatagtgatgccagcagctaggactgggagagataggagaagtaggactgctgtaattaggacggatcagacgaagaggggcgtttggtattgggttatggcagggggttttatattgataattgtgggtgaacagtggtatagcagccactccagcctctgctgcagcagccaccctggatgtggctgttcggagaggcctgtcccacggagcccagaggctgctgtgcgtggccctgggacagctggaccggcctccagacctcgcccatgacgggaggagtctgtggctgaacatcaggggcaaggaggcggctgccctatccatgttccatgtctccacgccactgccagtgatgaccggtggtttcctgagctgcatcttgggcttggtgctgcccctggcctatggcttccagcctgacctggtgctggtggcgctggggcctggccatggcctgcagggcccccacgctgcactcctggctgcaatgcttcgggggctggcagggggccgagtcctggccctcctggaggagaactccacaccccagctagcagggatcctggcccgggtgctgaatggagaggcacctcctagcctaggcccttcctctgtggcctccccagaggacgtccaggccctgatgtacctgagagggcagctggagcctcagtggaagatgttgcagtgccatcctcacctggtggcttgaaatcggccaaggtgggagcatttacaccgcagaaatgacaccgcacgccagcgccccgcggccgcgatccggaccccaagcccacggctccctcgactctggggcacggaaccccgcccactcccaatccccgcgccccgccctctcccacccgtgcttcccccgctccacccctcacctcacctcgcccccgccccacccatcgcgccccggcccgtcccatcgaggcccatgcaacccacgctcggtcccgttccggcccctgcgccccgctgcgcttcgctccccgcccttgcgccgttagtaaacatcgctcaaacg

SEQ ID NO: 296142 - DNA, 2390 bp, Homo sapiens
gcgcagctccgagggctggcggctcggggcgccgaggcttccgcgcccgctggttcctcgctccggggcggagctcgcgatagcgaccgggagcagggcgcggggcgggacccaggtccgaggcgaggaagccggaagccaggcgcggggagcctcccccttcgactgcagcctcgctccgtgccttctgcgcgcctgggatcccggagcctgcctaggttctgtgcgctcccgcccaggccggtgcccgccgcccgcctgcgccccaggcaggtcccaggcctccggctgctcccggccgaagccccgagtgcgagatcgagcgtcctgagcgcctgaccgcagccctggatcgcctgcggcagcgcggcctggaacagaggtgtctgcggttgtcagcccgcgaggcctcggaagaggagctgggcctggtgcacagcccagagtatgtatccctggtcagggagacccaggtcctaggcaaggaggagctgcaggcgctgtccggacagttcgacgccatctacttccacccgagtacctttcactgcgcgcggctggccgcaggggctggactgcagctggtggacgctgtgctcactggagctgtgcaaaatgggcttgccctggtgaggcctcccgggcaccatggccagagggcggctgccaacgggttctgcgtgttcaacaacgtggccatagcagctgcacatgccaagcagaaacacgggctacacaggatcctcgtcgtggactgggatgtgcaccatggccaggggatccagtatctctttgaggatgaccccagcgtcctttacttctcctggcaccgctatgagcatgggcgcttctggcctttcctgcgagagtcagatgcagacgcagtggggcggggacagggcctcggcttcactgtcaacctgccctggaaccaggttgggatgggaaacgctgactacgtggctgccttcctgcacctgctgctcccactggcctttgagtttgaccctgagctggtgctggtctcggcaggatttgactcagccatcggggaccctgaggggcaaatgcaggccacgccagagtgcttcgcccacctcacacagctgctgcaggtgctggccggcggccgggtctgtgccgtgctggagggcggctaccacctggagtcactggcggagtcagtgtgcatgacagtacagacgctgctgggtgacccggccccacccctgtcagggccaatggcgccatgtcagaggtgcgaggggaggtagggcgggcagggccggggtgtgagaccaggtgtcacgactgttgtgtctccctcacagtgccctagagtccatccagagtgcccgtgctgcccaggccccgcactggaagagcctccagcagcaagatgtgaccgctgtgccgatgagccccagcagccactccccagaggggaggcctccacctctgctgcctgggggtccagtgtgtaaggcagctgcatctgcaccgagctccctcctggaccagccgtgcctctgccccgcaccctctgtccgcaccgctgttgccctgacaacgccggatatcacattggttctgccccctgacgtcatccaacaggaagcgtcagccctgagggaggagacagaagcctgggccaggtgggcagggctggcctggggagaaggatggggccgcatctacacctgtgcctgtgtgtgcctgacctgcggtcactccgtgtctgtgtgtccctctggtctgtccaccacaggccacacgagtccctggcccgggaggaggccctcactgcacttgggaagctcctgtacctcttagatgggatgctggatgggcaggtgggagcacctgggaggggttggggatgctgtggacctaggggcagggaccaggacctgccaacgagatgtggcctgtccagaggagggctgggtggtgcagaaccacatggatgtgaacattgccttgtgccaggaactgttcccagaacagccccaggggtggggatcactagtgtgtctgacctctgacctcagcttcttcagttaaatgctctttggcagagaggtgaagggggtgatttaaagtatacatttaggcagggtgcagtggctcatgcctgtaataacggcagtttggggggccaaggtgggagaaacgcttgagcccaggagttcaagaccagcctagagaacatatggagaccctgtcttcacaaaaaataaaaaagtcagccaagcgtggtggtgtgtgcctgtagttacttaggaggctgaggcaggacgatcgcttaagcccaggagtttgaggctgtggtgagctacaattgcgccactgcacgccagcctggctacagaacgagaccctgcctctcc

SEQ ID NO: 296143 - DNA, 2661 bp, Homo sapiens
gcgcagctccgagggctggcggctcggggcgccgaggcttccgcgcccgctggttcctcgctccggggcggagctcgcgatagcgaccgggagcagggcgcggggcgggacccaggtccgaggcgaggaagccggaagccaggcgcggggagcctcccccttcgactgcagcctcgctccgtgccttctgcgcgcctgggatcccggagcctgcctaggttctgtgcgctcccgcccaggccggtgcccgccgcccgcctgcgccccaggcaggtcccaggcctccggctgctcccggccgaagccccgagtgcgagatcgagcgtcctgagcgcctgaccgcagccctggatcgcctgcggcagcgcggcctggaacagaggtgtctgcggttgtcagcccgcgaggcctcggaagaggagctgggcctggtgcacagcccagagtatgtatccctggtcagggagacccaggtcctaggcaaggaggagctgcaggcgctgtccggacagttcgacgccatctacttccacccgagtacctttcactgcgcgcggctggccgcaggggctggactgcagctggtggacgctgtgctcactggagctgtgcaaaatgggcttgccctggtgaggcctcccgggcaccatggccagagggcggctgccaacgggttctgcgtgttcaacaacgtggccatagcagctgcacatgccaagcagaaacacgggctacacaggatcctcgtcgtggactgggatgtgcaccatggccaggggatccagtatctctttgaggatgaccccagcgtcctttacttctcctggcaccgctatgagcatgggcgcttctggcctttcctgcgagagtcagatgcagacgcagtggggcggggacagggcctcggcttcactgtcaacctgccctggaaccaggttgggatgggaaacgctgactacgtggctgccttcctgcacctgctgctcccactggcctttgagtttgaccctgagctggtgctggtctcggcaggatttgactcagccatcggggaccctgaggggcaaatgcaggccacgccagagtgcttcgcccacctcacacagctgctgcaggtgctggccggcggccgggtctgtgccgtgctggagggcggctaccacctggagtcactggcggagtcagtgtgcatgacagtacagacgctgctgggtgacccggccccacccctgtcagggccaatggcgccatgtcagagtgccctagagtccatccagagtgcccgtgctgcccaggccccgcactggaagagcctccagcagcaagatgtgaccgctgtgccgatgagccccagcagccactccccagaggggaggcctccacctctgctgcctgggggtccagtgtgtaaggcagctgcatctgcaccgagctccctcctggaccagccgtgcctctgccccgcaccctctgtccgcaccgctgttgccctgacaacgccggatatcacattggttctgccccctgacgtcatccaacaggaagcgtcagccctgagggaggagacagaagcctgggccaggccacacgagtccctggcccgggaggaggccctcactgcacttgggaagctcctgtacctcttagatgggatgctggatgggcaggtgaacagtggtatagcagccactccagcctctgctgcagcagccaccctggatgtggctgttcggagaggcctgtcccacggagcccagaggctgctgtgcgtggccctgggacagctggaccggcctccagacctcgcccatgacgggaggagtctgtggctgaacatcaggggcaaggaggcggctgccctatccatgttccatgtctccacgccactgccagtgatgaccggtggtttcctgagctgcatcttgggcttggtgctgcccctggcctatggcttccagcctgacctggtgctggtggcgctggggcctggccatggcctgcagggcccccacgctgcactcctggctgcaatgcttcgggggctggcagggggccgagtcctggccctcctggaggaggaggtaagctgggcagggtggaggtgctgcggggtgggacgaggggaaggaccagtgactgcttccgtcttcgcccctggtccagaactccacaccccagctagcagggatcctggcccgggtgctgaatggagaggcacctcctagcctaggcccttcctctgtggcctccccagaggacgtccaggccctgatgtacctgagagggcagctggagcctcagtggaagatgttgcagtgccatcctcacctggtggcttgaaatcggccaaggtgggagcatttacaccgcagaaatgacaccgcacgccagcgccccgcggccgcgatccggaccccaagcccacggctccctcgactctggggcacggaaccccgcccactcccaatccccgcgccccgccctctcccacccgtgcttcccccgctccacccctcacctcacctcgcccccgccccacccatcgcgccccggcccgtcccatcgaggcccatgcaacccacgctcggtcccgttccggcccctgcgccccgctgcgcttcgctccccgcccttgcgccgttagtaaacatcgctcaaacg

SEQ ID NO: 296144 - DNA, 2288 bp, Homo sapiens
gcgcagctccgagggctggcggctcggggcgccgaggcttccgcgcccgctggttcctcgctccggggcggagctcgcgatagcgaccgggagcagggcgcggggcgggacccaggtccgaggcgaggaagccggaagccaggcgcggggagcctcccccttcgactgcagcctcgctccgtgccttctgcgcgcctgggatcccggagcctgcctaggttctgtgcgctcccgcccaggccggtgcccgccgcccgcctgcgccccaggcaggtcccaggcctccggctgctcccggccgaagccccgagtgcgagatcgagcgtcctgagcgcctgaccgcagccctggatcgcctgcggcagcgcggcctggaacagaggtgtctgcggttgtcagcccgcgaggcctcggaagaggagctgggcctggtgcacagcccagagtatgtatccctggtcagggagacccaggtcctaggcaaggaggagctgcaggcgctgtccggacagttcgacgccatctacttccacccgagtacctttcactgcgcgcggctggccgcaggggctggactgcagctggtggacgctgtgctcactggagctgtgcaaaatgggcttgccctggtgaggcctcccgggcaccatggccagagggcggctgccaacgggttctgcgtgttcaacaacgtggccatagcagctgcacatgccaagcagaaacacgggctacacaggatcctcgtcgtggactgggatgtgcaccatggccaggggatccagtatctctttgaggatgaccccagcgtcctttacttctcctggcaccgctatgagcatgggcgcttctggcctttcctgcgagagtcagatgcagacgcagtggggcggggacagggcctcggcttcactgtcaacctgccctggaaccaggttgggatgggaaacgctgactacgtggctgccttcctgcacctgctgctcccactggcctttgagtttgaccctgagctggtgctggtctcggcaggatttgactcagccatcggggaccctgaggggcaaatgcaggccacgccagagtgcttcgcccacctcacacagctgctgcaggtgctggccggcggccgggtctgtgccgtgctggagggcggctaccacctggagtcactggcggagtcagtgtgcatgacagtacagacgctgctgggtgacccggccccacccctgtcagggccaatggcgccatgtcagaggtgcgaggggaggtagggcgggcagggccggggtgtgagaccaggtgtcacgactgttgtgtctccctcacagtgccctagagtccatccagagtgcccgtgctgcccaggccccgcactggaagagcctccagcagcaaggtcagtgtggccgggtgctaggctgcaggatcccacctcgggctcctgtgcagtggctatgactccgaactgtccctagatgtgaccgctgtgccgatgagccccagcagccactccccagaggggaggcctccacctctgctgcctgggggtccagtgtgtaaggcagctgcatctgcaccgagctccctcctggaccagccgtgcctctgccccgcaccctctgtccgcaccgctgttgccctgacaacgccggatatcacattggttctgccccctgacgtcatccaacaggaagcgtcagccgaggtaagctgggcagggtggaggtgctgcggggtgggacgaggggaaggaccagtgactgcttccgtcttcgcccctggtccagaactccacaccccagctagcagggatcctggcccgggtgctgaatggagaggcacctcctagcctaggcccttcctctgtggcctccccagaggacgtccaggccctgatgtacctgagagggcagctggagcctcagtggaagatgttgcagtgccatcctcacctggtggcttgaaatcggccaaggtgggagcatttacaccgcagaaatgacaccgcacgccagcgccccgcggccgcgatccggaccccaagcccacggctccctcgactctggggcacggaaccccgcccactcccaatccccgcgccccgccctctcccacccgtgcttcccccgctccacccctcacctcacctcgcccccgccccacccatcgcgccccggcccgtcccatcgaggcccatgcaacccacgctcggtcccgttccggcccctgcgccccgctgcgcttcgctccccgcccttgcgccgttagtaaacatcgctcaaacg

SEQ ID NO: 296145 - DNA, 140 bp, Homo sapiens
aggcgctgtccggacagttcgacgccatctacttccacccggtgcgtgtccccggacacactcacctgtgcagacacacatgcacgtgcctttgagcgttcacagccacggccgccaaccccagccagtgtcccctggtc

SEQ ID NO: 296146 - DNA, 1110 bp, Homo sapiens
agctcgtggcctccccgtggtcttgcgacgtttagcgactattgcgcctgcgccagcgccggctgcgagactggggccgtggctgctggtcccgggtgatgctaggcggctccctgggctccaggctgttgcggggtgtaggtgggagtcacggacggttcggggcccgaggtgtccgcgaaggtggcgcagccatggcggcaggggagagcatggctcagcggatggtctgggtggacctggagatgacaggattggacattgagaaggaccagattattgagatggcctgtctgataactgactctgatctcaacattttggctgaaggtcctaacctgattataaaacaaccagatgagttgctggacagcatgtcagattggtgtaaggagcatcacgggaagtctggccttaccaaggcagtgaaggagagtacaattacattgcagcaggcagagtatgaatttctgtcctttgtacgacagcagactcctccagggctctgtccacttgcaggaaattcagttcatgaagataagaagtttcttgacaaatacatgccccagttcatgaaacatcttcattatagaataattgatgtgagcactgttaaagaactgtgcagacgctggtatccagaagaatatgaatttgcaccaaagaaggctgcttctcatagggcacttgatgacattagtgaaagcatcaaagagcttcagttttaccgaaataacatcttcaagaaaaaaatagatgaaaagaagaggaaaattatagaaaatggggaaaatgagaagaccgtgagttgatgccagttatcatgctgccactacatcgttatctggaggcaacttctggtggtttttttttctcacgctgatggcttggcagagcaccttcggttaacttgcatctccagattgattactcaagcagacagcacacgaaatactatttttctcctaatatgctgtttccattatgacacagcagctcctttgtaagtaccaggtcatgtccatcccttggtacatatatgcatttgcttttaaaccatttcttttgtttaaataaataaataagtaaataaagctagttctattgaaa

SEQ ID NO: 296147 - DNA, 616 bp, Homo sapiens
aactctctaatttccaccgctacaggaaattcagttcatgaagataagaagtttcttgacaaatacatgccccagttcatgaaacatcttcattatagaataattgatgtgagcactgttaaagaactgtgcagacgctggtatccagaagaatatgaatttgcaccaaagaaggctgcttctcatagggcacttgatgacattagtgaaagcatcaaagagcttcagttttaccgaaataacatcttcaagaaaaaaatagatgaaaagaagaggaaaattatagaaaatggggaaaatgagaagaccgtgagttgatgccagttatcatgctgccactacatcgttatctggaggcaacttctggtggtttttttttctcacgctgatggcttggcagagcaccttcggttaacttgcatctccagattgattactcaagcagacagcacacgaaatactatttttctcctaatatgctgtttccattatgacacagcagctcctttgtaagtaccaggtcatgtccatcccttggtacatatatgcatttgcttttaaaccatttcttttgtttaaataaataaataagtaaataaagctagttctattgaaa

SEQ ID NO: 296148 - DNA, 671 bp, Homo sapiens
aactctctaatttccaccgctacaggaaattcagttcatgaagataagaagtttcttgacaaatacatgccccagttcatgaaacatcttcattatagaataattgatgtgagcactgttaaagaactgtgcagacgctggtatccagaagaatatgaatttgcaccaaagaaggctgcttctcatagggcacttgatgacattagtgaaagcatcaaagagcttcagttttaccgaaataacatcttcaagaaaaaaatagatgaaaagaagaggaaaattatagaaaatggggaaaatgagaagaccgtgagttgatgccagttatcatgctgccactacatcgttatctggaggcaacttctggtggtttttttttctcacgctgatggcttggcagagcaccttcggttaacttgcatctccagattgattactcaagcagacagcacacgaaatactatttttctcctaatatgctgtttccattatgacacagcagctcctttgtaagtaccaggtcatgtccatcccttggtacatatatgcatttgcttttaaaccatttcttttgtttaaataaataaataagtaaataaagctagttctattgaaaacacaaaaacaaaaaaaattggggggggccgggcccgaaaaattcttaaaaaccg

SEQ ID NO: 296149 - DNA, 883 bp, Homo sapiens
gctagcgggacgactctcttaatcttccaccgctacactctggccttaccaaggcagtgaaggagagtacaattacattgcagcaggcagagtatgaatttctgtcctttgtacgacagcagactcctccagggctctgtccacttgcaggaaattcagttcatgaagataagaagtttcttgacaaatacatgccccagttcatgaaacatcttcattatagaataattgatgtgagcactgttaaagaactgtgcagacgctggtatccagaagaatatgaatttgcaccaaagaaggctgcttctcatagggcacttgatgacattagtgaaagcatcaaagagcttcagttttaccgaaataacatcttcaagaaaaaaatagatgaaaagaagaggaaaattatagaaaatggggaaaatgagaagaccgtgagttgatgccagttatcatgctgccactacatcgttatctggaggcaacttctggtggtttttttttctcacgctgatggcttggcagagcaccttcggttaacttgcatctccagattgattactcaagcagacagcacacgaaatactatttttctcctaatatgctgtttccattatgacacagcagctcctttgtaagtaccaggtcatgtccatcccttggtacatatatgcatttgcttttaaaccatttcttttgtttaaataaataaataagtaaataaagctagttctattgaaaggggcggccgcttcctttagggaggggaattgaatgacccggctcatggatccgtagggtcaggggttcgggtgggcgagcgggtcaactttctctaacgcgggagtccgggttcccacagacaggggaaacgccggagagg

SEQ ID NO: 296150 - DNA, 612 bp, Homo sapiens
agctcgtggcctccccgtggtcttgcgacgtttagcgactattgcgcctgcgccagcgccggctgcgagactggggccgtggctgctggtcccgggtgatgctaggcggctccctgggctccaggctgttgcggggtgtaggtgggagtcacggacggttcggggcccgaggtgtccgcgaaggtggcgcagccatggcggcaggggagagcatggctcagcggatggtctgggtggacctggagatgacaggattggacattgagaaggaccagattattgagatggcctgtctgataactgactctgatctcaacattttggctgaaggcacttgatgacattagtgaaagcatcaaagagcttcagttttaccgaaataacatcttcaagaaaaaaaaaaaaaaaaaaaaaaaaaaaaaaaaaacttggggggcctttttgttgtcgggggggggaaaagggggttatggggaaggggcccggtggtaatatggtgtgttttctgggccccggttttttgtgtgcaaagggggggaaatcgggggggcccccaatttgggggggggatatataaatttggaaaaggccgggttaaccggggttataggg

SEQ ID NO: 296151 - DNA, 1247 bp, Homo sapiens
taattaaccatgccagaaatttacagaaacataaattctgtcgtttactgagcgcttactgtatgccagctacagtttctgtgtgctttatatgtctttgttcttagttctcacagcaactataagttagttattgttataatgctcatttgatggatgaggacacttgagcatagagatgttgggtaatttgtctgaggtcccagtggctgtttactgggggagccaagagtttaactcaggctgtctcagtaaggtgctcctaacaagtaggacagccagctgtcctcccatcagatttggtgactcgtgccaatgtttgcgtctttatatcataaccttgactttaacttgactccatatttacaattctgccttttcaactaggacatgtgattcttctagatcagtattaagattttagaatttctgttagtgcacacccgtaaagtgttctgttgttgacagattgggcatgattaaggtttttgcatgctacttccaactgaaacatttagcaaaacaaaacacacctgctgcatttcagccactcatgaaacatttaataaggatgtgacaccatctggtagggggtgaaatccctgaccctgaataattctgttttatactgtcagcagtattcagagccagaaactccagaataggaacaaagtagggatgtttgtggaaaagagagtcttgttaaaataagttcctagagggtagcattgatatgttactggcactggatacatttcgtaaatctgcagttaacacttttgtttgttttgctgtgtaggtaaaagaggtgaggacgtatttctagattaatgactgcgtttgtggagtaccaggcttatcctccccacatatcaactgtaggagaatcatgagactttgtacttctcatcataacaacttttttaactttgtataaataaagccctgagttttagatttggttgtttttttctgttacttgggatttattggagatcaatagtgaagagaagtgtctttattttaccagtctaacttacccttggccgaagaagagtgtttcctttagactgttgatataatgtgaaatactgacagtttaatggacccgtaggttgatatgtaccctggaggaaatttgggtatgtattcacacagctgcagatgaatgcagcatttgtaaatggactaagtcagatgaggataaagatgttaaaaaaaaaaaaaaagcttaggggctatcagtt

SEQ ID NO: 296152 - DNA, 777 bp, Homo sapiens
agctcgtggcctccccgtggtcttgcgacgtttagcgactattgcgcctgcgccagcgccggctgcgagactggggccgtggctgctggtcccgggtgatgctaggcggctccctgggctccaggctgttgcggggtgtaggtgggagtcacggacggttcggggcccgaggtgtccgcgaaggtggcgcagccatggcggcaggggagagcatggctcagcggatggtctgggtggacctggagatgacaggattggacattgagaaggaccagattattgagatggcctgtctgataactgactctgatctcaacattttggctgaagtaaaagaggtgaggacgtatttctagattaatgactgcgtttgtggagtaccaggcttatcctccccacatatcaactgtaggagaatcatgagactttgtacttctcatcataacaacttttttaactttgtataaataaagccctgagttttagatttggttgtttttttctgttacttgggatttattggagatcaatagtgaagagaagtgtctttattttaccagtctaacttacccttggccgaagaagagtgtttcctttagactgttgatataatgtgaaatactgacagtttaatggacccgtaggttgatatgtaccctggaggaaatttgggtatgtattcacacagctgcagatgaatgcagcatttgtaaatggactaagtcagatgaggataaagatgttaaaaaaaaaaaaaaagcttaggggctatcagtt

SEQ ID NO: 296153 - DNA, 740 bp, Homo sapiens
agctcgtggcctccccgtggtcttgcgacgtttagcgactattgcgcctgcgccagcgccggctgcgagactggggccgtggctgctggtcccgggtgatgctaggcggctccctgggctccaggctgttgcggggtgtaggtgggagtcacggacggttcggggcccgaggtgtccgcgaaggtggcgcagccatggcggcaggggagagcatggctcagcggatggtctgggtggacctggagatgacaggattggacattgagaaggaccagattattgagatggcctgtctgataactgactctgatctcaacattttggctgaagaaattcagttcatgaagataagaagtttcttgacaaatacatgccccagttcatgaaacatcttcattatagaataattgatgtgagcactgttaaagaactgtgcaggtaagggctatatttaggatccattaaattacctcatttagcatgttttaattgagaatttgtggaaagtaattggatagagctgtagaactaaggctaccaagtgggttcatatcttcctcatcccattcttgcttgtataggaccttaacttaccctggactggtgagaattgggagaaacaacgtcagacatgttcccagtaaataagccaatgcctggcacaaaataagtgctcaagtacattttctggattaactaatattatgtggaagtcttgtgactgggaacatatagatgaa

SEQ ID NO: 296154 - DNA, 385 bp, Homo sapiens
ggctatggattacaagctgaccatgtttgagggaatcccctgttaaataaacttgggtaaaagaggcccagaatgatggctttgtgtgtgttatatatttatttttaattgcagatgacaggattggacattgagaaggaccagattattgagatggcctgtctgataactgactctgatctcaacattttggctgaagtacgtgatgcccatgtaatacagtcatactttttaaagggcactggaaatataaccatcattttttccagcttctttatttaaaaaataagaaagttgaggtctatatgggttaaggtaatgtgctaggtcatggtaggggtggtactagaaccaaagtaatccatctcacagcctagtgaaaatt

SEQ ID NO: 296155 - DNA, 1232 bp, Homo sapiens
  misc_feature (1162)..(1162): n is a, c, g, or t
  misc_feature (1232)..(1232): n is a, c, g, or t
agctcgtggcctccccgtggtcttgcgacgtttagcgactattgcgcctgcgccagcgccggctgcgagactggggccgtggctgctggtcccgggtgatgctaggcggctccctgggctccaggctgttgcggggtgtaggtgggagtcacggacggttcggggcccgaggtgtccgcgaaggtggcgcagccatggcggcaggggagagcatggctcagcggatggtctgggtggacctggagatgacaggattggacattgagaaggaccagattattgagatggcctgtctgataactgactctgatctcaacattttggctgaaggtcctaacctgattataaaacaaccagatgagttgctggacagcatgtcagattggtgtaaggagcatcacgggaagtctggccttaccaaggcagtgaaggagagtacaattacattgcagcaggcagagtatgaatttctgtcctttgtacgacagcagactcctccagggctctgtccacttgcaggaaattcagttcatgaagataagaagtttcttgacaaatacatgccccagttcatgaaacatcttcattatagaataattgatgtgagcactgttaaagaactgtgcagacgctggtatccagaagaatatgaatttgcaccaaagaaggctgcttctcatagggcacttgatgacattagtgaaagcatcaaagagcttcagttttaccgaaataacatcttcaagaaaaaaatagatgaaaagaagaggaaaattatagaaaatggggaaaatgagaagaccgtgagttgatgccagttatcatgctgccactacatcgttatctggaggcaacttctggtggtttttttttctcacgctgatggcttggcagagcaccttcggttaacttgcatctccagattgattactcaagcagacagcacacgaaatactatttttctcctaatatgctgtttccattatgacacagcagctcctttgtaagtaccaggtcatgtccatcccttggtacatatatgcatttgcttttaaaccatttcttttgtttaaataaataaataagtaaataaagctagttctattgaaaaaaaaaaacaaataacccatctagcctgaatccgcccgcataagattgtgtntgttttccggtggccccgttccttttaagaggttaatccccaaccccgctcaagcccagagctcgcgtgn

SEQ ID NO: 296156 - DNA, 1223 bp, Homo sapiens
  misc_feature (1223)..(1223): n is a, c, g, or t
agctcgtggcctccccgtggtcttgcgacgtttagcgactattgcgcctgcgccagcgccggctgcgagactggggccgtggctgctggtcccgggtgatgctaggcggctccctgggctccaggctgttgcggggtgtaggtgggagtcacggacggttcggggcccgaggtgtccgcgaaggtggcgcagccatggcggcaggggagagcatggctcagcggatggtctgggtggacctggagatgacaggattggacattgagaaggaccagattattgagatggcctgtctgataactgactctgatctcaacattttggctgaaggtcctaacctgattataaaacaaccagatgagttgctggacagcatgtcagattggtgtaaggagcatcacgggaagtctggccttaccaaggcagtgaaggagagtacaattacattgcagcaggcagagtatgaatttctgtcctttgtacgacagcagactcctccagggctctgtccacttgcaggaaattcagttcatgaagataagaagtttcttgacaaatacatgccccagttcatgaaacatcttcattatagaataattgatgtgagcactgttaaagaactgtgcagacgctggtatccagaagaatatgaatttgcaccaaagaaggctgcttctcatagggcacttgatgacattagtgaaagcatcaaagagcttcagttttaccgaaataacatcttcaagaaaaaaatagatgaaaagaagaggaaaattatagaaaatggggaaaatgagaagaccgtgagttgatgccagttatcatgctgccactacatcgttatctggaggcaacttctggtggtttttttttctcacgctgatggcttggcagagcaccttcggttaacttgcatctccagattgattactcaagcagacagcacacgaaatactatttttctcctaatatgctgtttccattatgacacagcagctcctttgtaagtaccaggtcatgtccatcccttggtacatatatgcatttgcttttaaaccatttcttttgtttaaataaataaataagtaaataaagctagttctattgaaaacgcggccgtccctttggggggggaataatgatccccgctactgactccgtgcgctgggcgttccgtgggggaacggtttcccttcttaaggcggaatccggtattccaaatn

SEQ ID NO: 296157 - DNA, 1298 bp, Homo sapiens
agctcgtggcctccccgtggtcttgcgacgtttagcgactattgcgcctgcgccagcgccggctgcgagactggggccgtggctgctggtcccgggtgatgctaggcggctccctgggctccaggctgttgcggggtgtaggtgggagtcacggacggttcggggcccgaggtgtccgcgaaggtggcgcagccatggcggcaggggagagcatggctcagcggatggtctgggtggacctggagatgacaggattggacattgagaaggaccagattattgagatggcctgtctgataactgactctgatctcaacattttggctgaaggtcctaacctgattataaaacaaccagatgagttgctggacagcatgtcagattggtgtaaggagcatcacgggaagtctggccttaccaaggcagtgaaggagagtacaattacattgcagcaggcagagtatgaatttctgtcctttgtacgacagcagactcctccagggctctgtccacttgcaggaaattcagttcatgaagataagaagtttcttgacaaatacatgccccagttcatgaaacatcttcattatagaataattgatgtgagcactgttaaagaactgtgcagacgctggtatccagaagaatatgaatttgcaccaaagaaggctgcttctcatagggcacttgatgacattagtgaaagcatcaaagagcttcagttttaccgaaataacatcttcaagaaaaaaatagatgaaaagaagaggaaaattatagaaaatggggaaaatgagaagaccgtgagttgatgccagttatcatgctgccactacatcgttatctggaggcaacttctggtggtttttttttctcacgctgatggcttggcagagcaccttcggttaacttgcatctccagattgattactcaagcagacagcacacgaaatactatttttctcctaatatgctgtttccattatgacacagcagctcctttgtaagtaccaggtcatgtccatcccttggtacatatatgcatttgcttttaaaccatttcttttgtttaaataaataaataagtaaataaagctagttctattgaaaaacaacccaccaaggcaaaaaaaatctttgttggggcgctctggccctagaaaaagtttctttaaccccatttggtgtggggcgccgggcccagttagggttagcggaacactgtggccatagggcggtttccccagggaaacccccgggccgaacacaggtggcgtgggtttcccccccaatataag

SEQ ID NO: 296158 - DNA, 1252 bp, Homo sapiens
agctcgtggcctccccgtggtcttgcgacgtttagcgactattgcgcctgcgccagcgccggctgcgagactggggccgtggctgctggtcccgggtgatgctaggcggctccctgggctccaggctgttgcggggtgtaggtgggagtcacggacggttcggggcccgaggtgtccgcgaaggtggcgcagccatggcggcaggggagagcatggctcagcggatggtctgggtggacctggagatgacaggattggacattgagaaggaccagattattgagatggcctgtctgataactgactctgatctcaacattttggctgaaggtcctaacctgattataaaacaaccagatgagttgctggacagcatgtcagattggtgtaaggagcatcacgggaagtctggccttaccaaggcagtgaaggagagtacaattacattgcagcaggcagagtatgaatttctgtcctttgtacgacagcagactcctccagggctctgtccacttgcaggaaattcagttcatgaagataagaagtttcttgacaaatacatgccccagttcatgaaacatcttcattatagaataattgatgtgagcactgttaaagaactgtgcagacgctggtatccagaagaatatgaatttgcaccaaagaaggctgcttctcatagggcacttgatgacattagtgaaagcatcaaagagcttcagttttaccgaaataacatcttcaagaaaaaaatagatgaaaagaagaggaaaattatagaaaatggggaaaatgagaagaccgtgagttgatgccagttatcatgctgccactacatcgttatctggaggcaacttctggtggtttttttttctcacgctgatggcttggcagagcaccttcggttaacttgcatctccagattgattactcaagcagacagcacacgaaatactatttttctcctaatatgctgtttccattatgacacagcagctcctttgtaagtaccaggtcatgtccatcccttggtacatatatgcatttgcttttaaaccatttcttttgtttaaataaataaataagtaaataaagctagttctattgaaaggggcggccgcttcctttagggaggggaattgaatgacccggctcatggatccgtagggtcaggggttcgggtgggcgagcgggtcaactttctctaacgcgggagtccgggttcccacagacaggggaaacgccggagagg

SEQ ID NO: 296159 - DNA, 1154 bp, Homo sapiens
agctcgtggcctccccgtggtcttgcgacgtttagcgactattgcgcctgcgccagcgccggctgcgagactggggccgtggctgctggtcccgggtgatgctaggcggctccctgggctccaggctgttgcggggtgtaggtgggagtcacggacggttcggggcccgaggtgtccgcgaaggtggcgcagccatggcggcaggggagagcatggctcagcggatggtctgggtggacctggagatgacaggattggacattgagaaggaccagattattgagatggcctgtctgataactgactctgatctcaacattttggctgaaggtcctaacctgattataaaacaaccagatgagttgctggacagcatgtcagattggtgtaaggagcatcacgggaagtctggccttaccaaggcagtgaaggagagtacaattacattgcagcaggcagagtatgaatttctgtcctttgtacgacagcagactcctccagggctctgtccacttgcaggaaattcagttcatgaagataagaagtttcttgacaaatacatgccccagttcatgaaacatcttcattatagaataattgatgtgagcactgttaaagaactgtgcagacgctggtatccagaagaatatgaatttgcaccaaagaaggctgcttctcatagggcacttgatgacattagtgaaagcatcaaagagcttcagttttaccgaaataacatcttcaagaaaaaaatagatgaaaagaagaggaaaattatagaaaatggggaaaatgagaagaccgtgagttgatgccagttatcatgctgccactacatcgttatctggaggcaacttctggtggtttttttttctcacgctgatggcttggcagagcaccttcggttaacttgcatctccagattgattactcaagcagacagcacacgaaatactatttttctcctaatatgctgtttccattatgacacagcagctcctttgtaagtaccaggtcatgtccatcccttggtacatatatgcatttgcttttaaaccatttcttttgtttaaataaataaataagtaaataaagctagttctattgaaaaggctgcccgttcctttaaggagggtaaatcctgatcctcgccc

SEQ ID NO: 296160 - DNA, 1163 bp, Homo sapiens
agctcgtggcctccccgtggtcttgcgacgtttagcgactattgcgcctgcgccagcgccggctgcgagactggggccgtggctgctggtcccgggtgatgctaggcggctccctgggctccaggctgttgcggggtgtaggtgggagtcacggacggttcggggcccgaggtgtccgcgaaggtggcgcagccatggcggcaggggagagcatggctcagcggatggtctgggtggacctggagatgacaggattggacattgagaaggaccagattattgagatggcctgtctgataactgactctgatctcaacattttggctgaaggtcctaacctgattataaaacaaccagatgagttgctggacagcatgtcagattggtgtaaggagcatcacgggaagtctggccttaccaaggcagtgaaggagagtacaattacattgcagcaggcagagtatgaatttctgtcctttgtacgacagcagactcctccagggctctgtccacttgcaggaaattcagttcatgaagataagaagtttcttgacaaatacatgccccagttcatgaaacatcttcattatagaataattgatgtgagcactgttaaagaactgtgcagacgctggtatccagaagaatatgaatttgcaccaaagaaggctgcttctcatagggcacttgatgacattagtgaaagcatcaaagagcttcagttttaccgaaataacatcttcaagaaaaaaatagatgaaaagaagaggaaaattatagaaaatggggaaaatgagaagaccgtgagttgatgccagttatcatgctgccactacatcgttatctggaggcaacttctggtggtttttttttctcacgctgatggcttggcagagcaccttcggttaacttgcatctccagattgattactcaagcagacagcacacgaaatactatttttctcctaatatgctgtttccattatgacacagcagctcctttgtaagtaccaggtcatgtccatcccttggtacatatatgcatttgcttttaaaccatttcttttgtttaaataaataaataagtaaataaagctagttctattgaaacatgatcggctcgcctctttcacgtaccgacaatacacgaccgccacgtcaat

SEQ ID NO: 296161 - DNA, 1165 bp, Homo sapiens
agctcgtggcctccccgtggtcttgcgacgtttagcgactattgcgcctgcgccagcgccggctgcgagactggggccgtggctgctggtcccgggtgatgctaggcggctccctgggctccaggctgttgcggggtgtaggtgggagtcacggacggttcggggcccgaggtgtccgcgaaggtggcgcagccatggcggcaggggagagcatggctcagcggatggtctgggtggacctggagatgacaggattggacattgagaaggaccagattattgagatggcctgtctgataactgactctgatctcaacattttggctgaaggtcctaacctgattataaaacaaccagatgagttgctggacagcatgtcagattggtgtaaggagcatcacgggaagtctggccttaccaaggcagtgaaggagagtacaattacattgcagcaggcagagtatgaatttctgtcctttgtacgacagcagactcctccagggctctgtccacttgcaggaaattcagttcatgaagataagaagtttcttgacaaatacatgccccagttcatgaaacatcttcattatagaataattgatgtgagcactgttaaagaactgtgcagacgctggtatccagaagaatatgaatttgcaccaaagaaggctgcttctcatagggcacttgatgacattagtgaaagcatcaaagagcttcagttttaccgaaataacatcttcaagaaaaaaatagatgaaaagaagaggaaaattatagaaaatggggaaaatgagaagaccgtgagttgatgccagttatcatgctgccactacatcgttatctggaggcaacttctggtggtttttttttctcacgctgatggcttggcagagcaccttcggttaacttgcatctccagattgattactcaagcagacagcacacgaaatactatttttctcctaatatgctgtttccattatgacacagcagctcctttgtaagtaccaggtcatgtccatcccttggtacatatatgcatttgcttttaaaccatttcttttgtttaaataaataaataagtaaataaagctagttctattgaaaacacaaaaacaaaaaaaattggggggggccgggcccgaaaaattcttaaaaaccg

SEQ ID NO: 296162 - DNA, 1956 bp, Homo sapiens
tttaattttgtagaaatgaggtcttgctatgttgcctggactggtcttgaactactggcctcaagtgatcctcccacctcggcctcccagagtgctgggattaccatgcttggcctagacacttttcaaaatgaactcataatcaagggttgacagacttttctggaaagagcaagttattaaattgtttaggctttgagtgcagtcatatgttcttgtcatatgttcttttttttttttaaacaatcttttacaaatgtaaaaatcattcttagctttctagctattaataaatagctgaagtgtggggccatagtttgctgacccttgatagatatctgtgtcatctatttgtaggattagagttttcagtggtgtgtgtatgttcgtatgttctattttgccttaatgaacagtgctggaatgaagggggaacacttaaagtatccttatctcttactttctctgatatgtatatttagtccttaaaacagcttaagctttccctctgaaagtaaggttattcctgttgtttcttggtgactgatggcgtttcccatccacagggtcctaacctgattataaaacaaccagatgagttgctggacagcatgtcagattggtgtaaggagcatcacgggaaggtaacattaccaaataacaggattgctgctttggggatcagtagcaagctttttgctcccacacctgaatccgataccattgttggatggtattttaaaaaggcttagagaagattgcatggcaagcctgggaaactgcttgcttgtttacttttcatctttgggacctctcgagatcatcttctcctgaatgtcctcttttttttctctcctacattcagtctgtcgcgaacgcattgtggattgtcaagtattactcaagtcagtcttttggataaggttagacatcaactttcagagaagggggattgctgctctcctgttaatagttgtttcttcccagaggttaatatccttggactttgaacaccgtcttttttgactgtggacatgctattaacagtcaggatcataactaagttggcttggattccattgaagaaaaaaaaatggtgcaaagatggcagttgcaatttgaacttgagctctaaaaatggtctatttgtggttatatttgcccattttaaaagtgaaatttcatttctggatgcctttgaaaactgactttacatgtgtttttggtggggggctggggattctctcttgcagtctggccttaccaaggcagtgaaggagagtacaattacattgcagcaggcagagtatgaatttctgtcctttgtacgacagcagactcctccagggctctgtccacttgcaggaaattcagttcatgaagataagaagtttcttgacaaatacatgccccagttcatgaaacatcttcattatagaataattgatgtgagcactgttaaagaactgtgcagacgctggtatccagaagaatatgaatttgcaccaaagaaggctgcttctcatagggcacttgatgacattagtgaaagcatcaaagagcttcagttttaccgaaataacatcttcaagaaaaaaatagatgaaaagaagaggaaaattatagaaaatggggaaaatgagaagaccgtgagttgatgccagttatcatgctgccactacatcgttatctggaggcaacttctggtggtttttttttctcacgctgatggcttggcagagcaccttcggttaacttgcatctccagattgattactcaagcagacagcacacgaaatactatttttctcctaatatgctgtttccattatgacacagcagctcctttgtaagtaccaggtcatgtccatcccttggtacatatatgcatttgcttttaaaccatttcttttgtttaaataaataaataagtaaataaagctagttctattgaaa

SEQ ID NO: 296163 - DNA, 1719 bp, Homo sapiens
agctcgtggcctccccgtggtcttgcgacgtttagcgactattgcgcctgcgccagcgccggctgcgagactggggccgtggctgctggtcccgggtgatgctaggcggctccctgggctccaggctgttgcggggtgtaggtgggagtcacggacggttcggggcccgaggtgtccgcgaaggtggcgcagccatggcggcaggggagagcatggctcagcggatggtctgggtggacctggagatgacaggattggacattgagaaggaccagattattgagatggcctgtctgataactgactctgatctcaacattttggctgaaggtcctaacctgattataaaacaaccagatgagttgctggacagcatgtcagattggtgtaaggagcatcacgggaaggtaacattaccaaataacaggattgctgctttggggatcagtagcaagctttttgctcccacacctgaatccgataccattgttggatggtattttaaaaaggcttagagaagattgcatggcaagcctgggaaactgcttgcttgtttacttttcatctttgggacctctcgagatcatcttctcctgaatgtcctcttttttttctctcctacattcagtctgtcgcgaacgcattgtggattgtcaagtattactcaagtcagtcttttggataaggttagacatcaactttcagagaagggggattgctgctctcctgttaatagttgtttcttcccagaggttaatatccttggactttgaacaccgtcttttttgactgtggacatgctattaacagtcaggatcataactaagttggcttggattccattgaagaaaaaaaaatggtgcaaagatggcagttgcaatttgaacttgagctctaaaaatggtctatttgtggttatatttgcccattttaaaagtgaaatttcatttctggatgcctttgaaaactgactttacatgtgtttttggtggggggctggggattctctcttgcagtctggccttaccaaggcagtgaaggagagtacaattacattgcagcaggcagagtatgaatttctgtcctttgtacgacagcagactcctccagggctctgtccacttgcaggaaattcagttcatgaagataagaagtttcttgacaaatacatgccccagttcatgaaacatcttcattatagaataattgatgtgagcactgttaaagaactgtgcagacgctggtatccagaagaatatgaatttgcaccaaagaaggctgcttctcatagggcacttgatgacattagtgaaagcatcaaagagcttcagttttaccgaaataacatcttcaagaaaaaaatagatgaaaagaagaggaaaattatagaaaatggggaaaatgagaagaccgtgagttgatgccagttatcatgctgccactacatcgttatctggaggcaacttctggtggtttttttttctcacgctgatggcttggcagagcaccttcggttaacttgcatctccagattgattactcaagcagacagcacacgaaatactatttttctcctaatatgctgtttccattatgacacagcagctcctttgtaagtaccaggtcatgtccatcccttggtacatatatgcatttgcttttaaaccatttcttttgtttaaataaataaataagtaaataaagctagttctattgaaa

SEQ ID NO: 296164 - DNA, 1626 bp, Homo sapiens
tttaattttgtagaaatgaggtcttgctatgttgcctggactggtcttgaactactggcctcaagtgatcctcccacctcggcctcccagagtgctgggattaccatgcttggcctagacacttttcaaaatgaactcataatcaagggttgacagacttttctggaaagagcaagttattaaattgtttaggctttgagtgcagtcatatgttcttgtcatatgttcttttttttttttaaacaatcttttacaaatgtaaaaatcattcttagctttctagctattaataaatagctgaagtgtggggccatagtttgctgacccttgatagatatctgtgtcatctatttgtaggattagagttttcagtggtgtgtgtatgttcgtatgttctattttgccttaatgaacagtgctggaatgaagggggaacacttaaagtatccttatctcttactttctctgatatgtatatttagtccttaaaacagcttaagctttccctctgaaagtaaggttattcctgttgtttcttggtgactgatggcgtttcccatccacagggtcctaacctgattataaaacaaccagatgagttgctggacagcatgtcagattggtgtaaggagcatcacgggaaggtaacattaccaaataacaggattgctgctttggggatcagtagcaagctttttgctcccacacctgaatccgataccattgttggatggtattttaaaaaggcttagagaagattgcatggcaagcctgggaaactgcttgcttgtttacttttcatctttgggacctctcgagatcatcttctcctgaatgtcctcttttttttctctcctacattcagtctgtcgcgaacgcattgtggattgtcaagtattactcaagtcagtcttttggataagtctggccttaccaaggcagtgaaggagagtacaattacattgcagcaggcagagtatgaatttctgtcctttgtacgacagcagactcctccagggctctgtccacttgcaggaaattcagttcatgaagataagaagtttcttgacaaatacatgccccagttcatgaaacatcttcattatagaataattgatgtgagcactgttaaagaactgtgcagacgctggtatccagaagaatatgaatttgcaccaaagaaggctgcttctcatagggcacttgatgacattagtgaaagcatcaaagagcttcagttttaccgaaataacatcttcaagaaaaaaatagatgaaaagaagaggaaaattatagaaaatggggaaaatgagaagaccgtgagttgatgccagttatcatgctgccactacatcgttatctggaggcaacttctggtggtttttttttctcacgctgatggcttggcagagcaccttcggttaacttgcatctccagattgattactcaagcagacagcacacgaaatactatttttctcctaatatgctgtttccattatgacacagcagctcctttgtaagtaccaggtcatgtccatcccttggtacatatatgcatttgcttttaaaccatttcttttgtttaaataaataaataagtaaataaagctagttctattgaaa

SEQ ID NO: 296165 - DNA, 3282 bp, Homo sapiens
tttaattttgtagaaatgaggtcttgctatgttgcctggactggtcttgaactactggcctcaagtgatcctcccacctcggcctcccagagtgctgggattaccatgcttggcctagacacttttcaaaatgaactcataatcaagggttgacagacttttctggaaagagcaagttattaaattgtttaggctttgagtgcagtcatatgttcttgtcatatgttcttttttttttttaaacaatcttttacaaatgtaaaaatcattcttagctttctagctattaataaatagctgaagtgtggggccatagtttgctgacccttgatagatatctgtgtcatctatttgtaggattagagttttcagtggtgtgtgtatgttcgtatgttctattttgccttaatgaacagtgctggaatgaagggggaacacttaaagtatccttatctcttactttctctgatatgtatatttagtccttaaaacagcttaagctttccctctgaaagtaaggttattcctgttgtttcttggtgactgatggcgtttcccatccacagggtcctaacctgattataaaacaaccagatgagttgctggacagcatgtcagattggtgtaaggagcatcacgggaaggtaacattaccaaataacaggattgctgctttggggatcagtagcaagctttttgctcccacacctgaatccgataccattgttggatggtattttaaaaaggcttagagaagattgcatggcaagcctgggaaactgcttgcttgtttacttttcatctttgggacctctcgagatcatcttctcctgaatgtcctcttttttttctctcctacattcagtctgtcgcgaacgcattgtggattgtcaagtattactcaagtcagtcttttggataaggttagacatcaactttcagagaagggggattgctgctctcctgttaatagttgtttcttcccagaggttaatatccttggactttgaacaccgtcttttttgactgtggacatgctattaacagtcaggatcataactaagttggcttggattccattgaagaaaaaaaaatggtgcaaagatggcagttgcaatttgaacttgagctctaaaaatggtctatttgtggttatatttgcccattttaaaagtgaaatttcatttctggatgcctttgaaaactgactttacatgtgtttttggtggggggctggggattctctcttgcagtctggccttaccaaggcagtgaaggagagtacaattacattgcagcaggcagagtatgaatttctgtcctttgtacgacagcagactcctccagggctctgtccacttgcaggtaaaatccaatcctgtgtatatcttatagtcttccatatgtagtggttcaagagactgcagttccagaaagactagccgagcccatccatgtcttccacttaaccctgctttgggttacacatcttaacttttctgttcaagtttctctgtgtagtttatagcatgagtattgggaaaatgccctgaaacctgacatgagatctgggaaacacaaacttactcaataagaatttctcccatatttttatgatggaaaaatttcacatgcacagaggagtggatttagtaattgttaaccttgtgtcgtatttgttttacctattttttgttggacattttaaaggaaattgcaggcatcaggacacttcattcctaaatacttcatcaaacatctcctaagataaagacattttcttatgtaatacaatgtcattgcattgaagataattaaacattattcagtatcatatgatatctagtccacattagatgttccccaaaatatttgtttttgaaccaggattcagtcaaggctcgtgcatttcatttagttatatttctttagtctcttaatgtaaaactttccacctattatttttcccctgtgtcattgactttctaaagagaccaggcctgttctaccaggatttttaaaagggtgacattgccagagggaagttaatgtttctctgaaggtatatgtgcgtttgtatatgtaagtcgatgtggtagctaatactgttcttaaacatttataaaaataagttttggcattaagtactagagcatatattgtgtaaatgtttccgccagccaatgtggctgatatctgttttaaaggtctcatttaaaatttagtgtttttagtataagttactttttggggacataaatatgcatatgatttgtttaaaaatttggattgtaaataaaggtttatctacctatgtgattcagttaaatttttagtgttagtggtgtgaattttgtgacactgggagaaagtttgcatatcaggtatgaccttagaaagtaacaaatagatttgtgcattacatcaagcatgtggaatgatagatttgtccttctgttcatgagaggtcatttacaaatttataaggagctaaactgactaagtacttggaaatctgtacttgtaagctaatcacatttacccaaacctgatttagaaatatagaggtgcttttaggaattgtttgaattttaaaaaatcatctccatttcaaatacaacttatgaattttgatatcctgttgtataatactagaaatatagagatgcagtatgcttcgtgtctttctaggaaattcagttcatgaagataagaagtttcttgacaaatacatgccccagttcatgaaacatcttcattatagaataattgatgtgagcactgttaaagaactgtgcagacgctggtatccagaagaatatgaatttgcaccaaagaaggctgcttctcatagggcacttgatgacattagtgaaagcatcaaagagcttcagttttaccgaaataacatcttcaagaaaaaaatagatgaaaagaagaggaaaattatagaaaatggggaaaatgagaagaccgtgagttgatgccagttatcatgctgccactacatcgttatctggaggcaacttctggtggtttttttttctcacgctgatggcttggcagagcaccttcggttaacttgcatctccagattgattactcaagcagacagcacacgaaatactatttttctcctaatatgctgtttccattatgacacagcagctcctttgtaagtaccaggtcatgtccatcccttggtacatatatgcatttgcttttaaaccatttcttttgtttaaataaataaataagtaaataaagctagttctattgaaa

SEQ ID NO: 296166 - DNA, 748 bp, Homo sapiens
  misc_feature (18)..(18): n is a, c, g, or t
cccccgggctcgcagganttcggcacgagggagcatcacgggaagtctggccttaccaaggcagtgaaggagagtacaattacattgcagcaggcagagtatgaatttctgtcctttgtacgacagcagactcctccagggctctgtccacttgcaggaaattcagttcatgaagataagaagtttcttgacaaatacatgccccagttcatgaaacatcttcattatagaataattgatgtgagcactgttaaagaactgtgcagacgctggtatccagaagaatatgaatttgcaccaaagaaggctgcttctcatagggcacttgatgacattagtgaaagcatcaaagagcttcagttttaccgaaataacatcttcaagaaaaaaatagatgaaaagaagaggaaaattatagaaaatggggaaaatgagaagaccgtgagttgatgccagttatcatgctgccactacatcgttatctggaggcaacttctggtggtttttttttctcacgctgatggcttggcagagcaccttcggttaacttgcatctccagattgattactcaagcagacagcacacgaaatactatttttctcctaatatgctgtttccattatgacacagcagctcctttgtaagtaccaggtcatgtccatcccttggtacatatatgcatttgcttttaaaccatttcttttgtttaaataaataaataagtaaataaagctagttctattgaaa

SEQ ID NO: 296167 - DNA, 1496 bp, Homo sapiens
tttaattttgtagaaatgaggtcttgctatgttgcctggactggtcttgaactactggcctcaagtgatcctcccacctcggcctcccagagtgctgggattaccatgcttggcctagacacttttcaaaatgaactcataatcaagggttgacagacttttctggaaagagcaagttattaaattgtttaggctttgagtgcagtcatatgttcttgtcatatgttcttttttttttttaaacaatcttttacaaatgtaaaaatcattcttagctttctagctattaataaatagctgaagtgtggggccatagtttgctgacccttgatagatatctgtgtcatctatttgtaggattagagttttcagtggtgtgtgtatgttcgtatgttctattttgccttaatgaacagtgctggaatgaagggggaacacttaaagtatccttatctcttactttctctgatatgtatatttagtccttaaaacagcttaagctttccctctgaaagtaaggttattcctgttgtttcttggtgactgatggcgtttcccatccacagggtcctaacctgattataaaacaaccagatgagttgctggacagcatgtcagattggtgtaaggagcatcacgggaaggtaacattaccaaataacaggattgctgctttggggatcagtagcaagctttttgctcccacacctgaatccgataccattgttggatggtattttaaaaaggcttagagaagattgcatggcaagcctgggaaactgcttgcttgtttacttttcatctttgggacctctcgagatcatcttctcctgaatgtcctcttttttttctctcctacattcagtctgtcgcgaacgcattgtggattgtcaagtattactcaagaaattcagttcatgaagataagaagtttcttgacaaatacatgccccagttcatgaaacatcttcattatagaataattgatgtgagcactgttaaagaactgtgcagacgctggtatccagaagaatatgaatttgcaccaaagaaggctgcttctcatagggcacttgatgacattagtgaaagcatcaaagagcttcagttttaccgaaataacatcttcaagaaaaaaatagatgaaaagaagaggaaaattatagaaaatggggaaaatgagaagaccgtgagttgatgccagttatcatgctgccactacatcgttatctggaggcaacttctggtggtttttttttctcacgctgatggcttggcagagcaccttcggttaacttgcatctccagattgattactcaagcagacagcacacgaaatactatttttctcctaatatgctgtttccattatgacacagcagctcctttgtaagtaccaggtcatgtccatcccttggtacatatatgcatttgcttttaaaccatttcttttgtttaaataaataaataagtaaataaagctagttctattgaaa

SEQ ID NO: 296168 - DNA, 998 bp, Homo sapiens
agctcgtggcctccccgtggtcttgcgacgtttagcgactattgcgcctgcgccagcgccggctgcgagactggggccgtggctgctggtcccgggtgatgctaggcggctccctgggctccaggctgttgcggggtgtaggtgggagtcacggacggttcggggcccgaggtgtccgcgaaggtggcgcagccatggcggcaggggagagcatggctcagcggatggtctgggtggacctggagatgacaggattggacattgagaaggaccagattattgagatggcctgtctgataactgactctgatctcaacattttggctgaaggtcctaacctgattataaaacaaccagatgagttgctggacagcatgtcagattggtgtaaggagcatcacgggaaggaaattcagttcatgaagataagaagtttcttgacaaatacatgccccagttcatgaaacatcttcattatagaataattgatgtgagcactgttaaagaactgtgcagacgctggtatccagaagaatatgaatttgcaccaaagaaggctgcttctcatagggcacttgatgacattagtgaaagcatcaaagagcttcagttttaccgaaataacatcttcaagaaaaaaatagatgaaaagaagaggaaaattatagaaaatggggaaaatgagaagaccgtgagttgatgccagttatcatgctgccactacatcgttatctggaggcaacttctggtggtttttttttctcacgctgatggcttggcagagcaccttcggttaacttgcatctccagattgattactcaagcagacagcacacgaaatactatttttctcctaatatgctgtttccattatgacacagcagctcctttgtaagtaccaggtcatgtccatcccttggtacatatatgcatttgcttttaaaccatttcttttgtttaaataaataaataagtaaataaagctagttctattgaaa

SEQ ID NO: 296169 - DNA, 920 bp, Homo sapiens
agctcgtggcctccccgtggtcttgcgacgtttagcgactattgcgcctgcgccagcgccggctgcgagactggggccgtggctgctggtcccgggtgatgctaggcggctccctgggctccaggctgttgcggggtgtaggtgggagtcacggacggttcggggcccgaggtgtccgcgaaggtggcgcagccatggcggcaggggagagcatggctcagcggatggtctgggtggacctggagatgacaggattggacattgagaaggaccagattattgagatggcctgtctgataactgactctgatctcaacattttggctgaagaaattcagttcatgaagataagaagtttcttgacaaatacatgccccagttcatgaaacatcttcattatagaataattgatgtgagcactgttaaagaactgtgcagacgctggtatccagaagaatatgaatttgcaccaaagaaggctgcttctcatagggcacttgatgacattagtgaaagcatcaaagagcttcagttttaccgaaataacatcttcaagaaaaaaatagatgaaaagaagaggaaaattatagaaaatggggaaaatgagaagaccgtgagttgatgccagttatcatgctgccactacatcgttatctggaggcaacttctggtggtttttttttctcacgctgatggcttggcagagcaccttcggttaacttgcatctccagattgattactcaagcagacagcacacgaaatactatttttctcctaatatgctgtttccattatgacacagcagctcctttgtaagtaccaggtcatgtccatcccttggtacatatatgcatttgcttttaaaccatttcttttgtttaaataaataaataagtaaataaagctagttctattgaaa

SEQ ID NO: 296170 - DNA, 2069 bp, Homo sapiens
  misc_feature (2069)..(2069): n is a, c, g, or t
tttaattttgtagaaatgaggtcttgctatgttgcctggactggtcttgaactactggcctcaagtgatcctcccacctcggcctcccagagtgctgggattaccatgcttggcctagacacttttcaaaatgaactcataatcaagggttgacagacttttctggaaagagcaagttattaaattgtttaggctttgagtgcagtcatatgttcttgtcatatgttcttttttttttttaaacaatcttttacaaatgtaaaaatcattcttagctttctagctattaataaatagctgaagtgtggggccatagtttgctgacccttgatagatatctgtgtcatctatttgtaggattagagttttcagtggtgtgtgtatgttcgtatgttctattttgccttaatgaacagtgctggaatgaagggggaacacttaaagtatccttatctcttactttctctgatatgtatatttagtccttaaaacagcttaagctttccctctgaaagtaaggttattcctgttgtttcttggtgactgatggcgtttcccatccacagggtcctaacctgattataaaacaaccagatgagttgctggacagcatgtcagattggtgtaaggagcatcacgggaaggtaacattaccaaataacaggattgctgctttggggatcagtagcaagctttttgctcccacacctgaatccgataccattgttggatggtattttaaaaaggcttagagaagattgcatggcaagcctgggaaactgcttgcttgtttacttttcatctttgggacctctcgagatcatcttctcctgaatgtcctcttttttttctctcctacattcagtctgtcgcgaacgcattgtggattgtcaagtattactcaagtcagtcttttggataaggttagacatcaactttcagagaagggggattgctgctctcctgttaatagttgtttcttcccagaggttaatatccttggactttgaacaccgtcttttttgactgtggacatgctattaacagtcaggatcataactaagttggcttggattccattgaagaaaaaaaaatggtgcaaagatggcagttgcaatttgaacttgagctctaaaaatggtctatttgtggttatatttgcccattttaaaagtgaaatttcatttctggatgcctttgaaaactgactttacatgtgtttttggtggggggctggggattctctcttgcagtctggccttaccaaggcagtgaaggagagtacaattacattgcagcaggcagagtatgaatttctgtcctttgtacgacagcagactcctccagggctctgtccacttgcaggaaattcagttcatgaagataagaagtttcttgacaaatacatgccccagttcatgaaacatcttcattatagaataattgatgtgagcactgttaaagaactgtgcagacgctggtatccagaagaatatgaatttgcaccaaagaaggctgcttctcatagggcacttgatgacattagtgaaagcatcaaagagcttcagttttaccgaaataacatcttcaagaaaaaaatagatgaaaagaagaggaaaattatagaaaatggggaaaatgagaagaccgtgagttgatgccagttatcatgctgccactacatcgttatctggaggcaacttctggtggtttttttttctcacgctgatggcttggcagagcaccttcggttaacttgcatctccagattgattactcaagcagacagcacacgaaatactatttttctcctaatatgctgtttccattatgacacagcagctcctttgtaagtaccaggtcatgtccatcccttggtacatatatgcatttgcttttaaaccatttcttttgtttaaataaataaataagtaaataaagctagttctattgaaaacgcggccgtccctttggggggggaataatgatccccgctactgactccgtgcgctgggcgttccgtgggggaacggtttcccttcttaaggcggaatccggtattccaaatn

SEQ ID NO: 296171 - DNA, 1670 bp, Homo sapiens
tttaattttgtagaaatgaggtcttgctatgttgcctggactggtcttgaactactggcctcaagtgatcctcccacctcggcctcccagagtgctgggattaccatgcttggcctagacacttttcaaaatgaactcataatcaagggttgacagacttttctggaaagagcaagttattaaattgtttaggctttgagtgcagtcatatgttcttgtcatatgttcttttttttttttaaacaatcttttacaaatgtaaaaatcattcttagctttctagctattaataaatagctgaagtgtggggccatagtttgctgacccttgatagatatctgtgtcatctatttgtaggattagagttttcagtggtgtgtgtatgttcgtatgttctattttgccttaatgaacagtgctggaatgaagggggaacacttaaagtatccttatctcttactttctctgatatgtatatttagtccttaaaacagcttaagctttccctctgaaagtaaggttattcctgttgtttcttggtgactgatggcgtttcccatccacagggtcctaacctgattataaaacaaccagatgagttgctggacagcatgtcagattggtgtaaggagcatcacgggaaggtaacattaccaaataacaggattgctgctttggggatcagtagcaagctttttgctcccacacctgaatccgataccattgttggatggtattttaaaaaggcttagagaagattgcatggcaagcctgggaaactgcttgcttgtttacttttcatctttgggacctctcgagatcatcttctcctgaatgtcctcttttttttctctcctacattcagtctgtcgcgaacgcattgtggattgtcaagtattactcaagtcagtcttttggataagtctggccttaccaaggcagtgaaggagagtacaattacattgcagcaggcagagtatgaatttctgtcctttgtacgacagcagactcctccagggctctgtccacttgcaggaaattcagttcatgaagataagaagtttcttgacaaatacatgccccagttcatgaaacatcttcattatagaataattgatgtgagcactgttaaagaactgtgcagacgctggtatccagaagaatatgaatttgcaccaaagaaggctgcttctcatagggcacttgatgacattagtgaaagcatcaaagagcttcagttttaccgaaataacatcttcaagaaaaaaatagatgaaaagaagaggaaaattatagaaaatggggaaaatgagaagaccgtgagttgatgccagttatcatgctgccactacatcgttatctggaggcaacttctggtggtttttttttctcacgctgatggcttggcagagcaccttcggttaacttgcatctccagattgattactcaagcagacagcacacgaaatactatttttctcctaatatgctgtttccattatgacacagcagctcctttgtaagtaccaggtcatgtccatcccttggtacatatatgcatttgcttttaaaccatttcttttgtttaaataaataaataagtaaataaagctagttctattgaaaaggctgcccgttcctttaaggagggtaaatcctgatcctcgccc

SEQ ID NO: 296172 - DNA, 1990 bp, Homo sapiens
tttaattttgtagaaatgaggtcttgctatgttgcctggactggtcttgaactactggcctcaagtgatcctcccacctcggcctcccagagtgctgggattaccatgcttggcctagacacttttcaaaatgaactcataatcaagggttgacagacttttctggaaagagcaagttattaaattgtttaggctttgagtgcagtcatatgttcttgtcatatgttcttttttttttttaaacaatcttttacaaatgtaaaaatcattcttagctttctagctattaataaatagctgaagtgtggggccatagtttgctgacccttgatagatatctgtgtcatctatttgtaggattagagttttcagtggtgtgtgtatgttcgtatgttctattttgccttaatgaacagtgctggaatgaagggggaacacttaaagtatccttatctcttactttctctgatatgtatatttagtccttaaaacagcttaagctttccctctgaaagtaaggttattcctgttgtttcttggtgactgatggcgtttcccatccacagggtcctaacctgattataaaacaaccagatgagttgctggacagcatgtcagattggtgtaaggagcatcacgggaaggtaacattaccaaataacaggattgctgctttggggatcagtagcaagctttttgctcccacacctgaatccgataccattgttggatggtattttaaaaaggcttagagaagattgcatggcaagcctgggaaactgcttgcttgtttacttttcatctttgggacctctcgagatcatcttctcctgaatgtcctcttttttttctctcctacattcagtctgtcgcgaacgcattgtggattgtcaagtattactcaagtcagtcttttggataaggttagacatcaactttcagagaagggggattgctgctctcctgttaatagttgtttcttcccagaggttaatatccttggactttgaacaccgtcttttttgactgtggacatgctattaacagtcaggatcataactaagttggcttggattccattgaagaaaaaaaaatggtgcaaagatggcagttgcaatttgaacttgagctctaaaaatggtctatttgtggttatatttgcccattttaaaagtgaaatttcatttctggatgcctttgaaaactgactttacatgtgtttttggtggggggctggggattctctcttgcagtctggccttaccaaggcagtgaaggagagtacaattacattgcagcaggcagagtatgaatttctgtcctttgtacgacagcagactcctccagggctctgtccacttgcaggaaattcagttcatgaagataagaagtttcttgacaaatacatgccccagttcatgaaacatcttcattatagaataattgatgtgagcactgttaaagaactgtgcagcttcctttgagagttccatttctgctgtgtatagacgctggtatccagaagaatatgaatttgcaccaaagaaggctgcttctcatagggcacttgatgacattagtgaaagcatcaaagagcttcagttttaccgaaataacatcttcaagaaaaaaatagatgaaaagaagaggaaaattatagaaaatggggaaaatgagaagaccgtgagttgatgccagttatcatgctgccactacatcgttatctggaggcaacttctggtggtttttttttctcacgctgatggcttggcagagcaccttcggttaacttgcatctccagattgattactcaagcagacagcacacgaaatactatttttctcctaatatgctgtttccattatgacacagcagctcctttgtaagtaccaggtcatgtccatcccttggtacatatatgcatttgcttttaaaccatttcttttgtttaaataaataaataagtaaataaagctagttctattgaaa

SEQ ID NO: 296173 - DNA, 1674 bp, Homo sapiens
tttaattttgtagaaatgaggtcttgctatgttgcctggactggtcttgaactactggcctcaagtgatcctcccacctcggcctcccagagtgctgggattaccatgcttggcctagacacttttcaaaatgaactcataatcaagggttgacagacttttctggaaagagcaagttattaaattgtttaggctttgagtgcagtcatatgttcttgtcatatgttcttttttttttttaaacaatcttttacaaatgtaaaaatcattcttagctttctagctattaataaatagctgaagtgtggggccatagtttgctgacccttgatagatatctgtgtcatctatttgtaggattagagttttcagtggtgtgtgtatgttcgtatgttctattttgccttaatgaacagtgctggaatgaagggggaacacttaaagtatccttatctcttactttctctgatatgtatatttagtccttaaaacagcttaagctttccctctgaaagtaaggttattcctgttgtttcttggtgactgatggcgtttcccatccacagggtcctaacctgattataaaacaaccagatgagttgctggacagcatgtcagattggtgtaaggagcatcacgggaaggtaacattaccaaataacaggattgctgctttggggatcagtagcaagctttttgctcccacacctgaatccgataccattgttggatggtattttaaaaaggcttagagaagattgcatggcaagcctgggaaactgcttgcttgtttacttttcatctttgggacctctcgagatcatcttctcctgaatgtcctcttttttttctctcctacattcagtctgtcgcgaacgcattgtggattgtcaagtattactcaagtcagtcttttggataaggttagacatcaactttcagagaagggggattgctgctctcctgttaatagttgtttcttcccagaggttaatatccttggactttgaacaccgtcttttttgactgtggacatgctattaacagtcaggatcataactaagttggcttggattccattgaagaaaaaaaaatggtgcaaagatggcagttgcaatttgaacttgagctctaaaaatggtctatttgtggttatatttgcccattttaaaagtgaaatttcatttctggatgcctttgaaaactgactttacatgtgtttttggtggggggctggggattctctcttgcagtctggccttaccaaggcagtgaaggagagtacaattacattgcagcaggcagagtatgaatttctgtcctttgtacgacagcagactcctccagggctctgtccacttgcaggaaattcagttcatgaagataagaagtttcttgacaaatacatgccccagttcatgaaacatcttcattatagaataattgatgtgagcactgttaaagaactgtgcagttgcatctccagattgattactcaagcagacagcacacgaaatactatttttctcctaatatgctgtttccattatgacacagcagctcctttgtaagtaccaggtcatgtccatcccttggtacatatatgcatttgcttttaaaccatttcttttgtttaaataaataaataagtaaataaagctagttctattgaaa

SEQ ID NO: 296174 - DNA, 1583 bp, Homo sapiens
tgccaataggtttccttttaaaaggactctgagtggaagattatgttagaatttgggaaagaaaccatgtgatcttatttggcatacaaatttataatggtagacgtaaaaacacatataatcttcccttatgaaattcatttgtatttggtaaagcttaataaaatgcaaagaagaataaattagtaatcctaattgctatccttaggcaaatttgtgataatttccccttgtatctagagaaggaaaatgtatattaaggctatgagaatgcaaataatggtactaaccacctgcttaatgagaaagacaagtgcaacctgtttctgttatatatttctttttctatttattaagaaatttgaatacttcatatctgctacaaaaccacagagcaggtgttttctccttaaagccctggttttttaaaagcccgccagcatttagatgcttgagaaagctaacacttatatttagccagacctacttgtataccaaacattctgaagttttaaccatgctgaccaacgaaactggctttgaaatcagttcttctgatgctacagtgaagattctcattacaacagtgccacccaatcttcgaaaactggatccagaactccatttggatatcaaagtattgcagagtgccttagcagccatccgacatgcccgctggttcgaggaaaatgcttctcagtccacagttaaagttctcatcagactactgaaggacttgaggattcgttttcctggctttgagcccctcacaccctggatccttgacctactaggccattatgctgtgatgaacaaccccaccagacagcctttggccctaaacgttgcatacaggcgctgcttgcagattctggctgcaggactgttcctgccaggttcagtgggtatcactgacccctgtgagagtggcaactttagagtacacacagtcatgaccctagaacagcaggacatggtctgctatacagctcagactctcgtccgaatcctctcacatggtggctttaggaagatccttggccaggagggtgatgccagctatcttgcttctgaaatatctacctgggatggagtgatagtaacaccttcagaaaaggcttatgagaagccaccagagaagaaggaaggagaggaagaagaggagaatacagaagaaccacctcaaggagaggaagaagaaagcatggaaactcaggagtgacattcccttcactccttttcctacccaagggggaagactggagcctaagctgcctgctactgggctttacatggtgacagacatttccgtgggatagggaagatagcaggaagaaaagtaaactccatagaagtgtcattccactgggttttgatattggcttagctgccagtctcccatttgtgacctatgccatccatctataatggaggataccaacatttcttcctaatattctataatctccaactcctgaaaacccctctctcaactaatactttgctgttgaaatgttgtgaaatgttaagtgtctggaaatttttttttctaagaaaaactattaaagtacttcctagtaggg

SEQ ID NO: 296175 - DNA, 2414 bp, Homo sapiens
tgccaataggtttccttttaaaaggactctgagtggaagattatgttagaatttgggaaagaaaccatgtgatcttatttggcatacaaatttataatggtagacgtaaaaacacatataatcttcccttatgaaattcatttgtatttggtaaagcttaataaaatgcaaagaagaataaattagtaatcctaattgctatccttaggcaaatttgtgataatttccccttgtatctagagaaggaaaatgtatattaaggctatgagaatgcaaataatggtactaaccacctgcttaatgagaaagacaagtgcaacctgtttctgttatatatttctttttctatttattaagaaatttgaatacttcatatctgctacaaaaccacagagcaggtgttttctccttaaagccctggttttttaaaagcccgccagcatttagatgcttgagaaagctaacacttatatttagccagacctacttgtataccaaacattctgaagttttaaccatgctgaccaacgaaactggctttgaaatcagttcttctgatgctacagtgaagattctcattacaacagtgccacccaatcttcgaaaactggatccagaactccatttggatatcaaagtattgcagagtgccttagcagccatccgacatgcccgctggttcgaggaaaatgcttctcagtccacagttaaagttctcatcagactactgaaggacttgaggattcgttttcctggctttgagcccctcacaccctggatccttgacctactaggccattatgctgtgatgaacaaccccaccagacagcctttggccctaaacgttgcatacaggcgctgcttgcagattctggctgcaggactgttcctgccaggttcagtgggtatcactgacccctgtgagagtggcaactttagagtacacacagtcatgaccctagaacagcaggacatggtctgctatacagctcagactctcgtccgaatcctctcacatggtggctttaggaagatccttggccaggagggtgatgccagctatcttgcttctgaaatatctacctgggatggagtgatagtaacaccttcagaaaaggcttatgagaagccaccagagaagaaggaaggagaggaagaagaggagaatacagaagaaccacctcaaggagaggaagaagaaagcatggaaactcaggagtgacattcccttcactccttttcctacccaagggggaagactggagcctaagctgcctgctactgggctttacatggtgacagacatttccgtgggatagggaagatagcaggaagaaaagtaaactccatagaagtgtcattccactgggttttgatattggcttagctgccagtctcccatttgtgacctatgccatccatctataatggaggataccaacatttcttcctaatattctataatctccaactcctgaaaacccctctctcaactaatactttgctgttgaaatgttgtgaaatgttaagtgtctggaaatttttttttctaagaaaaactattaaagtacttcctagtagggctcttggtctttctggttggtgttttttgtttgtttgtttttttgcatgtggcaaccttttttgcttttggctttgtgtactcttttgttgaaaatgataattgagtcatttaattataaatactcagatcacaatttgaagctgtctttgaattaaaggacaaactcctggaacctttccatataccagagtaaactagaatatcattttaagtatttattgaataaaatgattctatcaacactgctactgtattcaagccagtgcaataaaaaagtgggtggacagaggtcattcactttgactttgcctgccccctccaaatccccagtgtaaacaggaaaatgagaagtcacaggtagaggacatgctgtccaggcccatgtaaccaggcatgtaacatacaaaggaagcccctctggttaactagtcctgaagaaggtaagcctcaagtatgcagcttaaaaaaaaaagtagaggcctcagctcatttgtgaaaggaagcaagagccataattaatgtaagtcctttgggaacctcattctggctgtgtgtaggtttcctggggcccctacataaatgggtaagacgaagtgcttcaaacaaactgtacggctccctttttaatgtctgaaggtctatggggactgtctcctaggatctttgcatgtctgttgaaacaaggcagctggggaacagtacttgtgctactgagtccataggctcatctgttatttgcctggggagccaggggggtaaattcccgaatccagcattgctctcctgcgggctgtttccttggcaacactgtggtttagccgtctcagtc

SEQ ID NO: 296176 - DNA, 349 bp, Homo sapiens
  misc_feature (13)..(13): n is a, c, g, or t
  misc_feature (35)..(35): n is a, c, g, or t
aattcgcggccgngtcgactcggctgcgagaagangacagaaggctactgggctttacatggtgacagacatttccgtgggatagggaagatagcaggaagaaaagtaaactccatagaagtgtcattccactgggttttgatattggcttagctgccagtctcccatttgtgacctatgccatccatctataatggaggataccaacatttcttcctaatattctataatctccaactcctgaaaacccctctctcaactaatactttgctgttgaaatgttgtgaaatgttaagtgtctggaaatttttttttctaagaaaaactattaaagtacttcctagtaggg

SEQ ID NO: 296177 - DNA, 576 bp, Homo sapiens
gtaatgacttttatgctgggctactcgtctaaatcacctttttctctttcctagatcttgcttctgaaatatctacctgggatggagtgatagtaacaccttcagaaaaggcttatgagaagccaccagagaagaaggaaggagaggaagaagaggagaatacagaagaaccacctcaaggagaggaagaagaaagcatggaaactcaggagtgacattcccttcactccttttcctacccaagggggaagactggagcctaagctgcctgctactgggctttacatggtgacagacatttccgtgggatagggaagatagcaggaagaaaagtaaactccatagaagtgtcattccactgggttttgatattggcttagctgccagtctcccatttgtgacctatgccatccatctataatggaggataccaacatttcttcctaatattctataatctccaactcctgaaaacccctctctcaactaatactttgctgttgaaatgttgtgaaatgttaagtgtctggaaatttttttttctaagaaaaactattaaagtacttcctagtaggg

SEQ ID NO: 296178 - DNA, 1609 bp, Homo sapiens
agcggtcttcagttgtctgctactcagaggaaggggcggttggtgcggcctccattgttcgtgttttaaggcgccatgaggggtgacagaggccgtggtcgtggtgggcgctttggttccagaggaggcccaggaggagggttcaggccctttgtaccacatatcccatttgacttctatttgtgtgaaatggcctttccccgggtcaagccagcacctgatgaaacttccttcagtgaggccttgctgaagaggaatcaggacctggctcccaattctgctgaacaggcatctatcctttctctggtgacaaaaataaacaatgtgattgataatctgattgtggctccagggacatttgaagtgcaaattgaagaagttcgacaggtgggatcctataaaaaggggacaatgactacaggacacaatgtggctgacctggtggtgatactcaagattctgccaacgttggaagctgttgctgccctggggaacaaagtcgtggaaagcctaagagcacaggatccttctgaagttttaaccatgctgaccaacgaaactggctttgaaatcagttcttctgatgctacagtgaagattctcattacaacagtgccacccaatcttcgaaaactggatccagaactccatttggatatcaaagtattgcagagtgccttagcagccatccgacatgcccgctggttcgaggaaaatgcttctcagtccacagttaaagttctcatcagactactgaaggacttgaggattcgttttcctggctttgagcccctcacaccctggatccttgacctactaggccattatgctgtgatgaacaaccccaccagacagcctttggccctaaacgttgcatacaggcgctgcttgcagattctggctgcaggactgttcctgccaggttcagtgggtatcactgacccctgtgagagtggcaactttagagtacacacagtcatgaccctagaacagcaggacatggtctgctatacagctcagactctcgtccgaatcctctcacatggtggctttaggaagatccttggccaggagggtgatgccagctatcttgcttctgaaatatctacctgggatggagtgatagtaacaccttcagaaaaggcttatgagaagccaccagagaagaaggaaggagaggaagaagaggagaatacagaagaaccacctcaaggagaggaagaagaaagcatggaaactcaggagtgacattcccttcactccttttcctacccaagggggaagactggagcctaagctgcctgctactgggctttacatggtgacagacatttccgtgggatagggaagatagcaggaagaaaagtaaactccatagaagtgtcattccactgggttttgatattggcttagctgccagtctcccatttgtgacctatgccatccatctataatggaggataccaacatttcttcctaatattctataatctccaactcctgaaaacccctctctcaactaatactttgctgttgaaatgttgtgaaatgttaagtgtctggaaatttttttttctaagaaaaactattaaagtacttcctagtaggg

SEQ ID NO: 296179 - DNA, 1600 bp, Homo sapiens
agcgggtctgctactcagaggaaggggcggttggtgcggcctccattgttcgtgttttaaggcgccatgaggggtgacagaggccgtggtcgtggtgggcgctttggttccagaggaggcccaggaggagggttcaggccctttgtaccacatatcccatttgacttctatttgtgtgaaatggcctttccccgggtcaagccagcacctgatgaaacttccttcagtgaggccttgctgaagaggaatcaggacctggctcccaattctgctgaacaggcatctatcctttctctggtgacaaaaataaacaatgtgattgataatctgattgtggctccagggacatttgaagtgcaaattgaagaagttcgacaggtgggatcctataaaaaggggacaatgactacaggacacaatgtggctgacctggtggtgatactcaagattctgccaacgttggaagctgttgctgccctggggaacaaagtcgtggaaagcctaagagcacaggatccttctgaagttttaaccatgctgaccaacgaaactggctttgaaatcagttcttctgatgctacagtgaagattctcattacaacagtgccacccaatcttcgaaaactggatccagaactccatttggatatcaaagtattgcagagtgccttagcagccatccgacatgcccgctggttcgaggaaaatgcttctcagtccacagttaaagttctcatcagactactgaaggacttgaggattcgttttcctggctttgagcccctcacaccctggatccttgacctactaggccattatgctgtgatgaacaaccccaccagacagcctttggccctaaacgttgcatacaggcgctgcttgcagattctggctgcaggactgttcctgccaggttcagtgggtatcactgacccctgtgagagtggcaactttagagtacacacagtcatgaccctagaacagcaggacatggtctgctatacagctcagactctcgtccgaatcctctcacatggtggctttaggaagatccttggccaggagggtgatgccagctatcttgcttctgaaatatctacctgggatggagtgatagtaacaccttcagaaaaggcttatgagaagccaccagagaagaaggaaggagaggaagaagaggagaatacagaagaaccacctcaaggagaggaagaagaaagcatggaaactcaggagtgacattcccttcactccttttcctacccaagggggaagactggagcctaagctgcctgctactgggctttacatggtgacagacatttccgtgggatagggaagatagcaggaagaaaagtaaactccatagaagtgtcattccactgggttttgatattggcttagctgccagtctcccatttgtgacctatgccatccatctataatggaggataccaacatttcttcctaatattctataatctccaactcctgaaaacccctctctcaactaatactttgctgttgaaatgttgtgaaatgttaagtgtctggaaatttttttttctaagaaaaactattaaagtacttcctagtaggg

SEQ ID NO: 296180 - DNA, 1603 bp, Homo sapiens
gggctggtcccggccggaattttgggatggcggttggtgcggcctccattgttcgtgttttaaggcgccatgaggggtgacagaggccgtggtcgtggtgggcgctttggttccagaggaggcccaggaggagggttcaggccctttgtaccacatatcccatttgacttctatttgtgtgaaatggcctttccccgggtcaagccagcacctgatgaaacttccttcagtgaggccttgctgaagaggaatcaggacctggctcccaattctgctgaacaggcatctatcctttctctggtgacaaaaataaacaatgtgattgataatctgattgtggctccagggacatttgaagtgcaaattgaagaagttcgacaggtgggatcctataaaaaggggacaatgactacaggacacaatgtggctgacctggtggtgatactcaagattctgccaacgttggaagctgttgctgccctggggaacaaagtcgtggaaagcctaagagcacaggatccttctgaagttttaaccatgctgaccaacgaaactggctttgaaatcagttcttctgatgctacagtgaagattctcattacaacagtgccacccaatcttcgaaaactggatccagaactccatttggatatcaaagtattgcagagtgccttagcagccatccgacatgcccgctggttcgaggaaaatgcttctcagtccacagttaaagttctcatcagactactgaaggacttgaggattcgttttcctggctttgagcccctcacaccctggatccttgacctactaggccattatgctgtgatgaacaaccccaccagacagcctttggccctaaacgttgcatacaggcgctgcttgcagattctggctgcaggactgttcctgccaggttcagtgggtatcactgacccctgtgagagtggcaactttagagtacacacagtcatgaccctagaacagcaggacatggtctgctatacagctcagactctcgtccgaatcctctcacatggtggctttaggaagatccttggccaggagggtgatgccagctatcttgcttctgaaatatctacctgggatggagtgatagtaacaccttcagaaaaggcttatgagaagccaccagagaagaaggaaggagaggaagaagaggagaatacagaagaaccacctcaaggagaggaagaagaaagcatggaaactcaggagtgacattcccttcactccttttcctacccaagggggaagactggagcctaagctgcctgctactgggctttacatggtgacagacatttccgtgggatagggaagatagcaggaagaaaagtaaactccatagaagtgtcattccactgggttttgatattggcttagctgccagtctcccatttgtgacctatgccatccatctataatggaggataccaacatttcttcctaatattctataatctccaactcctgaaaacccctctctcaactaatactttgctgttgaaatgttgtgaaatgttaagtgtctggaaatttttttttctaagaaaaactattaaagtacttcctagtaggg

SEQ ID NO: 296181 - DNA, 2440 bp, Homo sapiens
agcggtcttcagttgtctgctactcagaggaaggggcggttggtgcggcctccattgttcgtgttttaaggcgccatgaggggtgacagaggccgtggtcgtggtgggcgctttggttccagaggaggcccaggaggagggttcaggccctttgtaccacatatcccatttgacttctatttgtgtgaaatggcctttccccgggtcaagccagcacctgatgaaacttccttcagtgaggccttgctgaagaggaatcaggacctggctcccaattctgctgaacaggcatctatcctttctctggtgacaaaaataaacaatgtgattgataatctgattgtggctccagggacatttgaagtgcaaattgaagaagttcgacaggtgggatcctataaaaaggggacaatgactacaggacacaatgtggctgacctggtggtgatactcaagattctgccaacgttggaagctgttgctgccctggggaacaaagtcgtggaaagcctaagagcacaggatccttctgaagttttaaccatgctgaccaacgaaactggctttgaaatcagttcttctgatgctacagtgaagattctcattacaacagtgccacccaatcttcgaaaactggatccagaactccatttggatatcaaagtattgcagagtgccttagcagccatccgacatgcccgctggttcgaggaaaatgcttctcagtccacagttaaagttctcatcagactactgaaggacttgaggattcgttttcctggctttgagcccctcacaccctggatccttgacctactaggccattatgctgtgatgaacaaccccaccagacagcctttggccctaaacgttgcatacaggcgctgcttgcagattctggctgcaggactgttcctgccaggttcagtgggtatcactgacccctgtgagagtggcaactttagagtacacacagtcatgaccctagaacagcaggacatggtctgctatacagctcagactctcgtccgaatcctctcacatggtggctttaggaagatccttggccaggagggtgatgccagctatcttgcttctgaaatatctacctgggatggagtgatagtaacaccttcagaaaaggcttatgagaagccaccagagaagaaggaaggagaggaagaagaggagaatacagaagaaccacctcaaggagaggaagaagaaagcatggaaactcaggagtgacattcccttcactccttttcctacccaagggggaagactggagcctaagctgcctgctactgggctttacatggtgacagacatttccgtgggatagggaagatagcaggaagaaaagtaaactccatagaagtgtcattccactgggttttgatattggcttagctgccagtctcccatttgtgacctatgccatccatctataatggaggataccaacatttcttcctaatattctataatctccaactcctgaaaacccctctctcaactaatactttgctgttgaaatgttgtgaaatgttaagtgtctggaaatttttttttctaagaaaaactattaaagtacttcctagtagggctcttggtctttctggttggtgttttttgtttgtttgtttttttgcatgtggcaaccttttttgcttttggctttgtgtactcttttgttgaaaatgataattgagtcatttaattataaatactcagatcacaatttgaagctgtctttgaattaaaggacaaactcctggaacctttccatataccagagtaaactagaatatcattttaagtatttattgaataaaatgattctatcaacactgctactgtattcaagccagtgcaataaaaaagtgggtggacagaggtcattcactttgactttgcctgccccctccaaatccccagtgtaaacaggaaaatgagaagtcacaggtagaggacatgctgtccaggcccatgtaaccaggcatgtaacatacaaaggaagcccctctggttaactagtcctgaagaaggtaagcctcaagtatgcagcttaaaaaaaaaagtagaggcctcagctcatttgtgaaaggaagcaagagccataattaatgtaagtcctttgggaacctcattctggctgtgtgtaggtttcctggggcccctacataaatgggtaagacgaagtgcttcaaacaaactgtacggctccctttttaatgtctgaaggtctatggggactgtctcctaggatctttgcatgtctgttgaaacaaggcagctggggaacagtacttgtgctactgagtccataggctcatctgttatttgcctggggagccaggggggtaaattcccgaatccagcattgctctcctgcgggctgtttccttggcaacactgtggtttagccgtctcagtc

SEQ ID NO: 296182 - DNA, 2069 bp, Homo sapiens
  misc_feature (1703)..(1704): n is a, c, g, or t
  misc_feature (1706)..(1706): n is a, c, g, or t
  misc_feature (1712)..(1712): n is a, c, g, or t
  misc_feature (1714)..(1714): n is a, c, g, or t
  misc_feature (1722)..(1722): n is a, c, g, or t
agcggtcttcagttgtctgctactcagaggaaggggcggttggtgcggcctccattgttcgtgttttaaggcgccatgaggggtgacagaggccgtggtcgtggtgggcgctttggttccagaggaggcccaggaggagggttcaggccctttgtaccacatatcccatttgacttctatttgtgtgaaatggcctttccccgggtcaagccagcacctgatgaaacttccttcagtgaggccttgctgaagaggaatcaggacctggctcccaattctgctgaacaggcatctatcctttctctggtgacaaaaataaacaatgtgattgataatctgattgtggctccagggacatttgaagtgcaaattgaagaagttcgacaggtgggatcctataaaaaggggacaatgactacaggacacaatgtggctgacctggtggtgatactcaagattctgccaacgttggaagctgttgctgccctggggaacaaagtcgtggaaagcctaagagcacaggatccttctgaagttttaaccatgctgaccaacgaaactggctttgaaatcagttcttctgatgctacagtgaagattctcattacaacagtgccacccaatcttcgaaaactggatccagaactccatttggatatcaaagtattgcagagtgccttagcagccatccgacatgcccgctggttcgaggaaaatgcttctcagtccacagttaaagttctcatcagactactgaaggacttgaggattcgttttcctggctttgagcccctcacaccctggatccttgacctactaggccattatgctgtgatgaacaaccccaccagacagcctttggccctaaacgttgcatacaggcgctgcttgcagattctggctgcaggactgttcctgccaggttcagtgggtatcactgacccctgtgagagtggcaactttagagtacacacagtcatgaccctagaacagcaggacatggtctgctatacagctcagactctcgtccgaatcctctcacatggtggctttaggaagatccttggccaggagggtgatgccagctatcttgcttctgaaatatctacctgggatggagtgatagtaacaccttcagaaaaggcttatgagaagccaccagagaagaaggaaggagaggaagaagaggagaatacagaagaaccacctcaaggagaggaagaagaaagcatggaaactcaggagtgacattcccttcactccttttcctacccaagggggaagactggagcctaagctgcctgctactgggctttacatggtgacagacatttccgtgggatagggaagatagcaggaagaaaagtaaactccatagaagtgtcattccactgggttttgatattggcttagctgccagtctcccatttgtgacctatgccatccatctataatggaggataccaacatttcttcctaatattctataatctccaactcctgaaaacccctctctcaactaatactttgctgttgaaatgttgtgaaatgttaagtgtctggaaatttttttttctaagaaaaactattaaagtacttcctagtagggcaaaaaaaaaaaaaaaaaaaaaaaaaaaaaaaaaaaaaaaaaaaaaaaaaaaaaacgaaaaaaaaaaacaaaaaaaaggggggggggggcgccnnanaaaaananaccacggnggggggggcccacgaagggaggccagcccacaagtttggggacaaagggagggggcgccccaaccaaaaggggagggaccgcgataataaatacaacaaagcggaagagcgcgagcgggggcagcggcgttgaataaacaaaaacgaacgggcgaggggacggaggagaaaaaaaagctcgtgatcgcagcggggaggaccactcttgttggggagaagagcgaccaccacctacactgagcgggggggagggacagaaacaacaagaggggggagaaacacaacaacccaccccagacagaagaagtattaaggagaagccgcgccggggggggcgaacagacaaa

SEQ ID NO: 296183 - DNA, 1658 bp, Homo sapiens
agcggtcttcagttgtctgctactcagaggaaggggcggttggtgcggcctccattgttcgtgttttaaggcgccatgaggggtgacagaggccgtggtcgtggtgggcgctttggttccagaggaggcccaggaggagggttcaggccctttgtaccacatatcccatttgacttctatttgtgtgaaatggcctttccccgggtcaagccagcacctgatgaaacttccttcagtgaggccttgctgaagaggaatcaggacctggctcccaattctgctgaacaggcatctatcctttctctggtgacaaaaataaacaatgtgattgataatctgattgtggctccagggacatttgaagtgcaaattgaagaagttcgacaggtgggatcctataaaaaggggacaatgactacaggacacaatgtggctgacctggtggtgatactcaagattctgccaacgttggaagctgttgctgccctggggaacaaagtcgtggaaagcctaagagcacaggatccttctgaagttttaaccatgctgaccaacgaaactggctttgaaatcagttcttctgatgctacagtgaagattctcattacaacagtgccacccaatcttcgaaaactggatccagaactccatttggatatcaaagtattgcagagtgccttagcagccatccgacatgcccgctggttcgaggaaaatgcttctcagtccacagttaaagttctcatcagactactgaaggacttgaggattcgttttcctggctttgagcccctcacaccctggatccttgacctactaggccattatgctgtgatgaacaaccccaccagacagcctttggccctaaacgttgcatacaggcgctgcttgcagattctggctgcaggactgttcctgccaggttcagtgggtatcactgacccctgtgagagtggcaactttagagtacacacagtcatgaccctagaacagcaggacatggtctgctatacagctcagactctcgtccgaatcctctcacatggtggctttaggaagatccttggccaggagggtgatgccagctatcttgcttctgaaatatctacctgggatggagtgatagtaacaccttcagaaaaggcttatgagaagccaccagagaagaaggaaggagaggaagaagaggagaatacagaagaaccacctcaaggagaggaagaagaaagcatggaaactcaggagtgacattcccttcactccttttcctacccaagggggaagactggagcctaagctgcctgctactgggctttacatggtgacagacatttccgtgggatagggaagatagcaggaagaaaagtaaactccatagaagtgtcattccactgggttttgatattggcttagctgccagtctcccatttgtgacctatgccatccatctataatggaggataccaacatttcttcctaatattctataatctccaactcctgaaaacccctctctcaactaatactttgctgttgaaatgttgtgaaatgttaagtgtctggaaatttttttttctaagaaaaactattaaagtacttcctagtagggctcttggtctgtcagggtgttctattgtggagcctctagatcgaccgca

SEQ ID NO: 296184 - DNA, 1649 bp, Homo sapiens
agcggtcttcagttgtctgctactcagaggaaggggcggttggtgcggcctccattgttcgtgttttaaggcgccatgaggggtgacagaggccgtggtcgtggtgggcgctttggttccagaggaggcccaggaggagggttcaggccctttgtaccacatatcccatttgacttctatttgtgtgaaatggcctttccccgggtcaagccagcacctgatgaaacttccttcagtgaggccttgctgaagaggaatcaggacctggctcccaattctgctgaacaggcatctatcctttctctggtgacaaaaataaacaatgtgattgataatctgattgtggctccagggacatttgaagtgcaaattgaagaagttcgacaggtgggatcctataaaaaggggacaatgactacaggacacaatgtggctgacctggtggtgatactcaagattctgccaacgttggaagctgttgctgccctggggaacaaagtcgtggaaagcctaagagcacaggatccttctgaagttttaaccatgctgaccaacgaaactggctttgaaatcagttcttctgatgctacagtgaagattctcattacaacagtgccacccaatcttcgaaaactggatccagaactccatttggatatcaaagtattgcagagtgccttagcagccatccgacatgcccgctggttcgaggaaaatgcttctcagtccacagttaaagttctcatcagactactgaaggacttgaggattcgttttcctggctttgagcccctcacaccctggatccttgacctactaggccattatgctgtgatgaacaaccccaccagacagcctttggccctaaacgttgcatacaggcgctgcttgcagattctggctgcaggactgttcctgccaggttcagtgggtatcactgacccctgtgagagtggcaactttagagtacacacagtcatgaccctagaacagcaggacatggtctgctatacagctcagactctcgtccgaatcctctcacatggtggctttaggaagatccttggccaggagggtgatgccagctatcttgcttctgaaatatctacctgggatggagtgatagtaacaccttcagaaaaggcttatgagaagccaccagagaagaaggaaggagaggaagaagaggagaatacagaagaaccacctcaaggagaggaagaagaaagcatggaaactcaggagtgacattcccttcactccttttcctacccaagggggaagactggagcctaagctgcctgctactgggctttacatggtgacagacatttccgtgggatagggaagatagcaggaagaaaagtaaactccatagaagtgtcattccactgggttttgatattggcttagctgccagtctcccatttgtgacctatgccatccatctataatggaggataccaacatttcttcctaatattctataatctccaactcctgaaaacccctctctcaactaatactttgctgttgaaatgttgtgaaatgttaagtgtctggaaatttttttttctaagaaaaactattaaagtacttcctagtagggaaaaaaaaaaaagtgagcatagaaataaaaacgcccgctc

SEQ ID NO: 296185 - DNA, 1657 bp, Homo sapiens
  misc_feature (1627)..(1628): n is a, c, g, or t
agcggtcttcagttgtctgctactcagaggaaggggcggttggtgcggcctccattgttcgtgttttaaggcgccatgaggggtgacagaggccgtggtcgtggtgggcgctttggttccagaggaggcccaggaggagggttcaggccctttgtaccacatatcccatttgacttctatttgtgtgaaatggcctttccccgggtcaagccagcacctgatgaaacttccttcagtgaggccttgctgaagaggaatcaggacctggctcccaattctgctgaacaggcatctatcctttctctggtgacaaaaataaacaatgtgattgataatctgattgtggctccagggacatttgaagtgcaaattgaagaagttcgacaggtgggatcctataaaaaggggacaatgactacaggacacaatgtggctgacctggtggtgatactcaagattctgccaacgttggaagctgttgctgccctggggaacaaagtcgtggaaagcctaagagcacaggatccttctgaagttttaaccatgctgaccaacgaaactggctttgaaatcagttcttctgatgctacagtgaagattctcattacaacagtgccacccaatcttcgaaaactggatccagaactccatttggatatcaaagtattgcagagtgccttagcagccatccgacatgcccgctggttcgaggaaaatgcttctcagtccacagttaaagttctcatcagactactgaaggacttgaggattcgttttcctggctttgagcccctcacaccctggatccttgacctactaggccattatgctgtgatgaacaaccccaccagacagcctttggccctaaacgttgcatacaggcgctgcttgcagattctggctgcaggactgttcctgccaggttcagtgggtatcactgacccctgtgagagtggcaactttagagtacacacagtcatgaccctagaacagcaggacatggtctgctatacagctcagactctcgtccgaatcctctcacatggtggctttaggaagatccttggccaggagggtgatgccagctatcttgcttctgaaatatctacctgggatggagtgatagtaacaccttcagaaaaggcttatgagaagccaccagagaagaaggaaggagaggaagaagaggagaatacagaagaaccacctcaaggagaggaagaagaaagcatggaaactcaggagtgacattcccttcactccttttcctacccaagggggaagactggagcctaagctgcctgctactgggctttacatggtgacagacatttccgtgggatagggaagatagcaggaagaaaagtaaactccatagaagtgtcattccactgggttttgatattggcttagctgccagtctcccatttgtgacctatgccatccatctataatggaggataccaacatttcttcctaatattctataatctccaactcctgaaaacccctctctcaactaatactttgctgttgaaatgttgtgaaatgttaagtgtctggaaatttttttttctaagaaaaactattaaagtacttcctagtagggaaaacaaccccaaaaccnnaaaaaaaatgcatgccggcggcaatttcg

SEQ ID NO: 296186 - DNA, 2048 bp, Homo sapiens
  misc_feature (1682)..(1683): n is a, c, g, or t
  misc_feature (1685)..(1685): n is a, c, g, or t
  misc_feature (1691)..(1691): n is a, c, g, or t
  misc_feature (1693)..(1693): n is a, c, g, or t
  misc_feature (1701)..(1701): n is a, c, g, or t
agcggtcttcagttgtctgctactcagaggaaggggcggttggtgcggcctccattgttcgtgttttaaggcgccatgaggggtgacagaggccgtggtcgtggtgggcgctttggttccagaggaggcccaggaggagggttcaggccctttgtaccacatatcccatttgacttctatttgtgtgaaatggcctttccccgggtcaagccagcacctgatgaaacttccttcagtgaggccttgctgaagaggaatcaggacctggctcccaattctgctgaacaggcatctatcctttctctggtgacaaaaataaacaatgtgattgataatctgattgtggctccagggacatttgaagtgcaaattgaagaagttcgacaggtgggatcctataaaaaggggacaatgactacaggacacaatgtggctgacctggtggtgatactcaagattctgccaacgttggaagctgttgctgccctggggaacaaagtcgtggaaagcctaagagcacaggatccttctgaagttttaaccatgctgaccaacgaaactggctttgaaatcagttcttctgatgctacagtgaagattctcattacaacagtgccacccaatcttcgaaaactggatccagaactccatttggatatcaaagtattgcagagtgccttagcagccatccgacatgcccgctggttcgaggaaaatgcttctcagtccacagttaaagttctcatcagactactgaaggacttgaggattcgttttcctggctttgagcccctcacaccctggatccttgacctactaggccattatgctgtgatgaacaaccccaccagacagcctttggccctaaacgttgcatacaggcgctgcttgcagattctggctgcaggactgttcctgccaggttcagtgggtatcactgacccctgtgagagtggcaactttagagtacacacagtcatgaccctagaacagcaggacatggtctgctatacagctcagactctcgtccgaatcctctcacatggtggctttaggaagatccttggccaggagggtgatgccagctatcttgcttctgaaatatctacctgggatggagtgatagtaacaccttcagaaaaggcttatgagaagccaccagagaagaaggaaggagaggaagaagaggagaatacagaagaaccacctcaaggagaggaagaagaaagcatggaaactcaggagtgacattcccttcactccttttcctacccaagggggaagactggagcctaagctgcctgctactgggctttacatggtgacagacatttccgtgggatagggaagatagcaggaagaaaagtaaactccatagaagtgtcattccactgggttttgatattggcttagctgccagtctcccatttgtgacctatgccatccatctataatggaggataccaacatttcttcctaatattctataatctccaactcctgaaaacccctctctcaactaatactttgctgttgaaatgttgtgaaatgttaagtgtctggaaatttttttttctaagaaaaactattaaagtacttcctagtagggaaaaaaaaaaaaaaaaaaaaaaaaaaaaaaaaaacgaaaaaaaaaaacaaaaaaaaggggggggggggcgccnnanaaaaananaccacggnggggggggcccacgaagggaggccagcccacaagtttggggacaaagggagggggcgccccaaccaaaaggggagggaccgcgataataaatacaacaaagcggaagagcgcgagcgggggcagcggcgttgaataaacaaaaacgaacgggcgaggggacggaggagaaaaaaaagctcgtgatcgcagcggggaggaccactcttgttggggagaagagcgaccaccacctacactgagcgggggggagggacagaaacaacaagaggggggagaaacacaacaacccaccccagacagaagaagtattaaggagaagccgcgccggggggggcgaacagacaaa

SEQ ID NO: 296187 - DNA, 1690 bp, Homo sapiens
agcggtcttcagttgtctgctactcagaggaaggggcggttggtgcggcctccattgttcgtgttttaaggcgccatgaggggtgacagaggccgtggtcgtggtgggcgctttggttccagaggaggcccaggaggagggttcaggccctttgtaccacatatcccatttgacttctatttgtgtgaaatggcctttccccgggtcaagccagcacctgatgaaacttccttcagtgaggccttgctgaagaggaatcaggacctggctcccaattctgctgaacaggcatctatcctttctctggtgacaaaaataaacaatgtgattgataatctgattgtggctccagggacatttgaagtgcaaattgaagaagttcgacaggtgggatcctataaaaaggggacaatgactacaggacacaatgtggctgacctggtggtgatactcaagattctgccaacgttggaagctgttgctgccctggggaacaaagtcgtggaaagcctaagagcacaggatccttctgaagttttaaccatgctgaccaacgaaactggctttgaaatcagttcttctgatgctacagtgaagattctcattacaacagtgccacccaatcttcgaaaactggatccagaactccatttggatatcaaagtattgcagagtgccttagcagccatccgacatgcccgctggttcgaggaaaatgcttctcagtccacagttaaagttctcatcagactactgaaggacttgaggattcgttttcctggctttgagcccctcacaccctggatccttgacctactaggccattatgctgtgatgaacaaccccaccagacagcctttggccctaaacgttgcatacaggtacagcatgctttgggtttagggttggttgtaaactattttgtgcattcctttaatacctcatacctccctgtgttctaggcgctgcttgcagattctggctgcaggactgttcctgccaggttcagtgggtatcactgacccctgtgagagtggcaactttagagtacacacagtcatgaccctagaacagcaggacatggtctgctatacagctcagactctcgtccgaatcctctcacatggtggctttaggaagatccttggccaggagggtgatgccagctatcttgcttctgaaatatctacctgggatggagtgatagtaacaccttcagaaaaggcttatgagaagccaccagagaagaaggaaggagaggaagaagaggagaatacagaagaaccacctcaaggagaggaagaagaaagcatggaaactcaggagtgacattcccttcactccttttcctacccaagggggaagactggagcctaagctgcctgctactgggctttacatggtgacagacatttccgtgggatagggaagatagcaggaagaaaagtaaactccatagaagtgtcattccactgggttttgatattggcttagctgccagtctcccatttgtgacctatgccatccatctataatggaggataccaacatttcttcctaatattctataatctccaactcctgaaaacccctctctcaactaatactttgctgttgaaatgttgtgaaatgttaagtgtctggaaatttttttttctaagaaaaactattaaagtacttcctagtaggg

SEQ ID NO: 296188 - DNA, 2426 bp, Homo sapiens
agcggtcttcagttgtctgctactcagaggaaggggcggttggtgcggcctccattgttcgtgttttaaggcgccatgaggggtgacagaggccgtggtcgtggtgggcgctttggttccagaggaggcccaggaggagggttcaggccctttgtaccacatatcccatttgacttctatttgtgtgaaatggcctttccccgggtcaagccagcacctgatgaaacttccttcagtgaggccttgctgaagaggaatcaggacctggctcccaattctgctgaacaggcatctatcctttctctggtgacaaaaataaacaatgtgattgataatctgattgtggctccagggacatttgaagtgcaaattgaagaagttcgacaggtgggatcctataaaaaggggacaatgactacaggacacaatgtggctgacctggtggtgatactcaagattctgccaacgttggaagctgttgctgccctggggaacaaagtcgtggaaagcctaagagcacaggatccttctgaagttttaaccatgctgaccaacgaaactggctttgaaatcagttcttctgatgctacagtgaagattctcattacaacagtgccacccaatcttcgaaaactggatccagaactccatttggatatcaaagtattgcagagtgccttagcagccatccgacatgcccgctggttcgaggaaaatgcttctcagtccacagttaaagttctcatcagactactgaaggacttgaggattcgttttcctggctttgagcccctcacaccctggatccttgacctactaggccattatgctgtgatgaacaaccccaccagacagcctttggccctaaacgttgcatacaggcgctgcttgcagattctggctgcaggactgttcctgccaggttcagtgggtatcactgacccctgtgagagtggcaactttagagtacacacagtcatgaccctagaacagcaggacatggtctgctatacagctcagactctcgtccgaatcctctcacatggtggctttaggaagatccttggccaggagggtgatgccagctatcttgcttctgaaatatctacctgggatggagtgatagtaacaccttcagaaaaggcttatgagaagccaccagagaagaaggaaggagaggaagaagaggagaatacagaagaaccacctcaaggagaggaagaagaaagcatggaaactcaggagtgacattcccttcactccttttcctacccaagggggaagactggagcctaagctgcctgatggtgacagacatttccgtgggatagggaagatagcaggaagaaaagtaaactccatagaagtgtcattccactgggttttgatattggcttagctgccagtctcccatttgtgacctatgccatccatctataatggaggataccaacatttcttcctaatattctataatctccaactcctgaaaacccctctctcaactaatactttgctgttgaaatgttgtgaaatgttaagtgtctggaaatttttttttctaagaaaaactattaaagtacttcctagtagggctcttggtctttctggttggtgttttttgtttgtttgtttttttgcatgtggcaaccttttttgcttttggctttgtgtactcttttgttgaaaatgataattgagtcatttaattataaatactcagatcacaatttgaagctgtctttgaattaaaggacaaactcctggaacctttccatataccagagtaaactagaatatcattttaagtatttattgaataaaatgattctatcaacactgctactgtattcaagccagtgcaataaaaaagtgggtggacagaggtcattcactttgactttgcctgccccctccaaatccccagtgtaaacaggaaaatgagaagtcacaggtagaggacatgctgtccaggcccatgtaaccaggcatgtaacatacaaaggaagcccctctggttaactagtcctgaagaaggtaagcctcaagtatgcagcttaaaaaaaaaagtagaggcctcagctcatttgtgaaaggaagcaagagccataattaatgtaagtcctttgggaacctcattctggctgtgtgtaggtttcctggggcccctacataaatgggtaagacgaagtgcttcaaacaaactgtacggctccctttttaatgtctgaaggtctatggggactgtctcctaggatctttgcatgtctgttgaaacaaggcagctggggaacagtacttgtgctactgagtccataggctcatctgttatttgcctggggagccaggggggtaaattcccgaatccagcattgctctcctgcgggctgtttccttggcaacactgtggtttagccgtctcagtc

SEQ ID NO: 296189 - DNA, 1518 bp, Homo sapiens
agcggtcttcagttgtctgctactcagaggaaggggcggttggtgcggcctccattgttcgtgttttaaggcgccatgaggggtgacagaggccgtggtcgtggtgggcgctttggttccagaggaggcccaggaggagggttcaggccctttgtaccacatatcccatttgacttctatttgtgtgaaatggcctttccccgggtcaagccagcacctgatgaaacttccttcagtgaggccttgctgaagaggaatcaggacctggctcccaattctgctgaacaggcatctatcctttctctggtgacaaaaataaacaatgtgattgataatctgattgtggctccagggacatttgaagtgcaaattgaagaagttcgacaggtgggatcctataaaaaggggacaatgactacaggacacaatgtggctgacctggtggtgatactcaagattctgccaacgttggaagctgttgctgccctggggaacaaagtcgtggaaagcctaagagcacaggatccttctgaagttttaaccatgctgaccaacgaaactggctttgaaatcagttcttctgatgctacagtgaagattctcattacaacagtgccacccaatcttcgaaaactggatccagaactccatttggatatcaaagtattgcagagtgccttagcagccatccgacatgcccgctggttcgaggaaaatgcttctcagtccacagttaaagttctcatcagactactgaaggacttgaggattcgttttcctggctttgagcccctcacaccctggatccttgacctactaggccattatgctgtgatgaacaaccccaccagacagcctttggccctaaacgttgcatacaggcgctgcttgcagattctggctgcaggactgttcctgccaggttcagtgggtatcactgacccctgtgagagtggcaactttagagtacacacagtcatgaccctagaacagcagatcttgcttctgaaatatctacctgggatggagtgatagtaacaccttcagaaaaggcttatgagaagccaccagagaagaaggaaggagaggaagaagaggagaatacagaagaaccacctcaaggagaggaagaagaaagcatggaaactcaggagtgacattcccttcactccttttcctacccaagggggaagactggagcctaagctgcctgctactgggctttacatggtgacagacatttccgtgggatagggaagatagcaggaagaaaagtaaactccatagaagtgtcattccactgggttttgatattggcttagctgccagtctcccatttgtgacctatgccatccatctataatggaggataccaacatttcttcctaatattctataatctccaactcctgaaaacccctctctcaactaatactttgctgttgaaatgttgtgaaatgttaagtgtctggaaatttttttttctaagaaaaactattaaagtacttcctagtaggg

SEQ ID NO: 296190 - DNA, 1913 bp, Homo sapiens
agcggtcttcagttgtctgctactcagaggaaggggcggttggtgcggcctccattgttcgtgttttaaggcgccatgaggggtgacagaggccgtggtcgtggtgggcgctttggttccagaggaggcccaggaggagggttcaggccctttgtaccacatatcccatttgacttctatttgtgtgaaatggcctttccccgggtcaagccagcacctgatgaaacttccttcagtgaggccttgctgaagaggaatcaggacctggctcccaattctgctgaacaggcatctatcctttctctggtgacaaaaataaacaatgtgattgataatctgattgtggctccagggacatttgaagtgcaaattgaagaagttcgacaggtgggatcctataaaaaggggacaatgactacaggacacaatgtggctgacctggtggtgatactcaagattctgccaacgttggaagctgttgctgccctggggaacaaagtcgtggaaagcctaagagcacaggatccttctgaagttttaaccatgctgaccaacgaaactggctttgaaatcagttcttctgatgctacagtgaagattctcattacaacagtgccacccaatcttcgaaaactggatccagaactccatttggatatcaaagtattgcagagtgccttagcagccatccgacatgcccgctggttcgaggaaaatgcttctcagtccacagttaaagttctcatcagactactgaaggacttgaggattcgttttcctggctttgagcccctcacaccctggatccttgacctactaggccattatgctgtgatgaacaaccccaccagacagcctttggccctaaacgttgcatacaggtacagcatgctttgggtttagggttggttgtaaactattttgtgcattcctttaatacctcatacctccctgtgttctaggcgctgcttgcagattctggctgcaggactgttcctgccaggttcagtgggtatcactgacccctgtgagagtggcaactttagagtacacacagtcatgaccctagaacagcaggtattgggacagatatgaactgagttgttttgccccactcttttgaatactgctgctcagcaggcaaagtggaatatggtctttacgggtcaggaatttggggattctgaaagactttggtcctgagatttaaaaagctgtcttaatctctgttttcagaagggtattactcaaataaggtcctttgattttccttgcttactctcactttgctttccttcaggacatggtctgctatacagctcagactctcgtccgaatcctctcacatggtggctttaggaagatccttggccaggagggtgatgccagctatcttgcttctgaaatatctacctgggatggagtgatagtaacaccttcagaaaaggcttatgagaagccaccagagaagaaggaaggagaggaagaagaggagaatacagaagaaccacctcaaggagaggaagaagaaagcatggaaactcaggagtgacattcccttcactccttttcctacccaagggggaagactggagcctaagctgcctgctactgggctttacatggtgacagacatttccgtgggatagggaagatagcaggaagaaaagtaaactccatagaagtgtcattccactgggttttgatattggcttagctgccagtctcccatttgtgacctatgccatccatctataatggaggataccaacatttcttcctaatattctataatctccaactcctgaaaacccctctctcaactaatactttgctgttgaaatgttgtgaaatgttaagtgtctggaaatttttttttctaagaaaaactattaaagtacttcctagtaggg

SEQ ID NO: 296191 - DNA, 1519 bp, Homo sapiens
agcggtcttcagttgtctgctactcagaggaaggggcggttggtgcggcctccattgttcgtgttttaaggcgccatgaggggtgacagaggccgtggtcgtggtgggcgctttggttccagaggaggcccaggaggagggttcaggccctttgtaccacatatcccatttgacttctatttgtgtgaaatggcctttccccgggtcaagccagcacctgatgaaacttccttcagtgaggccttgctgaagaggaatcaggacctggctcccaattctgctgaacaggcatctatcctttctctggtgacaaaaataaacaatgtgattgataatctgattgtggctccagggacatttgaagtgcaaattgaagaagttcgacaggtgggatcctataaaaaggggacaatgactacaggacacaatgtggctgacctggtggtgatactcaagattctgccaacgttggaagctgttgctgccctggggaacaaagtcgtggaaagcctaagagcacaggatccttctgaagttttaaccatgctgaccaacgaaactggctttgaaatcagttcttctgatgctacagtgaagattctcattacaacagtgccacccaatcttcgaaaactggatccagaactccatttggatatcaaagtattgcagagtgccttagcagccatccgacatgcccgctggttcgaggaaaatgcttctcagtccacagttaaagttctcatcagactactgaaggacttgaggattcgttttcctggctttgagcccctcacaccctggatccttgacctactaggccattatgctgtgatgaacaaccccaccagacagcctttggccctaaacgttgcatacaggcgctgcttgcagattctggctgcaggactgttcctgccaggttcagtgggtatcactgacccctgtgagagtggcaactttagagtacacacagtcatgaccctagaacagcaggacatggtctgctatacagctcagactctcgtccgaatcctctcacatggtggctttaggaagatccttggccaggagggtgatgccagctatcttgcttctgaaatatctacctgggatggagtgatagtaacaccttcagaaaaggcttatgagaagccaccagagaagaaggaaggagaggaagaagaggagaatacagaagaaccacctcaaggagaggaagaagaaagcatggaaactcaggagtgacattcccttcactccttttcctacccaagggggaagactggagcctaagctgcctgctactgggctttacatggtgacagacatttccgtgggatagggaagatagcaggaagaaaagtaaactccatagaagtgtcattccactgggttttgatattggcttagctgccagtctcccatttgtgacctatgccatccatctataatggaggataccatgtctggaaatttttttttctaagaaaaactattaaagtacttcctagtaggg

SEQ ID NO: 296192 - DNA, 1385 bp, Homo sapiens
ggacgcgtgggtcgacccacgcgtcgagaggaatcaggacctggctcccaattctgctgaacaggcatctatcctttctctggtgacaaaaataaacaatgtgattgataatctgattgtggctccagggacatttgaagtgcaaattgaagaagttcgacaggtgggatcctataaaaaggggacaatgactacaggacacaatgtggctgacctggtggtgatactcaagattctgccaacgttggaagctgttgctgccctggggaacaaagtcgtggaaagcctaagagcacaggatccttctgaagttttaaccatgctgaccaacgaaactggctttgaaatcagttcttctgatgctacagtgaagattctcattacaacagtgccacccaatcttcgaaaactggatccagaactccatttggatatcaaagtattgcagagtgccttagcagccatccgacatgcccgctggttcgaggaaaatgcttctcagtccacagttaaagttctcatcagactactgaaggacttgaggattcgttttcctggctttgagcccctcacaccctggatccttgacctactaggccattatgctgtgatgaacaaccccaccagacagcctttggccctaaacgttgcatacaggcgctgcttgcagattctggctgcaggactgttcctgccaggttcagtgggtatcactgacccctgtgagagtggcaactttagagtacacacagtcatgaccctagaacagcaggacatggtctgctatacagctcagactctcgtccgaatcctctcacatggtggctttaggaagatccttggccaggagggtgatgccagctatcttgcttctgaaatatctacctgggatggagtgatagtaacaccttcagaaaaggcttatgagaagccaccagagaagaaggaaggagaggaagaagaggagaatacagaagaaccacctcaaggagaggaagaagaaagcatggaaactcaggagtgacattcccttcactccttttcctacccaagggggaagactggagcctaagctgcctgctactgggctttacatggtgacagacatttccgtgggatagggaagatagcaggaagaaaagtaaactccatagaagtgtcattccactgggttttgatattggcttagctgccagtctcccatttgtgacctatgccatccatctataatggaggataccaacatttcttcctaatattctataatctccaactcctgaaaacccctctctcaactaatactttgctgttgaaatgttgtgaaatgttaagtgtctggaaatttttttttctaagaaaaactattaaagtacttcctagtaggg

SEQ ID NO: 296193 - DNA, 1363 bp, Homo sapiens
aaaccaataacatataattattctcaaataaaagcagaaaatagctctatcctttctctggtgacaaaaataaacaatgtgattgataatctgattgtggctccagggacatttgaagtgcaaattgaagaagttcgacaggtgggatcctataaaaaggggacaatgactacaggacacaatgtggctgacctggtggtgatactcaagattctgccaacgttggaagctgttgctgccctggggaacaaagtcgtggaaagcctaagagcacaggatccttctgaagttttaaccatgctgaccaacgaaactggctttgaaatcagttcttctgatgctacagtgaagattctcattacaacagtgccacccaatcttcgaaaactggatccagaactccatttggatatcaaagtattgcagagtgccttagcagccatccgacatgcccgctggttcgaggaaaatgcttctcagtccacagttaaagttctcatcagactactgaaggacttgaggattcgttttcctggctttgagcccctcacaccctggatccttgacctactaggccattatgctgtgatgaacaaccccaccagacagcctttggccctaaacgttgcatacaggcgctgcttgcagattctggctgcaggactgttcctgccaggttcagtgggtatcactgacccctgtgagagtggcaactttagagtacacacagtcatgaccctagaacagcaggacatggtctgctatacagctcagactctcgtccgaatcctctcacatggtggctttaggaagatccttggccaggagggtgatgccagctatcttgcttctgaaatatctacctgggatggagtgatagtaacaccttcagaaaaggcttatgagaagccaccagagaagaaggaaggagaggaagaagaggagaatacagaagaaccacctcaaggagaggaagaagaaagcatggaaactcaggagtgacattcccttcactccttttcctacccaagggggaagactggagcctaagctgcctgctactgggctttacatggtgacagacatttccgtgggatagggaagatagcaggaagaaaagtaaactccatagaagtgtcattccactgggttttgatattggcttagctgccagtctcccatttgtgacctatgccatccatctataatggaggataccaacatttcttcctaatattctataatctccaactcctgaaaacccctctctcaactaatactttgctgttgaaatgttgtgaaatgttaagtgtctggaaatttttttttctaagaaaaactattaaagtacttcctagtaggg

SEQ ID NO: 296194 - DNA, 1178 bp, Homo sapiens
  misc_feature (1150)..(1150): n is a, c, g, or t
  misc_feature (1153)..(1154): n is a, c, g, or t
  misc_feature (1156)..(1156): n is a, c, g, or t
  misc_feature (1163)..(1163): n is a, c, g, or t
agcggtcttcagttgtctgctactcagaggaaggggcggttggtgcggcctccattgttcgtgttttaaggcgccatgaggggtgacagaggccgtggtcgtggtgggcgctttggttccagaggaggcccaggaggagggttcaggccctttgtaccacatatcccatttgacttctatttgtgtgaaatggcctttccccgggtcaagccagcacctgatgaaacttccttcagtgaggccttgctgaagaggaatcaggacctggctcccaattctgctgaacaggcatctatcctttctctggtgacaaaaataaacaatgtgattgataatctgattgtggctccagggacatttgaagtgcaaattgaagaagttcgacaggtgggatcctataaaaaggggacaatgactacaggacacaatgtggctgacctggtggtgatactcaagattctgccaacgttggaagctgttgctgccctggggaacaaagtcgtggaaagcctaagagcacaggatccttctgaagttttaaccatgctgaccaacgaaactggctttgaaatcagttcttctgatgctacagtgaagattctcattacaacagtgccacccaatcttcgaaaactggatccagaactccatttggatatcaaagtattgcagagtgccttagcagccatccgacatgcccgctggttcgaggaaaatgcttctcagtccacagttaaagttctcatcagactactgaaggacttgaggattcgttttcctggctttgagcccctcacaccctggatccttgacctactaggccattatgctgtgatgaacaaccccaccagacagcctttggccctaaacgttgcatacaggcgctgcttgcagattctggctgcaggactgttcctgccaggttcagtgggtatcactgacccctgtgagagtggcaactttagagtacacacagtcatgaccctagaacagcaggacatggtctgctatacagctcagactctcgtccgaatcctctcacatggtggctttaggaagatccttggccaggagggtgatgccagctatcttgcttctgaaatatctacctgggatggagtgatagtaacaccttcagatcagaagaccnccnnangagaggnagagaagccttgaat

SEQ ID NO: 296195 - DNA, 1108 bp, Homo sapiens
agcggtcttcagttgtctgctactcagaggaaggggcggttggtgcggcctccattgttcgtgttttaaggcgccatgaggggtgacagaggccgtggtcgtggtgggcgctttggttccagaggaggcccaggaggagggttcaggccctttgtaccacatatcccatttgacttctatttgtgtgaaatggcctttccccgggtcaagccagcacctgatgaaacttccttcagtgaggccttgctgaagaggaatcaggacctggctcccaattctgctgaacaggcatctatcctttctctggtgacaaaaataaacaatgtgattgataatctgattgtggctccagggacatttgaagtgcaaattgaagaagttcgacaggtgggatcctataaaaaggggacaatgactacaggacacaatgtggctgacctggtggtgatactcaagattctgccaacgttggaagctgttgctgccctggggaacaaagtcgtggaaagcctaagagcacaggatccttctgaagttttaaccatgctgaccaacgaaactggctttgaaatcagttcttctgatgctacagtgaagattctcattacaacagtgccacccaatcttcgaaaactggatccagaactccatttggatatcaaagtattgcagagtgccttagcagccatccgacatgcccgctggttcgaggaaaatgcttctcagtccacagttaaagttctcatcagactactgaaggacttgaggattcgttttcctggctttgagcccctcacaccctggatccttgacctactaggccattatgctgtgatgaacaaccccaccagacagcctttggccctaaacgttgcatacaggcgctgcttgcagattctggctgcaggactgttcctgccaggttcagtgggtatcactgacccctgtgagagtggcaactttagagtacacacagtcatgaccctagaacagcaggacatggtctgctatacagctcagactctcgtccgaatcctctcacatggtggctttaggaagatccttggccaggagggtgatgccagctgtgagtgaccactgtgggtca

SEQ ID NO: 296196 - DNA, 1349 bp, Homo sapiens
ctctagaggatccgggtcaatttctacacagactggaaatcataaaaagtgacaccactgaaaaaaattgccaaataggaattctaggaccaaaaaataaaataagcaaattgaagaagttcgacaggtgggatcctataaaaaggggacaatgactacaggacacaatgtggctgacctggtggtgatactcaagattctgccaacgttggaagctgttgctgccctggggaacaaagtcgtggaaagcctaagagcacaggatccttctgaagttttaaccatgctgaccaacgaaactggctttgaaatcagttcttctgatgctacagtgaagattctcattacaacagtgccacccaatcttcgaaaactggatccagaactccatttggatatcaaagtattgcagagtgccttagcagccatccgacatgcccgctggttcgaggaaaatgcttctcagtccacagttaaagttctcatcagactactgaaggacttgaggattcgttttcctggctttgagcccctcacaccctggatccttgacctactaggccattatgctgtgatgaacaaccccaccagacagcctttggccctaaacgttgcatacaggcgctgcttgcagattctggctgcaggactgttcctgccaggttcagtgggtatcactgacccctgtgagagtggcaactttagagtacacacagtcatgaccctagaacagcaggacatggtctgctatacagctcagactctcgtccgaatcctctcacatggtggctttaggaagatccttggccaggagggtgatgccagctatcttgcttctgaaatatctacctgggatggagtgatagtaacaccttcagaaaaggcttatgagaagccaccagagaagaaggaaggagaggaagaagaggagaatacagaagaaccacctcaaggagaggaagaagaaagcatggaaactcaggagtgacattcccttcactccttttcctacccaagggggaagactggagcctaagctgcctgctactgggctttacatggtgacagacatttccgtgggatagggaagatagcaggaagaaaagtaaactccatagaagtgtcattccactgggttttgatattggcttagctgccagtctcccatttgtgacctatgccatccatctataatggaggataccaacatttcttcctaatattctataatctccaactcctgaaaacccctctctcaactaatactttgctgttgaaatgttgtgaaatgttaagtgtctggaaatttttttttctaagaaaaactattaaagtacttcctagtaggg

SEQ ID NO: 296197 - DNA, 1874 bp, Homo sapiens
agcggtcttcagttgtctgctactcagaggaaggggcggttggtgcggcctccattgttcgtgttttaaggcgccatgaggggtgacagaggccgtggtcgtggtgggcgctttggttccagaggaggcccaggaggagggttcaggccctttgtaccacatatcccatttgacttctatttgtgtgaaatggcctttccccgggtcaagccagcacctgatgaaacttccttcagtgaggccttgctgaagaggaatcaggacctggctcccaattctgctgaacaggcatctatcctttctctggtgacaaaaataaacaatgtgattgataatctgattgtggctccagggacatttgaagtgcaaattgaagaagttcgacaggtgggatcctataaaaaggggacaatgactacaggacacaatgtggctgacctggtggtgatactcaagattctgccaacgttggaagctgttgctgccctggggaacaaagtcgtggaaagcctaagagcacaggatccttctgaagttttaaccatgctgaccaacgaaactggctttgaaatcagttcttctgatgctacagtgaagattctcattacaacagtgccacccaatcttcgaaaactggatccagaactccatttggatatcaaagtattgcagagtgccttagcagccatccgacatgcccgctggttcgaggaaaatgcttctcagtccacgtgagtccctctctaaccatttggattaagataaactttttaactgcagtgaatagcaggatacccccatacttcctctgacagaactattttgcctgtgacctcgtgtctggatttttatttttaccttaaggaagcaaattaagatttagagaaagcagagaatgtatagttctggaaatagcatagtcagcttcaattctaccttaggcatggaaatacatgatcgtattgattttaatgtttgggtcactattactttcagagttaaagttctcatcagactactgaaggacttgaggattcgttttcctggctttgagcccctcacaccctggatccttgacctactaggccattatgctgtgatgaacaaccccaccagacagcctttggccctaaacgttgcatacaggcgctgcttgcagattctggctgcaggactgttcctgccaggttcagtgggtatcactgacccctgtgagagtggcaactttagagtacacacagtcatgaccctagaacagcaggacatggtctgctatacagctcagactctcgtccgaatcctctcacatggtggctttaggaagatccttggccaggagggtgatgccagctatcttgcttctgaaatatctacctgggatggagtgatagtaacaccttcagaaaaggcttatgagaagccaccagagaagaaggaaggagaggaagaagaggagaatacagaagaaccacctcaaggagaggaagaagaaagcatggaaactcaggagtgacattcccttcactccttttcctacccaagggggaagactggagcctaagctgcctgctactgggctttacatggtgacagacatttccgtgggatagggaagatagcaggaagaaaagtaaactccatagaagtgtcattccactgggttttgatattggcttagctgccagtctcccatttgtgacctatgccatccatctataatggaggataccaacatttcttcctaatattctataatctccaactcctgaaaacccctctctcaactaatactttgctgttgaaatgttgtgaaatgttaagtgtctggaaatttttttttctaagaaaaactattaaagtacttcctagtaggg

SEQ ID NO: 296198 - DNA, 2354 bp, Homo sapiens
agcggtcttcagttgtctgctactcagaggaaggggcggttggtgcggcctccattgttcgtgttttaaggcgccatgaggggtgacagaggccgtggtcgtggtgggcgctttggttccagaggaggcccaggaggagggttcaggccctttgtaccacatatcccatttgacttctatttgtgtgaaatggcctttccccgggtcaagccagcacctgatgaaacttccttcagtgaggccttgctgaagaggaatcaggacctggctcccaattctgctgaacaggcatctatcctttctctggtgacaaaaataaacaatgtgattgataatctgattgtggctccagggacatttgaagtgcaaattgaagaagttcgacaggtgggatcctataaaaaggggacaatgactacaggacacaatgtggctgacctggtggtgatactcaagattctgccaacgttggaagctgttgctgccctggggaacaaagtcgtggaaagcctaagagcacaggatccttctgaagttttaaccatgctgaccaacgaaactggctttgaaatcagttcttctgatgctacagtgaagattctcattacaacagtgccacccaatcttcgaaaactggatccagaactccattgttagttcttttttttccattgctggaaaatttaggggatattcaaaacatggtattgttgctgtttagtttacttagcttgttgctattccacatgcagcttcctgggaattgaagaacttaggtttattctgaactttgctctctccctctgtaatttggaaatagtttatcagcttgctagtggaattttcagatggggtgaccaagaaagcatttggaggacttaaaaaggactgagaaaatatttatggagggggataggcttttgaagaaaacagatcttgcatgtttctagtgatttttagacaagtgatttgctgatatgagaaacacagggtggcttaaagaattgcagagttggtcgggtgcggtggctcacgcctgtaatcccagcactttgggaggctgaggcaggcagatcacctgaggtcaggagttggagaccatcctggccaacatgatgaaaccccgtctctactaaaataaaaaattagtggggcatgatggcggttacctgtaatcccagctactcaggaggctgaggcaggagaattgctcgaacccgggaggcggaggttgcagtgagctgagatcacgccactgtacgcaatccagcctggacaacagagcgagactccgtctatcctgccctccttccaagtttttaagactgtagcagtggtaatgagtagcttgtttaatgaaaatgtttcatcctggcatatcatgcttgtctttttagtggatatcaaagtattgcagagtgccttagcagccatccgacatgcccgctggttcgaggaaaatgcttctcagtccacagttaaagttctcatcagactactgaaggacttgaggattcgttttcctggctttgagcccctcacaccctggatccttgacctactaggccattatgctgtgatgaacaaccccaccagacagcctttggccctaaacgttgcatacaggcgctgcttgcagattctggctgcaggactgttcctgccaggttcagtgggtatcactgacccctgtgagagtggcaactttagagtacacacagtcatgaccctagaacagcaggacatggtctgctatacagctcagactctcgtccgaatcctctcacatggtggctttaggaagatccttggccaggagggtgatgccagctatcttgcttctgaaatatctacctgggatggagtgatagtaacaccttcagaaaaggcttatgagaagccaccagagaagaaggaaggagaggaagaagaggagaatacagaagaaccacctcaaggagaggaagaagaaagcatggaaactcaggagtgacattcccttcactccttttcctacccaagggggaagactggagcctaagctgcctgctactgggctttacatggtgacagacatttccgtgggatagggaagatagcaggaagaaaagtaaactccatagaagtgtcattccactgggttttgatattggcttagctgccagtctcccatttgtgacctatgccatccatctataatggaggataccaacatttcttcctaatattctataatctccaactcctgaaaacccctctctcaactaatactttgctgttgaaatgttgtgaaatgttaagtgtctggaaatttttttttctaagaaaaactattaaagtacttcctagtaggg

SEQ ID NO: 296199 - DNA, 1555 bp, Homo sapiens
agcggtcttcagttgtctgctactcagaggaaggggcggttggtgcggcctccattgttcgtgttttaaggcgccatgaggggtgacagaggccgtggtcgtggtgggcgctttggttccagaggaggcccaggaggagggttcaggccctttgtaccacatatcccatttgacttctatttgtgtgaaatggcctttccccgggtcaagccagcacctgatgaaacttccttcagtgaggccttgctgaagaggaatcaggacctggctcccaattctgctgaacaggcatctatcctttctctggtgacaaaaataaacaatgtgattgataatctgattgtggctccagggacatttgaagtgcaaattgaagaagttcgacaggtgggatcctataaaaaggggacaatgactacaggacacaatgtggctgacctggtggtgatactcaagattctgccaacgttggaagctgttgctgccctggggaacaaagtcgtggaaagcctaagagcacaggatccttctgaagttttaaccatgctgaccaacgaaactggctttgaaatcagttcttctgatgctacagtgaagattctcattacaacagtgccacccaatcttcgaaaactggatccagaactccatttggatatcaaagtattgcagagtgccttagcagccatccgacatgcccgctggttcgaggagattcgttttcctggctttgagcccctcacaccctggatccttgacctactaggccattatgctgtgatgaacaaccccaccagacagcctttggccctaaacgttgcatacaggcgctgcttgcagattctggctgcaggactgttcctgccaggttcagtgggtatcactgacccctgtgagagtggcaactttagagtacacacagtcatgaccctagaacagcaggacatggtctgctatacagctcagactctcgtccgaatcctctcacatggtggctttaggaagatccttggccaggagggtgatgccagctatcttgcttctgaaatatctacctgggatggagtgatagtaacaccttcagaaaaggcttatgagaagccaccagagaagaaggaaggagaggaagaagaggagaatacagaagaaccacctcaaggagaggaagaagaaagcatggaaactcaggagtgacattcccttcactccttttcctacccaagggggaagactggagcctaagctgcctgctactgggctttacatggtgacagacatttccgtgggatagggaagatagcaggaagaaaagtaaactccatagaagtgtcattccactgggttttgatattggcttagctgccagtctcccatttgtgacctatgccatccatctataatggaggataccaacatttcttcctaatattctataatctccaactcctgaaaacccctctctcaactaatactttgctgttgaaatgttgtgaaatgttaagtgtctggaaatttttttttctaagaaaaactattaaagtacttcctagtaggg

SEQ ID NO: 296200 - DNA, 1045 bp, Homo sapiens
atccagaactccatttggatccagttttcgaagattgggtggcactgttgtaatgagaatcttcgaaaactggatccagaactccatttggatatcaaagtattgcagagtgccttagcagccatccgacatgcccgctggttcgaggaaaatgcttctcagtccacagttaaagttctcatcagactactgaaggacttgaggattcgttttcctggctttgagcccctcacaccctggatccttgacctactaggccattatgctgtgatgaacaaccccaccagacagcctttggccctaaacgttgcatacaggcgctgcttgcagattctggctgcaggactgttcctgccaggttcagtgggtatcactgacccctgtgagagtggcaactttagagtacacacagtcatgaccctagaacagcaggacatggtctgctatacagctcagactctcgtccgaatcctctcacatggtggctttaggaagatccttggccaggagggtgatgccagctatcttgcttctgaaatatctacctgggatggagtgatagtaacaccttcagaaaaggcttatgagaagccaccagagaagaaggaaggagaggaagaagaggagaatacagaagaaccacctcaaggagaggaagaagaaagcatggaaactcaggagtgacattcccttcactccttttcctacccaagggggaagactggagcctaagctgcctgctactgggctttacatggtgacagacatttccgtgggatagggaagatagcaggaagaaaagtaaactccatagaagtgtcattccactgggttttgatattggcttagctgccagtctcccatttgtgacctatgccatccatctataatggaggataccaacatttcttcctaatattctataatctccaactcctgaaaacccctctctcaactaatactttgctgttgaaatgttgtgaaatgttaagtgtctggaaatttttttttctaagaaaaactattaaagtacttcctagtaggg

SEQ ID NO: 296201 - DNA, 961 bp, Homo sapiens
cttaggctaggtacgaggctgggtgttaacttagcagccatccgacatgcccgctggttcgaggaaaatgcttctcagtccacagttaaagttctcatcagactactgaaggacttgaggattcgttttcctggctttgagcccctcacaccctggatccttgacctactaggccattatgctgtgatgaacaaccccaccagacagcctttggccctaaacgttgcatacaggcgctgcttgcagattctggctgcaggactgttcctgccaggttcagtgggtatcactgacccctgtgagagtggcaactttagagtacacacagtcatgaccctagaacagcaggacatggtctgctatacagctcagactctcgtccgaatcctctcacatggtggctttaggaagatccttggccaggagggtgatgccagctatcttgcttctgaaatatctacctgggatggagtgatagtaacaccttcagaaaaggcttatgagaagccaccagagaagaaggaaggagaggaagaagaggagaatacagaagaaccacctcaaggagaggaagaagaaagcatggaaactcaggagtgacattcccttcactccttttcctacccaagggggaagactggagcctaagctgcctgctactgggctttacatggtgacagacatttccgtgggatagggaagatagcaggaagaaaagtaaactccatagaagtgtcattccactgggttttgatattggcttagctgccagtctcccatttgtgacctatgccatccatctataatggaggataccaacatttcttcctaatattctataatctccaactcctgaaaacccctctctcaactaatactttgctgttgaaatgttgtgaaatgttaagtgtctggaaatttttttttctaagaaaaactattaaagtacttcctagtaggg

SEQ ID NO: 296202 - DNA, 1324 bp, Homo sapiens
agcggtcttcagttgtctgctactcagaggaaggggcggttggtgcggcctccattgttcgtgttttaaggcgccatgaggggtgacagaggccgtggtcgtggtgggcgctttggttccagaggaggcccaggaggagggttcaggccctttgtaccacatatcccatttgacttctatttgtgtgaaatggcctttccccgggtcaagccagcacctgatgaaacttccttcagtgaggccttgctgaagaggaatcaggacctggctcccaattctgctgaacaggcatctatcctttctctggtgacaaaaataaacaatgtgattgataatctgattgtggctccagggacatttgaagtgcaaattgaagaagttcgacaggtgggatcctataaaaaggggacaatgactacaggacacaatgtggctgacctggtggtgatactcaagattctgccaacgttggaagctgttgctgccctggggaacaaagtcgtggaaagcctaagagcacaggatccttctgaaggccattatgctgtgatgaacaaccccaccagacagcctttggccctaaacgttgcatacaggcgctgcttgcagattctggctgcaggactgttcctgccaggttcagtgggtatcactgacccctgtgagagtggcaactttagagtacacacagtcatgaccctagaacagcaggacatggtctgctatacagctcagactctcgtccgaatcctctcacatggtggctttaggaagatccttggccaggagggtgatgccagctatcttgcttctgaaatatctacctgggatggagtgatagtaacaccttcagaaaaggcttatgagaagccaccagagaagaaggaaggagaggaagaagaggagaatacagaagaaccacctcaaggagaggaagaagaaagcatggaaactcaggagtgacattcccttcactccttttcctacccaagggggaagactggagcctaagctgcctgctactgggctttacatggtgacagacatttccgtgggatagggaagatagcaggaagaaaagtaaactccatagaagtgtcattccactgggttttgatattggcttagctgccagtctcccatttgtgacctatgccatccatctataatggaggataccaacatttcttcctaatattctataatctccaactcctgaaaacccctctctcaactaatactttgctgttgaaatgttgtgaaatgttaagtgtctggaaatttttttttctaagaaaaactattaaagtacttcctagtaggg

SEQ ID NO: 296203 - DNA, 770 bp, Homo sapiens
gtacccccgtccgatggcccatgggctaaacgttgcatacaggcgctgcttgcagattctggctgcaggactgttcctgccaggttcagtgggtatcactgacccctgtgagagtggcaactttagagtacacacagtcatgaccctagaacagcaggacatggtctgctatacagctcagactctcgtccgaatcctctcacatggtggctttaggaagatccttggccaggagggtgatgccagctatcttgcttctgaaatatctacctgggatggagtgatagtaacaccttcagaaaaggcttatgagaagccaccagagaagaaggaaggagaggaagaagaggagaatacagaagaaccacctcaaggagaggaagaagaaagcatggaaactcaggagtgacattcccttcactccttttcctacccaagggggaagactggagcctaagctgcctgctactgggctttacatggtgacagacatttccgtgggatagggaagatagcaggaagaaaagtaaactccatagaagtgtcattccactgggttttgatattggcttagctgccagtctcccatttgtgacctatgccatccatctataatggaggataccaacatttcttcctaatattctataatctccaactcctgaaaacccctctctcaactaatactttgctgttgaaatgttgtgaaatgttaagtgtctggaaatttttttttctaagaaaaactattaaagtacttcctagtaggg

SEQ ID NO: 296204 - DNA, 1141 bp, Homo sapiens
agaagtgccattttgatggcacacctactggatttattatttttcagggccattatgctgtgatgaacaaccccaccagacagcctttggccctaaacgttgcatacaggtacagcatgctttgggtttagggttggttgtaaactattttgtgcattcctttaatacctcatacctccctgtgttctaggcgctgcttgcagattctggctgcaggactgttcctgccaggttcagtgggtatcactgacccctgtgagagtggcaactttagagtacacacagtcatgaccctagaacagcaggtattgggacagatatgaactgagttgttttgccccactcttttgaatactgctgctcagcaggcaaagtggaatatggtctttacgggtcaggaatttggggattctgaaagactttggtcctgagatttaaaaagctgtcttaatctctgttttcagaagggtattactcaaataaggtcctttgattttccttgcttactctcactttgctttccttcaggacatggtctgctatacagctcagactctcgtccgaatcctctcacatggtggctttaggaagatccttggccaggagggtgatgccagctatcttgcttctgaaatatctacctgggatggagtgatagtaacaccttcagaaaaggcttatgagaagccaccagagaagaaggaaggagaggaagaagaggagaatacagaagaaccacctcaaggagaggaagaagaaagcatggaaactcaggagtgacattcccttcactccttttcctacccaagggggaagactggagcctaagctgcctgctactgggctttacatggtgacagacatttccgtgggatagggaagatagcaggaagaaaagtaaactccatagaagtgtcattccactgggttttgatattggcttagctgccagtctcccatttgtgacctatgccatccatctataatggaggataccaacatttcttcctaatattctataatctccaactcctgaaaacccctctctcaactaatactttgctgttgaaatgttgtgaaatgttaagtgtctggaaatttttttttctaagaaaaactattaaagtacttcctagtaggg

SEQ ID NO: 296205 - DNA, 885 bp, Homo sapiens
agcggtcttcagttgtctgctactcagaggaaggggcggttggtgcggcctccattgttcgtgttttaaggcgccatgaggggtgacagaggccgtggtcgtggtgggcgctttggttccagaggaggcccaggaggagggttcaggccctttgtaccacatatcccatttgacttctatttgtgtgaaatggcctttccccgggtcaagccagcacctgatgaaacttccttcagtgaggccttgctgaagaggaatcaggacctggctcccaattctgctgaacaggcatctatcctttctctggtgacaaaaataaacaatgtgattgataatctgattgtggctccagggacatttgaagtgcaaattgaagaagttcgacaggtgggatcctataaaaaggggacaatgactacaggacacaatgtggctgacctggtggtgatactcaagattctgccaacgttggaagctgttgctgccctggggaacaaagtcgtggaaagcctaagagcacaggatccttctgaagttttaaccatgctgaccaacgaaactggctttgaaatcagttcttctgatgctacagtgaagattctcattacaacagtgccacccaatcttcgaaaactggatccagaactccatttggatatcaaagtattgcagagtgccttagcagccatccgacatgcccgctggttcgaggaaaatgcttctcagtccacagttaaagttctcatcagactactgaaggacttgaggattcgttttcctggctttgagcccctcacaccctggatccttgacctactaggccgttatgctgtgatgaacaaccccgcacactgatacaaccccgaacgcggatagaagtccgag

SEQ ID NO: 296206 - DNA, 1439 bp, Homo sapiens
agcggtcttcagttgtctgctactcagaggaaggggcggttggtgcggcctccattgttcgtgttttaaggcgccatgaggggtgacagaggccgtggtcgtggtgggcgctttggttccagaggaggcccaggaggagggttcaggccctttgtaccacatatcccatttgacttctatttgtgtgaaatggcctttccccgggtcaagccagcacctgatgaaacttccttcagtgaggccttgctgaagaggaatcaggacctggctcccaattctgctgaacaggcatctatcctttctctggtgacaaaaataaacaatgtgattgataatctgattgtggctccagggacatttgaagtgcaaattgaagaagttcgacaggtgggatcctataaaaaggggacaatgactacaggacacaatgtggctgacctggtggtgatactcaagattctgccaacgttggaagctgttgctgccctggggaacaaagtcgtggaaagcctaagagcacaggatccttctgaagttttaaccatgctgaccaacgaaactggctttgaaatcagttcttctgatgctacagtgaagattctcattacaacagtgccacccaatcttcgaaaactggatccagaactccatttggatatcaaagtattgcagagtgccttagcagccatccgacatgcccgctggttcgaggaaaatgcttctcagtccacagttaaagttctcatcagactactgaaggacttgaggattcgttttcctggctttgagcccctcacaccctggatccttgacctactagtaagtaaagatgggcaattggagttcctcatcatccttatttactagtagtagtagtagtagtagtagtagtagtagtagtagtaactctgaaattcaccagagtctgaaatttggtgaagcttaaaagaaattttattggtagacaagtaatccaataaaaattcaacatttacatgactcagagacatttgtttaaaaaaaaagaaaaaattcaaagtttttttttttttttgtatattcaatgaaatgagtagttactgagttatagtgtcccgttttcttctcatgactgctaccatttaatcatggtagtagagagaaatgagtgagcagccatttcagaattgcttctgaacatgaaaattttggctagacttagaccttaatgaccagttttcctcgtgatcatttaaggttttagtttgatgcctgtaatcccagcactttgggaggctgaggccagaggatcacttgaagccaggagtttgagaccagcctgggcaaaatagcgagactctgtctctacaagagaaaaaaaaagagtcaggagggttgcttgagcccaggagttcgcggttacagtgaactatgattgcgccactgcactccagcctgga

SEQ ID NO: 296207 - DNA, 842 bp, Homo sapiens
agcggtcttcagttgtctgctactcagaggaaggggcggttggtgcggcctccattgttcgtgttttaaggcgccatgaggggtgacagaggccgtggtcgtggtgggcgctttggttccagaggaggcccaggaggagggttcaggccctttgtaccacatatcccatttgacttctatttgtgtgaaatggcctttccccgggtcaagccagcacctgatgaaacttccttcagtgaggccttgctgaagaggaatcaggacctggctcccaattctgctgaacaggcatctatcctttctctggtgacaaaaataaacaatgtgattgataatctgattgtggctccagggacatttgaagtgcaaattgaagaagttcgacaggtgggatcctataaaaaggggacaatgactacaggacacaatgtggctgacctggtggtgatactcaagattctgccaacgttggaagctgttgctgccctggggaacaaagtcgtggaaagcctaagagcacaggatccttctgaagttttaaccatgctgaccaacgaaactggctttgaaatcagttcttctgatgctacagtgaagattctcattacaacagtgccacccaatcttcgaaaactggatccagaactccatttggatatcaaagtattgcagagtgccttagcagccatccgacatgcccgctggttcgaggaaaatgcttctcagtccacagttaaagttctcatcagactactgaaggacttgaggattcgttttcctggctttgagcccctcacaccctggatccttgacctactagtcaagccagcaccaccaataca

SEQ ID NO: 296208 - DNA, 2184 bp, Homo sapiens
agcggtcttcagttgtctgctactcagaggaaggggcggttggtgcggcctccattgttcgtgttttaaggcgccatgaggggtgacagaggccgtggtcgtggtgggcgctttggttccagaggaggcccaggaggagggttcaggccctttgtaccacatatcccatttgacttctatttgtgtgaaatggcctttccccgggtcaagccagcacctgatgaaacttccttcagtgaggccttgctgaagaggaatcaggacctggctcccaattctgctgaacaggcatctatcctttctctggtgacaaaaataaacaatgtgattgataatctgattgtggctccagggacatttgaagtgcaaattgaagaagttcgacaggtgggatcctataaaaaggggacaatgactacaggacacaatgtggctgacctggtggtgatactcaagattctgccaacgttggaagctgttgctgccctggggaacaaagtcgtggaaagcctaagagcacaggatccttctgaagttttaaccatgctgaccaacgaaactggctttgaaatcagttcttctgatgctacagtgaagattctcattacaacagtgccacccaatcttcgaaaactggatccagaactccattgttagttcttttttttccattgctggaaaatttaggggatattcaaaacatggtattgttgctgtttagtttacttagcttgttgctattccacatgcagcttcctgggaattgaagaacttaggtttattctgaactttgctctctccctctgtaatttggaaatagtttatcagcttgctagtggaattttcagatggggtgaccaagaaagcatttggaggacttaaaaaggactgagaaaatatttatggagggggataggcttttgaagaaaacagatcttgcatgtttctagtgatttttagacaagtgatttgctgatatgagaaacacagggtggcttaaagaattgcagagttggtcgggtgcggtggctcacgcctgtaatcccagcactttgggaggctgaggcaggcagatcacctgaggtcaggagttggagaccatcctggccaacatgatgaaaccccgtctctactaaaataaaaaattagtggggcatgatggcggttacctgtaatcccagctactcaggaggctgaggcaggagaattgctcgaacccgggaggcggaggttgcagtgagctgagatcacgccactgtacgcaatccagcctggacaacagagcgagactccgtctatcctgccctccttccaagtttttaagactgtagcagtggtaatgagtagcttgtttaatgaaaatgtttcatcctggcatatcatgcttgtctttttagtggatatcaaagtattgcagagtgccttagcagccatccgacatgcccgctggttcgaggaaaatgcttctcagtccacagttaaagttctcatcagactactgaaggacttgaggattcgttttcctggctttgagcccctcacaccctggatccttgacctactagtaagtaaagatgggcaattggagttcctcatcatccttatttactagtagtagtagtagtagtagtagtagtagtagtagtagtaactctgaaattcaccagagtctgaaatttggtgaagcttaaaagaaattttattggtagacaagtaatccaataaaaattcaacatttacatgactcagagacatttgtttaaaaaaaaagaaaaaattcaaagtttttttttttttttgtatattcaatgaaatgagtagttactgagttatagtgtcccgttttcttctcatgactgctaccatttaatcatggtagtagagagaaatgagtgagcagccatttcagaattgcttctgaacatgaaaattttggctagacttagaccttaatgaccagttttcctcgtgatcatttaaggttttagtttgatgcctgtaatcccagcactttgggaggctgaggccagaggatcacttgaagccaggagtttgagaccagcctgggcaaaatagcgagactctgtctctacaagagaaaaaaaaagagtcaggagggttgcttgagcccaggagttcgcggttacagtgaactatgattgcgccactgcactccagcctgga

SEQ ID NO: 296209 - DNA, 336 bp, Homo sapiens
ccagaggatcacttgaagccaggagtttgagaccagcctgggcaaaatagcgagactctgtctctacaagagaaaaaaaaaaaaattagccagttgtagtggcttgaacttatagtcctagcttctcaggaggctgagtcaggagggttgcttgagcccaggagttcgcggttacagtgaactatgattgcgccactgcactccagcctggatgacaaagtgaggccctgtctctaaaaaataaagttctagttatcagaagtgccattttgatggcacacctactggatttattatttttcagggccattatgctgtgatgaacaaccccaccag

SEQ ID NO: 296210 - DNA, 529 bp, Homo sapiens
ccggctagcccgacagttggggtgtggtggccttggtatgtgcgttctcgtgttacatcgcgccatcgttggtatatggttagtttgttggttagttaggcctagtatgaggagcgttatggagtggaagtgaaatcacatggctaggccggaggtcattaggagggctgagagggcccctgttaggggtcatgggctgggtcttgtgggtggaaacgcgctggctgactggggtcggcgtttagttcagcgcagcgactcggggacctggagctgacgcctagacacttgtattagctttaatagaagagaaatggaggagccatagaatattaaggatgaattcaggaaggcctgagaccatggaaaacttgcctgctctctacactattttccaaggagaggttgctatggtgacagactatggggcctttatcaaaatcccaggctgtcggaagcaagtctgtccatcgactcatatgtcatcctgtcggctagtcgggggtccgagctcgatctaatcatgtct

SEQ ID NO: 296211 - DNA, 1809 bp, Homo sapiens
ccggctagcccgacagttggggtgtggtggccttggtatgtgcgttctcgtgttacatcgcgccatcgttggtatatggttagtttgttggttagttaggcctagtatgaggagcgttatggagtggaagtgaaatcacatggctaggccggaggtcattaggagggctgagagggcccctgttaggggtcatgggctgggtcttgtgggtggaaacgcgctggctgactggggtcggcgtttagttcagcgcagcgactcggggacctggagctgacgcctagacacttgtattagctttaatagaagagaaatggaggagccatagaatattaaggatgaattcaggaaggcctgagaccatggaaaacttgcctgctctctacactattttccaaggagaggttgctatggtgacagactatggggcctttatcaaaatcccaggctgtcggaagcaaggtctggtccatcgaactcatatgtcatcctgtcgggtggataagccctctgagatagtagatgttggagataaagtgtgggtgaagcttattggccgagagatgaaaaatgatagaataaaagtatccctctccatgaaggttgtcaatcaagggactgggaaagaccttgatcccaacaatgttatcattgagcaagaagagaggcggaggcgatccttccaggattacactgggcagaagatcacccttgaggctgtcttgaacactacctgcaagaagtgtggctgtaaaggccactttgcaaaagattgtttcatgcaaccaggtgggactaaatactctctgatacctgatgaggaagaggaaaaggaagaggcaaagtcagcagagtttgagaagcctgaccctacaaggaatccttctagaaaaagaaagaaggagaagaagaaaaagaaacatagagataggaagtcatctgactctgacagctcagactctgagagtgatacaggcaagagggcaaggcacacatcaaaagacagcaaggcagcaaagaagaagaaaaagaagaagaagcacaagaagaagcacaaggagtgagagtataaagagtgtagggggtggttgagagtaagaaaccaggagccttgtgccttgagactcctggaaagactcaatagtgagaatatagcctcccaccccattaacttcgctcccatgggagatggcttcccctcatgcaacaggcaggtttgggagttagaggtcaaaagcagctgcctgaatgagttgttgtttccttatcactcctggtccctttgcaagtgaaccctgcagctcacccattcattcacccaacttccttcattcagcaggaggccctattaccctctccagctgccactgccagagctggattcctgtaaaggagtccaggctagagccacagagactgttgtggaggtgagttcggctgtagttagagtgattggacccttcctattggtctgtcctgggccaactggtgggtgatctctgctgcatccaacatgggagcagagactggcagcaggaggggggaacatggtgagaagtggtgctcacttttcccattcctcctaacatagttctactatgctagaagtggcatccagcggccacagctagaaaacagtctgcagtgtgacttaacttgtgtattgcattccagcagaccactgaaccagacagcgaagccaagatcattgttctactttgtatttactactgtgtgaatcagttgattctacttcaggtccttgcttaaattcctgtcactaaatggaaatgtgtttggttttaaact

SEQ ID NO: 296212 - DNA, 1928 bp, Homo sapiens
ccggctagcccgacagttggggtgtggtggccttggtatgtgcgttctcgtgttacatcgcgccatcgttggtatatggttagtttgttggttagttaggcctagtatgaggagcgttatggagtggaagtgaaatcacatggctaggccggaggtcattaggagggctgagagggcccctgttaggggtcatgggctgggtcttgtgggtggaaacgcgctggctgactggggtcggcgtttagttcagcgcagcgactcggggacctggagctgacgcctagacacttgtattagctttaatagaagagaaatggaggagccatagaatattaaggatgaattcaggaaggcctgagaccatggaaaacttgcctgctctctacactattttccaaggagaggttgctatggtgacagactatggggcctttatcaaaatcccaggctgtcggaagcaaggtctggtccatcgaactcatatgtcatcctgtcgggtggataagccctctgagatagtagatgttggagataaagtgtgggtgaagcttattggccgagagatgaaaaatgatagaataaaagtatccctctccatgaaggttgtcaatcaagggactgggaaagaccttgatcccaacaatgttatcattgagcaagaagagaggcggaggcgatccttccaggattacactgggcagaagatcacccttgaggctgtcttgaacactacctgcaagaagtgtggctgtaaaggccactttgcaaaagattgtttcatgcaaccaggtgggactaaatactctctgatacctgatgaggaagaggaaaaggaagaggcaaagtcagcagagtttgagaagcctgaccctacaaggaatccttctagaaaaagaaagaaggagaagaagaaaaagaaacatagagataggaagtcatctgactctgacagctcagactctgagagtgatacaggcaagagggcaaggcacacatcaaaagacagcaaggcagcaaagaagaagaaaaagaagaagaagcacaagaagaagcacaaggagtgagagtataaagagtgtagggggtggttgagagtaagaaaccaggagccttgtgccttgagactcctggaaagactcaatagtgagaatatagcctcccaccccattaacttcgctcccatgggagatggcttcccctcatgcaacaggcaggtttgggagttagaggtcaaaagcagctgcctgaatgagttgttgtttccttatcactcctggtccctttgcaagtgaaccctgcagctcacccattcattcacccaacttccttcattcagcaggaggccctattaccctctccagctgccactgccagagctggattcctgtaaaggagtccaggctagagccacagagactgttgtggaggtgagttcggctgtagttagagtgattggacccttcctattggtctgtcctgggccaactggtgggtgatctctgctgcatccaacatgggagcagagactggcagcaggaggggggaacatggtgagaagtggtgctcacttttcccattcctcctaacatagttctactatgctagaagtggcatccagcggccacagctagaaaacagtctgcagtgtgacttaacttgtgtattgcattccagcagaccactgaaccagacagcgaagccaagatcattgttctactttgtatttactactgtgtgaatcagttgattctacttcaggtccttgcttaaattcctgtcactaaatggaaatgtgtttggttttaaacttactgagttatttttcctataatccttcttcctgggtaacttacagacttaaagtcactgagcctgcattagctgacaaaaacatttaatatgttaccttagaccttggagagatgccc

SEQ ID NO: 296213 - DNA, 1784 bp, Homo sapiens
ccggctagcccgacagttggggtgtggtggccttggtatgtgcgttctcgtgttacatcgcgccatcgttggtatatggttagtttgttggttagttaggcctagtatgaggagcgttatggagtggaagtgaaatcacatggctaggccggaggtcattaggagggctgagagggcccctgttaggggtcatgggctgggtcttgtgggtggaaacgcgctggctgactggggtcggcgtttagttcagcgcagcgactcggggacctggagctgacgcctagacacttgtattagctttaatagaagagaaatggaggagccatagaatattaaggatgaattcaggaaggcctgagaccatggaaaacttgcctgctctctacactattttccaaggagaggttgctatggtgacagactatggggcctttatcaaaatcccaggctgtcggaagcaaggtctggtccatcgaactcatatgtcatcctgtcgggtggataagccctctgagatagtagatgttggagataaagtgtgggtgaagcttattggccgagagatgaaaaatgatagaataaaagtatccctctccatgaaggttgtcaatcaagggactgggaaagaccttgatcccaacaatgttatcattgagcaagaagagaggcggaggcgatccttccaggattacactgggcagaagatcacccttgaggctgtcttgaacactacctgcaagaagtgtggctgtaaaggccactttgcaaaagattgtttcatgcaaccaggtgggactaaatactctctgatacctgatgaggaagaggaaaaggaagaggcaaagtcagcagagtttgagaagcctgaccctacaaggaatccttctagaaaaagaaagaaggagaagaagaaaaagaaacatagagataggaagtcatctgactctgacagctcagactctgagagtgatacaggcaagagggcaaggcacacatcaaaagacagcaaggcagcaaagaagaagaaaaagaagaagaagcacaagaagaagcacaaggagtgagagtataaagagtgtagggggtggttgagagtaagaaaccaggagccttgtgccttgagactcctggaaagactcaatagtgagaatatagcctcccaccccattaacttcgctcccatgggagatggcttcccctcatgcaacaggcaggtttgggagttagaggtcaaaagcagctgcctgaatgagttgttgtttccttatcactcctggtccctttgcaagtgaaccctgcagctcacccattcattcacccaacttccttcattcagcaggaggccctattaccctctccagctgccactgccagagctggattcctgtaaaggagtccaggctagagccacagagactgttgtggaggtgagttcggctgtagttagagtgattggacccttcctattggtctgtcctgggccaactggtgggtgatctctgctgcatccaacatgggagcagagactggcagcaggaggggggaacatggtgagaagtggtgctcacttttcccattcctcctaacatagttccctatcgtcattaccggcatctcctgccctcattcgagtagacagtcttttattgttcagaatgtgtgcattgcagtcaatttgaccactgggacatccagcggaacccacataaacggaatactgtgttgttattactgagacaaaccatggaattaccattggtcttaaattaaactcccgtcaatta

SEQ ID NO: 296214 - DNA, 1948 bp, Homo sapiens
  misc_feature (285)..(285): n is a, c, g, or t
  misc_feature (289)..(289): n is a, c, g, or t
ccggctagcccgacagttggggtgtggtggccttggtatgtgcgttctcgtgttacatcgcgccatcgttggtatatggttagtttgttggttagttaggcctagtatgaggagcgttatggagtggaagtgaaatcacatggctaggccggaggtcattaggagggctgagagggcccctgttaggggtcatgggctgggtcttgtgggtggaaacgcgctggctgactggggtcggcgtttagttcagcgcagcgactcggggacctggagctgacgcctagnacgngacgaggaagaacggggtgggtggctgcctgagtctggaggcgacgcctcggttgtgcagtctgaacctgcccttctcagctgagggtgctgacagcaaggggtgggaggcgggccccgagtccccagctgtggacacttgtattagctttaatagaagagaaatggaggagccatagaatattaaggatgaattcaggaaggcctgagaccatggaaaacttgcctgctctctacactattttccaaggagaggttgctatggtgacagactatggggcctttatcaaaatcccaggctgtcggaagcaaggtctggtccatcgaactcatatgtcatcctgtcgggtggataagccctctgagatagtagatgttggagataaagtgtgggtgaagcttattggccgagagatgaaaaatgatagaataaaagtatccctctccatgaaggttgtcaatcaagggactgggaaagaccttgatcccaacaatgttatcattgagcaagaagagaggcggaggcgatccttccaggattacactgggcagaagatcacccttgaggctgtcttgaacactacctgcaagaagtgtggctgtaaaggccactttgcaaaagattgtttcatgcaaccaggtgggactaaatactctctgatacctgatgaggaagaggaaaaggaagaggcaaagtcagcagagtttgagaagcctgaccctacaaggaatccttctagaaaaagaaagaaggagaagaagaaaaagaaacatagagataggaagtcatctgactctgacagctcagactctgagagtgatacaggcaagagggcaaggcacacatcaaaagacagcaaggcagcaaagaagaagaaaaagaagaagaagcacaagaagaagcacaaggagtgagagtataaagagtgtagggggtggttgagagtaagaaaccaggagccttgtgccttgagactcctggaaagactcaatagtgagaatatagcctcccaccccattaacttcgctcccatgggagatggcttcccctcatgcaacaggcaggtttgggagttagaggtcaaaagcagctgcctgaatgagttgttgtttccttatcactcctggtccctttgcaagtgaaccctgcagctcacccattcattcacccaacttccttcattcagcaggaggccctattaccctctccagctgccactgccagagctggattcctgtaaaggagtccaggctagagccacagagactgttgtggaggtgagttcggctgtagttagagtgattggacccttcctattggtctgtcctgggccaactggtgggtgatctctgctgcatccaacatgggagcagagactggcagcaggaggggggaacatggtgagaagtggtgctcacttttcccattcctcctaacatagttctactatgctagaagtggcatccagcggccacagctagaaaacagtctgcagtgtgacttaacttgtgtattgcattccagcagaccactgaaccagacagcgaagccaagatcattgttctactttgtatttactactgtgtgaatcagttgattctacttcaggtccttgcttaaattcctgtcactaaatggaaatgtgtttggttttaaact

SEQ ID NO: 296215 - DNA, 1699 bp, Homo sapiens
cgacagcaatgtcagcaaagaagaagaaaaagaagaagaagcacaagaagaagcacaaggagtgagagtataaagagtgtagggggtggttgagagtaagaaaccaggagccttgtgccttgagactcctggaaagactcaatagtgaggcgggccccgagtccccagctgtggacacttgtattagctttaatagaagagaaatggaggagccatagaatattaaggatgaattcaggaaggcctgagaccatggaaaacttgcctgctctctacactattttccaaggagaggttgctatggtgacagactatggggcctttatcaaaatcccaggctgtcggaagcaaggtctggtccatcgaactcatatgtcatcctgtcgggtggataagccctctgagatagtagatgttggagataaagtgtgggtgaagcttattggccgagagatgaaaaatgatagaataaaagtatccctctccatgaaggttgtcaatcaagggactgggaaagaccttgatcccaacaatgttatcattgagcaagaagagaggcggaggcgatccttccaggattacactgggcagaagatcacccttgaggctgtcttgaacactacctgcaagaagtgtggctgtaaaggccactttgcaaaagattgtttcatgcaaccaggtgggactaaatactctctgatacctgatgaggaagaggaaaaggaagaggcaaagtcagcagagtttgagaagcctgaccctacaaggaatccttctagaaaaagaaagaaggagaagaagaaaaagaaacatagagataggaagtcatctgactctgacagctcagactctgagagtgatacaggcaagagggcaaggcacacatcaaaagacagcaaggcagcaaagaagaagaaaaagaagaagaagcacaagaagaagcacaaggagtgagagtataaagagtgtagggggtggttgagagtaagaaaccaggagccttgtgccttgagactcctggaaagactcaatagtgagaatatagcctcccaccccattaacttcgctcccatgggagatggcttcccctcatgcaacaggcaggtttgggagttagaggtcaaaagcagctgcctgaatgagttgttgtttccttatcactcctggtccctttgcaagtgaaccctgcagctcacccattcattcacccaacttccttcattcagcaggaggccctattaccctctccagctgccactgccagagctggattcctgtaaaggagtccaggctagagccacagagactgttgtggaggtgagttcggctgtagttagagtgattggacccttcctattggtctgtcctgggccaactggtgggtgatctctgctgcatccaacatgggagcagagactggcagcaggaggggggaacatggtgagaagtggtgctcacttttcccattcctcctaacatagttctactatgctagaagtggcatccagcggccacagctagaaaacagtctgcagtgtgacttaacttgtgtattgcattccagcagaccactgaaccagacagcgaagccaagatcattgttctactttgtatttactactgtgtgaatcagttgattctacttcaggtccttgcttaaattcctgtcactaaatggaaatgtgtttggttttaaact

SEQ ID NO: 296216 - DNA, 1827 bp, Homo sapiens
  misc_feature (285)..(285): n is a, c, g, or t
  misc_feature (289)..(289): n is a, c, g, or t
ccggctagcccgacagttggggtgtggtggccttggtatgtgcgttctcgtgttacatcgcgccatcgttggtatatggttagtttgttggttagttaggcctagtatgaggagcgttatggagtggaagtgaaatcacatggctaggccggaggtcattaggagggctgagagggcccctgttaggggtcatgggctgggtcttgtgggtggaaacgcgctggctgactggggtcggcgtttagttcagcgcagcgactcggggacctggagctgacgcctagnacgngacgaggaagaacggggtgggtggctgcctgagtctggaggcgacgcctcggttgtgcagtctgaacctgcccttctcagctgagggtgctgacagcaaggggtgggaggcgggccccgagtccccagctgtggttgctatggtgacagactatggggcctttatcaaaatcccaggctgtcggaagcaaggtctggtccatcgaactcatatgtcatcctgtcgggtggataagccctctgagatagtagatgttggagataaagtgtgggtgaagcttattggccgagagatgaaaaatgatagaataaaagtatccctctccatgaaggttgtcaatcaagggactgggaaagaccttgatcccaacaatgttatcattgagcaagaagagaggcggaggcgatccttccaggattacactgggcagaagatcacccttgaggctgtcttgaacactacctgcaagaagtgtggctgtaaaggccactttgcaaaagattgtttcatgcaaccaggtgggactaaatactctctgatacctgatgaggaagaggaaaaggaagaggcaaagtcagcagagtttgagaagcctgaccctacaaggaatccttctagaaaaagaaagaaggagaagaagaaaaagaaacatagagataggaagtcatctgactctgacagctcagactctgagagtgatacaggcaagagggcaaggcacacatcaaaagacagcaaggcagcaaagaagaagaaaaagaagaagaagcacaagaagaagcacaaggagtgagagtataaagagtgtagggggtggttgagagtaagaaaccaggagccttgtgccttgagactcctggaaagactcaatagtgagaatatagcctcccaccccattaacttcgctcccatgggagatggcttcccctcatgcaacaggcaggtttgggagttagaggtcaaaagcagctgcctgaatgagttgttgtttccttatcactcctggtccctttgcaagtgaaccctgcagctcacccattcattcacccaacttccttcattcagcaggaggccctattaccctctccagctgccactgccagagctggattcctgtaaaggagtccaggctagagccacagagactgttgtggaggtgagttcggctgtagttagagtgattggacccttcctattggtctgtcctgggccaactggtgggtgatctctgctgcatccaacatgggagcagagactggcagcaggaggggggaacatggtgagaagtggtgctcacttttcccattcctcctaacatagttctactatgctagaagtggcatccagcggccacagctagaaaacagtctgcagtgtgacttaacttgtgtattgcattccagcagaccactgaaccagacagcgaagccaagatcattgttctactttgtatttactactgtgtgaatcagttgattctacttcaggtccttgcttaaattcctgtcactaaatggaaatgtgtttggttttaaact

SEQ ID NO: 296217 - DNA, 1879 bp, Homo sapiens
ccggctagcccgacagttggggtgtggtggccttggtatgtgcgttctcgtgttacatcgcgccatcgttggtatatggttagtttgttggttagttaggcctagtatgaggagcgttatggagtggaagtgaaatcacatggctaggccggaggtcattaggagggctgagagggcccctgttaggggtcatgggctgggtcttgtgggtggaaacgcgctggctgactggggtcggcgtttagttcagcgcagcgactcggggacctggagctgacgcctagacacttgtattagctttaatagaagagaaatggaggagccatagaatattaaggatgaattcaggaaggcctgagaccatggaaaacttgcctgctctctacactattttccaaggagagttatggtgaagctgaaacagtgctcaagatgaagcagctaattgaagacactgaaaagaataaagtttatgttgctatggtgacagactatggggcctttatcaaaatcccaggctgtcggaagcaaggtctggtccatcgaactcatatgtcatcctgtcgggtggataagccctctgagatagtagatgttggagataaagtgtgggtgaagcttattggccgagagatgaaaaatgatagaataaaagtatccctctccatgaaggttgtcaatcaagggactgggaaagaccttgatcccaacaatgttatcattgagcaagaagagaggcggaggcgatccttccaggattacactgggcagaagatcacccttgaggctgtcttgaacactacctgcaagaagtgtggctgtaaaggccactttgcaaaagattgtttcatgcaaccaggtgggactaaatactctctgatacctgatgaggaagaggaaaaggaagaggcaaagtcagcagagtttgagaagcctgaccctacaaggaatccttctagaaaaagaaagaaggagaagaagaaaaagaaacatagagataggaagtcatctgactctgacagctcagactctgagagtgatacaggcaagagggcaaggcacacatcaaaagacagcaaggcagcaaagaagaagaaaaagaagaagaagcacaagaagaagcacaaggagtgagagtataaagagtgtagggggtggttgagagtaagaaaccaggagccttgtgccttgagactcctggaaagactcaatagtgagaatatagcctcccaccccattaacttcgctcccatgggagatggcttcccctcatgcaacaggcaggtttgggagttagaggtcaaaagcagctgcctgaatgagttgttgtttccttatcactcctggtccctttgcaagtgaaccctgcagctcacccattcattcacccaacttccttcattcagcaggaggccctattaccctctccagctgccactgccagagctggattcctgtaaaggagtccaggctagagccacagagactgttgtggaggtgagttcggctgtagttagagtgattggacccttcctattggtctgtcctgggccaactggtgggtgatctctgctgcatccaacatgggagcagagactggcagcaggaggggggaacatggtgagaagtggtgctcacttttcccattcctcctaacatagttctactatgctagaagtggcatccagcggccacagctagaaaacagtctgcagtgtgacttaacttgtgtattgcattccagcagaccactgaaccagacagcgaagccaagatcattgttctactttgtatttactactgtgtgaatcagttgattctacttcaggtccttgcttaaattcctgtcactaaatggaaatgtgtttggttttaaact

SEQ ID NO: 296218 - DNA, 1717 bp, Homo sapiens
ccggctagcccgacagttggggtgtggtggccttggtatgtgcgttctcgtgttacatcgcgccatcgttggtatatggttagtttgttggttagttaggcctagtatgaggagcgttatggagtggaagtgaaatcacatggctaggccggaggtcattaggagggctgagagggcccctgttaggggtcatgggctgggtcttgtgggtggaaacgcgctggctgactggggtcggcgtttagttcagcgcagcgactcggggacctggagctgacgcctagacacttgtattagctttaatagaagagaaatggaggagccatagaatattaaggatgaattcaggaaggcctgagaccatggaaaacttgcctgctctctacactattttccaaggagaggttgctatggtgacagactatggggcctttatcaaaatcccaggctgtcggaagcaaggtctggtccatcgaactcatatgtcatcctgtcgggtggataagccctctgagatagtagatgttggagataaagtgtgggtgaagcttattggccgagaggcaagaagagaggcggaggcgatccttccaggattacactgggcagaagatcacccttgaggctgtcttgaacactacctgcaagaagtgtggctgtaaaggccactttgcaaaagattgtttcatgcaaccaggtgggactaaatactctctgatacctgatgaggaagaggaaaaggaagaggcaaagtcagcagagtttgagaagcctgaccctacaaggaatccttctagaaaaagaaagaaggagaagaagaaaaagaaacatagagataggaagtcatctgactctgacagctcagactctgagagtgatacaggcaagagggcaaggcacacatcaaaagacagcaaggcagcaaagaagaagaaaaagaagaagaagcacaagaagaagcacaaggagtgagagtataaagagtgtagggggtggttgagagtaagaaaccaggagccttgtgccttgagactcctggaaagactcaatagtgagaatatagcctcccaccccattaacttcgctcccatgggagatggcttcccctcatgcaacaggcaggtttgggagttagaggtcaaaagcagctgcctgaatgagttgttgtttccttatcactcctggtccctttgcaagtgaaccctgcagctcacccattcattcacccaacttccttcattcagcaggaggccctattaccctctccagctgccactgccagagctggattcctgtaaaggagtccaggctagagccacagagactgttgtggaggtgagttcggctgtagttagagtgattggacccttcctattggtctgtcctgggccaactggtgggtgatctctgctgcatccaacatgggagcagagactggcagcaggaggggggaacatggtgagaagtggtgctcacttttcccattcctcctaacatagttctactatgctagaagtggcatccagcggccacagctagaaaacagtctgcagtgtgacttaacttgtgtattgcattccagcagaccactgaaccagacagcgaagccaagatcattgttctactttgtatttactactgtgtgaatcagttgattctacttcaggtccttgcttaaattcctgtcactaaatggaaatgtgtttggttttaaact

SEQ ID NO: 296219 - DNA, 1663 bp, Homo sapiens
ccggctagcccgacagttggggtgtggtggccttggtatgtgcgttctcgtgttacatcgcgccatcgttggtatatggttagtttgttggttagttaggcctagtatgaggagcgttatggagtggaagtgaaatcacatggctaggccggaggtcattaggagggctgagagggcccctgttaggggtcatgggctgggtcttgtgggtggaaacgcgctggctgactggggtcggcgtttagttcagcgcagcgactcggggacctggagctgacgcctagacacttgtattagctttaatagaagagaaatggaggagccatagaatattaaggatgaattcaggaaggcctgagaccatggaaaacttgcctgctctctacactattttccaaggagaggttgctatggtgacagactatggggcctttatcaaaatcccaggctgtcggaagcaaggtctggtccatcgaactcatatgtcatcctgtcgggtggataagccctctgagatagtagatgttggagataaagtgtgggtgaagcttattggccgagagatgaaaaatgatagaataaaagtatccctctccatgaaggttgtcaatcaagggactgggaaagaccttgatcccaacaatgttatcattgagcaagaagagaggcggaggcgatccttccaggattacactgggcagaagatcacccttgaggctgtcttgaacactacctgcaagaagtgtggctgtaaaggagaagaagaaaaagaaacatagagataggaagtcatctgactctgacagctcagactctgagagtgatacaggcaagagggcaaggcacacatcaaaagacagcaaggcagcaaagaagaagaaaaagaagaagaagcacaagaagaagcacaaggagtgagagtataaagagtgtagggggtggttgagagtaagaaaccaggagccttgtgccttgagactcctggaaagactcaatagtgagaatatagcctcccaccccattaacttcgctcccatgggagatggcttcccctcatgcaacaggcaggtttgggagttagaggtcaaaagcagctgcctgaatgagttgttgtttccttatcactcctggtccctttgcaagtgaaccctgcagctcacccattcattcacccaacttccttcattcagcaggaggccctattaccctctccagctgccactgccagagctggattcctgtaaaggagtccaggctagagccacagagactgttgtggaggtgagttcggctgtagttagagtgattggacccttcctattggtctgtcctgggccaactggtgggtgatctctgctgcatccaacatgggagcagagactggcagcaggaggggggaacatggtgagaagtggtgctcacttttcccattcctcctaacatagttctactatgctagaagtggcatccagcggccacagctagaaaacagtctgcagtgtgacttaacttgtgtattgcattccagcagaccactgaaccagacagcgaagccaagatcattgttctactttgtatttactactgtgtgaatcagttgattctacttcaggtccttgcttaaattcctgtcactaaatggaaatgtgtttggttttaaact

SEQ ID NO: 296220 - DNA, 1562 bp, Homo sapiens
ccggctagcccgacagttggggtgtggtggccttggtatgtgcgttctcgtgttacatcgcgccatcgttggtatatggttagtttgttggttagttaggcctagtatgaggagcgttatggagtggaagtgaaatcacatggctaggccggaggtcattaggagggctgagagggcccctgttaggggtcatgggctgggtcttgtgggtggaaacgcgctggctgactggggtcggcgtttagttcagcgcagcgactcggggacctggagctgacgcctagacacttgtattagctttaatagaagagaaatggaggagccatagaatattaaggatgaattcaggaaggcctgagaccatggaaaacttgcctgctctctacactattttccaaggagaggttgctatggtgacagactatggggcctttatcaaaatcccaggctgtcggaagcaaggtctggtccatcgaactcatatgtcatcctgtcgggtggataagccctctgagatagtagatgttggagataaagtgtgggtgaagcttattggccgagagatgaaaaatgatagaataaaagtatccctctccatgaaggttgtcaatcaagggactgggaaagaccttgatcccaacaatgttatcattgagagaagaagaaaaagaaacatagagataggaagtcatctgactctgacagctcagactctgagagtgatacaggcaagagggcaaggcacacatcaaaagacagcaaggcagcaaagaagaagaaaaagaagaagaagcacaagaagaagcacaaggagtgagagtataaagagtgtagggggtggttgagagtaagaaaccaggagccttgtgccttgagactcctggaaagactcaatagtgagaatatagcctcccaccccattaacttcgctcccatgggagatggcttcccctcatgcaacaggcaggtttgggagttagaggtcaaaagcagctgcctgaatgagttgttgtttccttatcactcctggtccctttgcaagtgaaccctgcagctcacccattcattcacccaacttccttcattcagcaggaggccctattaccctctccagctgccactgccagagctggattcctgtaaaggagtccaggctagagccacagagactgttgtggaggtgagttcggctgtagttagagtgattggacccttcctattggtctgtcctgggccaactggtgggtgatctctgctgcatccaacatgggagcagagactggcagcaggaggggggaacatggtgagaagtggtgctcacttttcccattcctcctaacatagttctactatgctagaagtggcatccagcggccacagctagaaaacagtctgcagtgtgacttaacttgtgtattgcattccagcagaccactgaaccagacagcgaagccaagatcattgttctactttgtatttactactgtgtgaatcagttgattctacttcaggtccttgcttaaattcctgtcactaaatggaaatgtgtttggttttaaact

SEQ ID NO: 296221 - DNA, 1733 bp, Homo sapiens
ccggctagcccgacagttggggtgtggtggccttggtatgtgcgttctcgtgttacatcgcgccatcgttggtatatggttagtttgttggttagttaggcctagtatgaggagcgttatggagtggaagtgaaatcacatggctaggccggaggtcattaggagggctgagagggcccctgttaggggtcatgggctgggtcttgtgggtggaaacgcgctggctgactggggtcggcgtttagttcagcgcagcgactcggggacctggagctgacgcctagacacttgtattagctttaatagaagagaaatggaggagccatagaatattaaggatgaattcaggaaggcctgagaccatggaaaacttgcctgctctctacactattttccaaggagagttatggtgaagctgaaacagtgctcaagatgaagcagctaattgaagacactgaaaagaataaagtttatgttgctatggtgacagactatggggcctttatcaaaatcccaggctgtcggaagcaaggtctggtccatcgaactcatatgtcatcctgtcgggtggataagccctctgagatagtagatgttggagataaagtgtgggtgaagcttattggccgagagatgaaaaatgatagaataaaagtatccctctccatgaaggttgtcaatcaagggactgggaaagaccttgatcccaacaatgttatcattgagcaagaagagaggcggaggcgatccttccaggattacactgggcagaagatcacccttgaggctgtcttgaacactacctgcaagaagtgtggctgtaaaggagaagaagaaaaagaaacatagagataggaagtcatctgactctgacagctcagactctgagagtgatacaggcaagagggcaaggcacacatcaaaagacagcaaggcagcaaagaagaagaaaaagaagaagaagcacaagaagaagcacaaggagtgagagtataaagagtgtagggggtggttgagagtaagaaaccaggagccttgtgccttgagactcctggaaagactcaatagtgagaatatagcctcccaccccattaacttcgctcccatgggagatggcttcccctcatgcaacaggcaggtttgggagttagaggtcaaaagcagctgcctgaatgagttgttgtttccttatcactcctggtccctttgcaagtgaaccctgcagctcacccattcattcacccaacttccttcattcagcaggaggccctattaccctctccagctgccactgccagagctggattcctgtaaaggagtccaggctagagccacagagactgttgtggaggtgagttcggctgtagttagagtgattggacccttcctattggtctgtcctgggccaactggtgggtgatctctgctgcatccaacatgggagcagagactggcagcaggaggggggaacatggtgagaagtggtgctcacttttcccattcctcctaacatagttctactatgctagaagtggcatccagcggccacagctagaaaacagtctgcagtgtgacttaacttgtgtattgcattccagcagaccactgaaccagacagcgaagccaagatcattgttctactttgtatttactactgtgtgaatcagttgattctacttcaggtccttgcttaaattcctgtcactaaatggaaatgtgtttggttttaaact

SEQ ID NO: 296222 - DNA, 931 bp, Homo sapiens
tgatttttaaaattttcttttcaggagaagaagaaaaagaaacatagagataggaagtcatctgactctgacagctcagactctgagagtgatacaggcaagagggcaaggcacacatcaaaagacagcaaggcagcaaagaagaagaaaaagaagaagaagcacaagaagaagcacaaggagtgagagtataaagagtgtagggggtggttgagagtaagaaaccaggagccttgtgccttgagactcctggaaagactcaatagtgagaatatagcctcccaccccattaacttcgctcccatgggagatggcttcccctcatgcaacaggcaggtttgggagttagaggtcaaaagcagctgcctgaatgagttgttgtttccttatcactcctggtccctttgcaagtgaaccctgcagctcacccattcattcacccaacttccttcattcagcaggaggccctattaccctctccagctgccactgccagagctggattcctgtaaaggagtccaggctagagccacagagactgttgtggaggtgagttcggctgtagttagagtgattggacccttcctattggtctgtcctgggccaactggtgggtgatctctgctgcatccaacatgggagcagagactggcagcaggaggggggaacatggtgagaagtggtgctcacttttcccattcctcctaacatagttctactatgctagaagtggcatccagcggccacagctagaaaacagtctgcagtgtgacttaacttgtgtattgcattccagcagaccactgaaccagacagcgaagccaagatcattgttctactttgtatttactactgtgtgaatcagttgattctacttcaggtccttgcttaaattcctgtcactaaatggaaatgtgtttggttttaaact

SEQ ID NO: 296223 - DNA, 925 bp, Homo sapiens
ccggctagcccgacagttggggtgtggtggccttggtatgtgcgttctcgtgttacatcgcgccatcgttggtatatggttagtttgttggttagttaggcctagtatgaggagcgttatggagtggaagtgaaatcacatggctaggccggaggtcattaggagggctgagagggcccctgttaggggtcatgggctgggtcttgtgggtggaaacgcgctggctgactggggtcggcgtttagttcagcgcagcgactcggggacctggagctgacgcctagacacttgtattagctttaatagaagagaaatggaggagccatagaatattaaggatgaattcaggaaggcctgagaccatggaaaacttgcctgctctctacactattttccaaggagaggttgctatggtgacagactatggggcctttatcaaaatcccaggctgtcggaagcaaggtctggtccatcgaactcatatgtcatcctgtcgggtggataagccctctgagatagtagatgttggagataaagtgtgggtgaagcttattggccgagagatgaaaaatgatagaataaaagtatccctctccatgaaggttgtcaatcaagggactgggaaagaccttgatcccaacaatgttatcattgagcaagaagagaggcggaggcgatccttccaggattacactgggcagaagatcacccttgaggctgtcttgaacactacctgcaagaagtgtggctgtaaaggccactttgcaaaagattgtttcatgcaaccaggtgggactaaatactctctgatacctgatgaggaagaggtccaatcttccggagaggtccaatcttccggggaggtccaatcttccggagaggtccactcttccggagaggtccatcttccagagaggtccactct

SEQ ID NO: 296224 - DNA, 1036 bp, Homo sapiens
ccggctagcccgacagttggggtgtggtggccttggtatgtgcgttctcgtgttacatcgcgccatcgttggtatatggttagtttgttggttagttaggcctagtatgaggagcgttatggagtggaagtgaaatcacatggctaggccggaggtcattaggagggctgagagggcccctgttaggggtcatgggctgggtcttgtgggtggaaacgcgctggctgactggggtcggcgtttagttcagcgcagcgactcggggacctggagctgacgcctagacacttgtattagctttaatagaagagaaatggaggagccatagaatattaaggatgaattcaggaaggcctgagaccatggaaaacttgcctgctctctacactattttccaaggagagttatggtgaagctgaaacagtgctcaagatgaagcagctaattgaagacactgaaaagaataaagtttatgttgctatggtgacagactatggggcctttatcaaaatcccaggctgtcggaagcaaggtctggtccatcgaactcatatgtcatcctgtcgggtggataagccctctgagatagtagatgttggagataaagtgtgggtgaagcttattggccgagagatgaaaaatgatagaataaaagtatccctctccatgaaggttgtcaatcaagggactgggaaagaccttgatcccaacaatgttatcattgagcaagaagagaggcggaggcgatccttccaggattacactgggcagaagatcacccttgaggctgtcttgaacactacctgcaagaagtgtggctgtaaaggccactttgcaaaagattgtttcatgcaaccaggtgggactaaatactctctgatacctgatgaggaagaggaaaaggaagaggcaaagtcagcagagtttgagaagcctgaccctacaaggaatccttctagaaaaagaaagaaggaaggagaagaagaaaagaaacatagagataggaagtcatctgactctgacagctcagatctaa

SEQ ID NO: 296225 - DNA, 915 bp, Homo sapiens
  misc_feature (683)..(683): n is a, c, g, or t
  misc_feature (693)..(693): n is a, c, g, or t
ccggctagcccgacagttggggtgtggtggccttggtatgtgcgttctcgtgttacatcgcgccatcgttggtatatggttagtttgttggttagttaggcctagtatgaggagcgttatggagtggaagtgaaatcacatggctaggccggaggtcattaggagggctgagagggcccctgttaggggtcatgggctgggtcttgtgggtggaaacgcgctggctgactggggtcggcgtttagttcagcgcagcgactcggggacctggagctgacgcctagacacttgtattagctttaatagaagagaaatggaggagccatagaatattaaggatgaattcaggaaggcctgagaccatggaaaacttgcctgctctctacactattttccaaggagaggttgctatggtgacagactatggggcctttatcaaaatcccaggctgtcggaagcaaggtctggtccatcgaactcatatgtcatcctgtcgggtggataagccctctgagatagtagatgttggagataaagtgtgggtgaagcttattggccgagagatgaaaaatgatagaataaaagtatccctctccatgaaggttgtcaatcaagggactgggaaagaccttgatcccaacaatgttatcattgaaagaagaaggcggggagggcgaatcccnttccccaggnaattaaccactggggccaggaagaatcaccccctaaggcgtctgacactactgcaagtgtgctaaggctgcgatgtctgcacgtggtttctctgatctgatgagagagaagagagcagtcgagtgaaagctgactacaggaatcttctagaaaagaaagaaggagaagaagaaaagaaacatagagataggaagtcatctgactctgacagctcagatctaa

SEQ ID NO: 296226 - DNA, 496 bp, Homo sapiens
tttcctgagccagctagcccatttcaggagacttggggaaagattcacttgctgagaagagagactacttcctttttctataccttttctacttttcttctgcaggccactttgcaaaagattgtttcatgcaaccaggtgggactaaatactctctgatacctgatgaggaagaggaaaaggaagaggcaaagtcagcagagtttgagaagcctgaccctacaaggaatccttctagaaaaagaaagaagggtgaatgctactttgcttttattttatcatgtctttttcaagttttaagatgaaaatctgaaaagcctcatgcagcagtacacacctgtagtcccagctacttgggaggataaggtgggaggattgctcgaggccagaagtttaaggctgcggtgcgctatgattatgcctgtgaatagccactgcattccactctgaacaacatagtgagacccaatctctaaaaagaaattttttttgttaa

SEQ ID NO: 296227 - DNA, 883 bp, Homo sapiens
  misc_feature (5)..(5): n is a, c, g, or t
  misc_feature (7)..(7): n is a, c, g, or t
  misc_feature (495)..(497): n is a, c, g, or t
  misc_feature (509)..(509): n is a, c, g, or t
  misc_feature (517)..(517): n is a, c, g, or t
  misc_feature (557)..(557): n is a, c, g, or t
  misc_feature (589)..(589): n is a, c, g, or t
  misc_feature (594)..(595): n is a, c, g, or t
  misc_feature (624)..(624): n is a, c, g, or t
  misc_feature (632)..(632): n is a, c, g, or t
  misc_feature (638)..(638): n is a, c, g, or t
  misc_feature (659)..(659): n is a, c, g, or t
  misc_feature (673)..(673): n is a, c, g, or t
  misc_feature (689)..(689): n is a, c, g, or t
  misc_feature (691)..(691): n is a, c, g, or t
  misc_feature (694)..(694): n is a, c, g, or t
  misc_feature (697)..(697): n is a, c, g, or t
  misc_feature (699)..(699): n is a, c, g, or t
  misc_feature (711)..(711): n is a, c, g, or t
  misc_feature (713)..(714): n is a, c, g, or t
  misc_feature (721)..(721): n is a, c, g, or t
  misc_feature (724)..(724): n is a, c, g, or t
  misc_feature (745)..(745): n is a, c, g, or t
  misc_feature (782)..(784): n is a, c, g, or t
  misc_feature (790)..(791): n is a, c, g, or t
  misc_feature (806)..(806): n is a, c, g, or t
  misc_feature (819)..(819): n is a, c, g, or t
  misc_feature (845)..(845): n is a, c, g, or t
ggcangnggggatgttgctgtcaggtctgagtcggttggagtctgacgggtaggcgagacgcgcaggcgcagagagccccagccacgccggcccaggtggcctcaggtgagggggggcggagcgcacctgtggggacgggacgacgagttcaagcctccgtgggtgcagttggtcgccagcgagggatgcggagacgcccctgaacgaccatggcatcggccgacgagctgaccttccatgaattcgaggaggccactaatcttctggctgacaccccagatgcagccaccaccagcagaagcgatcagctgaccccacaagggcacgtggctgtggccgtgggctcaggtggcagctatggagccgaggatgaggtggaggaggagagtgacaaggccgcgctcctgcaggagcagcagcagcagcagcagccgggattctggaccttcagctactatcagagcttctttgacgtggacacctcacagtttccnnnaccgtaacaaantcccaccnccgcgcgcgttcgcgcgcgacaacgtttttttcgttcacngatcgttcgttaatcgttccgttatcgtttantttcnncgttcgtttatcgttttcgacgtttttcngtttttcngtttcngttcacgtttcaaccgttacncgtttttcgtttcncgatatttattttacncngcngancngacgtacgatcncnngatttcnganaatttttaccgttttcgattngacgacgatcgtacgtcgtattcgttttcgtttttcnnngtttcnngttttttttcgttcngttcgttttttcncgaatttttttccgatttatcgcgantttttcgcgtacacgttccggtttatacgttttttcga

SEQ ID NO: 296228 - DNA, 2172 bp, Homo sapiens
  misc_feature (5)..(5): n is a, c, g, or t
  misc_feature (7)..(7): n is a, c, g, or t
ggcangnggggatgttgctgtcaggtctgagtcggttggagtctgacgggtaggcgagacgcgcaggcgcagagagccccagccacgccggcccaggtggcctcaggtgagggggggcggagcgcacctgtggggacgggacgacgagttcaagcctccgtgggtgcagttggtcgccagcgagggatgcggagacgcccctgaacgaccatggcatcggccgacgagctgaccttccatgaattcgaggaggccactaatcttctggctgacaccccagatgcagccaccaccagcagaagcgatcagctgaccccacaagggcacgtggctgtggccgtgggctcaggtggcagctatggagccgaggatgaggtggaggaggagagtgacaaggccgcgctcctgcaggagcagcagcagcagcagcagccgggattctggaccttcagctactatcagagcttctttgacgtggacacctcacaggtcctggaccggatcaaaggctcactgctgccccggcctggccacaactttgtgcggcaccatctgcggaatcggccggatctgtatggccccttctggatctgtgccacgttggcctttgtcctggccgtcactggcaacctgacgctggtgctggcccagaggagggacccctccatccactacagcccccagttccacaaggtgaccgtggcaggcatcagcatctactgctatgcgtggctggtgcccctggccctgtggggcttcctgcggtggcgcaagggtgtccaggagcgcatggggccctacaccttcctggagactgtgtgcatctacggctactccctctttgtcttcatccccatggtggtcctgtggctcatccctgtgccttggctgcagtggctctttggggcgctggccctgggcctgtcagccgccgggctggtattcaccctctggcccgtggtccgtgaggacaccaggctggtggccacagtgctgctgtccgtggtcgtgctgctccacgccctcctggccatgggctgtaagttgtacttcttccagtcgctgcctccggagaacgtggctcctccaccccaaatcacatctctgccctcaaacatcgcgctgtcccctaccttgccgcagtccctggccccctcctaggaaggcccgggtcccacaggcaacacctaagtggaccaacccctctgcctgtcctgccccccagacgatgactgaaggctcctttgacaccttgagatgattctgctactttccagacttttcttacaaagcaaacacttttattttctatgcaaaggtgattcagagaatttatataaaggcgggcgaggggcagccgagcagggagctttgggacagggctggggcccccatatcccccccgggccacctgctttccctcctatggctcccctggaacaggagggagagccaagggggcggcccagcctggacagcgcccgctcctgcctgggtgcacacacggcgggcctgagctccagcatctgagtttgggggtatgagaaacaggggagcagaaggagaagaaaactgcctgtgctgcaacacgtttcctcatttattttttctttctttttctttttttctttttttggagggagaggtccctgcaaggtcccttcccgggcaggggagggatggaaatgccgtcacagtagtagggactggagcgtctacaaggatggaggggagctactcaggcctaacgttagctacaaggaaaaaggacgccttccgtgacagatccttgaggtgtctgtgtctgccccaagtggccggcagtggccttccctccgggcccaaggcctgcagccacctgctctaactcttgagtgggggggcggggggggacctgcaggggctcggggacaggacagcagcaagaggcaggggccgaggacggaggccttcccgacagtggggtgggttgtacattcaagtgtgaggtgaaccctttggtggggagggggcccctgaagcctcggcggggccacccctccccgcggcgcctctgagtctagggagaggggctgctggctcggcccggccggcctggcttcacagagggtctgcggattgacactggttcttttcataaaaaaataaaattaaaaaaagcagcatgtcacg

SEQ ID NO: 296229 - DNA, 2118 bp, Homo sapiens
  misc_feature (5)..(5): n is a, c, g, or t
  misc_feature (7)..(7): n is a, c, g, or t
ggcangnggggatgttgctgtcaggtctgagtcggttggagtctgacgggtaggcgagacgcgcaggcgcagagagccccagccacgccggcccaggtggcctcaggtgagggggggcggagcgcacctgtggggacgggacgacgagttcaagcctccgtgggtgcagttggtcgccagcgagggatgcggagacgcccctgaacgaccatggcatcggccgacgagctgaccttccatgaattcgaggaggccactaatcttctggctgacaccccagatgcagccaccaccagcagaagcgatcagctgaccccacaagggcacgtggctgtggccgtgggctcaggtggcagctatggagccgaggatgaggtggaggaggagagtgacaaggccgcgctcctgcaggagcagcagcagcagcagcagccgggattctggaccttcagctactatcagagcttctttgacgtggacacctcacaggtcctggaccggatcaaaggctcactgctgccccggcctggccacaactttgtgcggcaccatctgcggaatcggccggatctgtatggccccttctggatctgtgccacgttggcctttgtcctggccgtcactggcaacctgacgctggtgctggcccagaggagggacccctccatccactacagcccccagttccacaaggtgaccgtggcaggcatcagcatctactgctatgcgtggctggtgcccctggccctgtggggcttcctgcggtggcgcaagggtgtccaggagcgcatggggccctacaccttcctggagactgtgtgcatctacggctactccctctttgtcttcatccccatggtggtcctgtggctcatccctgtgccttggctgcagtggctctttggggcgctggccctgggcctgtcagccgccgggctggtattcaccctctggcccgtggtccgtgaggacaccaggctggtggccacagtgctgctgtccgtggtcgtgctgctccacgccctcctggccatgggctgtaagttgtacttcttccagtcgctgcctccggagaacgtggctcctccaccccaaatcacatctctgccctcaaacatcgcgctgtcccctaccttgccgcagtccctggccccctcctaggaaggcccgggtcccacaggcaacacctaagtggaccaacccctctgcctgtcctgccccccagacgatgactgaaggctcctttgacaccttgagatgattctgctactttccagacttttcttacaaagcaaacacttttattttctatgcaaaggtgattcagagaatttatataaaggcgggcgaggggcagccgagcagggagctttgggacagggctggggcccccatatcccccccgggccacctgctttccctcctatggctcccctggaacaggagggagagccaagggggcggcccagcctggacagcgcccgctcctgcctgggtgcacacacggcgggcctgagctccagcatctgagtttgggggtatgagaaacaggggagcagaaggagaagaaaactgcctgtgctgcaacacgtttcctcatttattttttctttctttttctttttttctttttttggagggagaggtccctgcaaggtcccttcccgggcaggggagggatggaaatgccgtcacagtagtagggactggagcgtctacaaggatggaggggagctactcaggcctaacgttagctacaaggaccggcagtggccttccctccgggcccaaggcctgcagccacctgctctaactcttgagtgggggggcggggggggacctgcaggggctcggggacaggacagcagcaagaggcaggggccgaggacggaggccttcccgacagtggggtgggttgtacattcaagtgtgaggtgaaccctttggtggggagggggcccctgaagcctcggcggggccacccctccccgcggcgcctctgagtctagggagaggggctgctggctcggcccggccggcctggcttcacagagggtctgcggattgacactggttcttttcataaaaaaataaaattaaaaaaagcagcatgtcacg

SEQ ID NO: 296230 - DNA, 2098 bp, Homo sapiens
  misc_feature (5)..(5): n is a, c, g, or t
  misc_feature (7)..(7): n is a, c, g, or t
ggcangnggggatgttgctgtcaggtctgagtcggttggagtctgacgggtaggcgagacgcgcaggcgcagagagccccagccacgccggcccaggtggcctcagcgagggatgcggagacgcccctgaacgaccatggcatcggccgacgagctgaccttccatgaattcgaggaggccactaatcttctggctgacaccccagatgcagccaccaccagcagaagcgatcagctgaccccacaagggcacgtggctgtggccgtgggctcaggtggcagctatggagccgaggatgaggtggaggaggagagtgacaaggccgcgctcctgcaggagcagcagcagcagcagcagccgggattctggaccttcagctactatcagagcttctttgacgtggacacctcacaggtcctggaccggatcaaaggctcactgctgccccggcctggccacaactttgtgcggcaccatctgcggaatcggccggatctgtatggccccttctggatctgtgccacgttggcctttgtcctggccgtcactggcaacctgacgctggtgctggcccagaggagggacccctccatccactacagcccccagttccacaaggtgaccgtggcaggcatcagcatctactgctatgcgtggctggtgcccctggccctgtggggcttcctgcggtggcgcaagggtgtccaggagcgcatggggccctacaccttcctggagactgtgtgcatctacggctactccctctttgtcttcatccccatggtggtcctgtggctcatccctgtgccttggctgcagtggctctttggggcgctggccctgggcctgtcagccgccgggctggtattcaccctctggcccgtggtccgtgaggacaccaggctggtggccacagtgctgctgtccgtggtcgtgctgctccacgccctcctggccatgggctgtaagttgtacttcttccagtcgctgcctccggagaacgtggctcctccaccccaaatcacatctctgccctcaaacatcgcgctgtcccctaccttgccgcagtccctggccccctcctaggaaggcccgggtcccacaggcaacacctaagtggaccaacccctctgcctgtcctgccccccagacgatgactgaaggctcctttgacaccttgagatgattctgctactttccagacttttcttacaaagcaaacacttttattttctatgcaaaggtgattcagagaatttatataaaggcgggcgaggggcagccgagcagggagctttgggacagggctggggcccccatatcccccccgggccacctgctttccctcctatggctcccctggaacaggagggagagccaagggggcggcccagcctggacagcgcccgctcctgcctgggtgcacacacggcgggcctgagctccagcatctgagtttgggggtatgagaaacaggggagcagaaggagaagaaaactgcctgtgctgcaacacgtttcctcatttattttttctttctttttctttttttctttttttggagggagaggtccctgcaaggtcccttcccgggcaggggagggatggaaatgccgtcacagtagtagggactggagcgtctacaaggatggaggggagctactcaggcctaacgttagctacaaggaaaaaggacgccttccgtgacagatccttgaggtgtctgtgtctgccccaagtggccggcagtggccttccctccgggcccaaggcctgcagccacctgctctaactcttgagtgggggggcggggggggacctgcaggggctcggggacaggacagcagcaagaggcaggggccgaggacggaggccttcccgacagtggggtgggttgtacattcaagtgtgaggtgaaccctttggtggggagggggcccctgaagcctcggcggggccacccctccccgcggcgcctctgagtctagggagaggggctgctggctcggcccggccggcctggcttcacagagggtctgcggattgacactggttcttttcataaaaaaataaaattaaaaaaagcagcatgtcacg

SEQ ID NO: 296231 - DNA, 2269 bp, Homo sapiens
  misc_feature (5)..(5): n is a, c, g, or t
  misc_feature (7)..(7): n is a, c, g, or t
ggcangnggggatgttgctgtcaggtctgagtcggttggagtctgacgggtaggcgagacgcgcaggcgcagagagccccagccacgccggcccaggtggcctcaggtgagggggggcggagcgcacctgtggggacgggacgacgagttcaagcctccgtgggtgcagttggtcgccagcgagggatgcggagacgcccctgaacgaccatggcatcggccgacgagctgaccttccatgaattcgaggaggccactaatcttctggctgacaccccagatgcagccaccaccagcagaagcgatcagctgaccccacaagggcacgtggctgtggccgtgggctcaggtggcagctatggagccgaggatgaggtggaggaggagagtgacaaggccgcgctcctgcaggagcagcagcagcagcagcagccgggattctggaccttcagctactatcagagcttctttgacgtggacacctcacaggtcctggaccggatcaaaggctcactgctgccccggcctggccacaactttgtgcggcaccatctgcggaatcggccggatctgtatggccccttctggatctgtgccacgttggcctttgtcctggccgtcactggcaacctgacgctggtgctggcccagaggagggacccctccatccactacagcccccagttccacaaggtgaccgtggcaggcatcagcatctactgctatgcgtggctggtgcccctggccctgtggggcttcctgcggtggcgcaagggtgtccaggagcgcatggggccctacaccttcctggagactgtgtgcatctacggctactccctctttgtcttcatccccatggtggtcctgtggctcatccctgtgccttggctgcagtggctctttggggcgctggccctgggcctgtcagccgccgggctggtattcaccctctggcccgtggtccgtgaggacaccaggctggtggccacagtgctgctgtccgtggtcgtgctgctccacgccctcctggccatgggctgtaagttgtacttcttccagtcgctgcctccggagaacgtggctcctccaccccaaatcacatctctgccctcaaacatcgcgctgtcccctaccttgccgcagtccctggccccctcctaggaaggcccgggtcccacaggtaaggactattcccagctgggctaagggggctgccctcccactcccagtcaaggcgagaggttctggggccactcccagacaattctttctttcaggcaacacctaagtggaccaacccctctgcctgtcctgccccccagacgatgactgaaggctcctttgacaccttgagatgattctgctactttccagacttttcttacaaagcaaacacttttattttctatgcaaaggtgattcagagaatttatataaaggcgggcgaggggcagccgagcagggagctttgggacagggctggggcccccatatcccccccgggccacctgctttccctcctatggctcccctggaacaggagggagagccaagggggcggcccagcctggacagcgcccgctcctgcctgggtgcacacacggcgggcctgagctccagcatctgagtttgggggtatgagaaacaggggagcagaaggagaagaaaactgcctgtgctgcaacacgtttcctcatttattttttctttctttttctttttttctttttttggagggagaggtccctgcaaggtcccttcccgggcaggggagggatggaaatgccgtcacagtagtagggactggagcgtctacaaggatggaggggagctactcaggcctaacgttagctacaaggaaaaaggacgccttccgtgacagatccttgaggtgtctgtgtctgccccaagtggccggcagtggccttccctccgggcccaaggcctgcagccacctgctctaactcttgagtgggggggcggggggggacctgcaggggctcggggacaggacagcagcaagaggcaggggccgaggacggaggccttcccgacagtggggtgggttgtacattcaagtgtgaggtgaaccctttggtggggagggggcccctgaagcctcggcggggccacccctccccgcggcgcctctgagtctagggagaggggctgctggctcggcccggccggcctggcttcacagagggtctgcggattgacactggttcttttcataaaaaaataaaattaaaaaaagcagcatgtcacg

SEQ ID NO: 296232 - DNA, 2011 bp, Homo sapiens
  misc_feature (5)..(5): n is a, c, g, or t
  misc_feature (7)..(7): n is a, c, g, or t
ggcangnggggatgttgctgtcaggtctgagtcggttggagtctgacgggtaggcgagacgcgcaggcgcagagagccccagccacgccggcccaggtggcctcagcgagggatgcggagacgcccctgaacgaccatggcatcggccgacgagctgaccttccatgaattcgaggaggccactaatcttctggctgacaccccagatgcagccaccaccagcagaagcgatcagctgaccccacaagggcacgtggctgtggccgtgggctcaggtggcagctatggagccgaggatgaggtggaggaggagagtgacaaggccgcggtcctggaccggatcaaaggctcactgctgccccggcctggccacaactttgtgcggcaccatctgcggaatcggccggatctgtatggccccttctggatctgtgccacgttggcctttgtcctggccgtcactggcaacctgacgctggtgctggcccagaggagggacccctccatccactacagcccccagttccacaaggtgaccgtggcaggcatcagcatctactgctatgcgtggctggtgcccctggccctgtggggcttcctgcggtggcgcaagggtgtccaggagcgcatggggccctacaccttcctggagactgtgtgcatctacggctactccctctttgtcttcatccccatggtggtcctgtggctcatccctgtgccttggctgcagtggctctttggggcgctggccctgggcctgtcagccgccgggctggtattcaccctctggcccgtggtccgtgaggacaccaggctggtggccacagtgctgctgtccgtggtcgtgctgctccacgccctcctggccatgggctgtaagttgtacttcttccagtcgctgcctccggagaacgtggctcctccaccccaaatcacatctctgccctcaaacatcgcgctgtcccctaccttgccgcagtccctggccccctcctaggaaggcccgggtcccacaggcaacacctaagtggaccaacccctctgcctgtcctgccccccagacgatgactgaaggctcctttgacaccttgagatgattctgctactttccagacttttcttacaaagcaaacacttttattttctatgcaaaggtgattcagagaatttatataaaggcgggcgaggggcagccgagcagggagctttgggacagggctggggcccccatatcccccccgggccacctgctttccctcctatggctcccctggaacaggagggagagccaagggggcggcccagcctggacagcgcccgctcctgcctgggtgcacacacggcgggcctgagctccagcatctgagtttgggggtatgagaaacaggggagcagaaggagaagaaaactgcctgtgctgcaacacgtttcctcatttattttttctttctttttctttttttctttttttggagggagaggtccctgcaaggtcccttcccgggcaggggagggatggaaatgccgtcacagtagtagggactggagcgtctacaaggatggaggggagctactcaggcctaacgttagctacaaggaaaaaggacgccttccgtgacagatccttgaggtgtctgtgtctgccccaagtggccggcagtggccttccctccgggcccaaggcctgcagccacctgctctaactcttgagtgggggggcggggggggacctgcaggggctcggggacaggacagcagcaagaggcaggggccgaggacggaggccttcccgacagtggggtgggttgtacattcaagtgtgaggtgaaccctttggtggggagggggcccctgaagcctcggcggggccacccctccccgcggcgcctctgagtctagggagaggggctgctggctcggcccggccggcctggcttcacagagggtctgcggattgacactggttcttttcataaaaaaataaaattaaaaaaagcagcatgtcacg

SEQ ID NO: 296233 - DNA, 2153 bp, Homo sapiens
  misc_feature (5)..(5): n is a, c, g, or t
  misc_feature (7)..(7): n is a, c, g, or t
ggcangnggggatgttgctgtcaggtctgagtcggttggagtctgacgggtaggcgagacgcgcaggcgcagagagccccagccacgccggcccaggtggcctcaggtgagggggggcggagcgcacctgtggggacgggacgacgagttcaagcctccgtgggtgcagttggtcgccagcgagggatgcggagacgcccctgaacgaccatggcatcggccgacgagctgaccttccatgaattcgaggaggccactaatcttctggctgacaccccagatgcagccaccaccagcagaagcgatcagctgaccccacaagggcacgtggctgtggccgtgggctcaggtggcagctatggagccgaggatgaggtggaggaggagagtgacaaggccgcgctcctgcaggagcagcagcagcagcagcagccgggattctggaccttcagctactatcagagcttctttgacgtggacacctcacaggtcctggaccggatcaaaggctcactgctgccccggcctggccacaactttgtgcggcaccatctgcggaatcggccggatctgtatggccccttctggatctgtgccacgttggcctttgtcctggccgtcactggcaacctgacgctggtgctggcccagaggagggacccctccatccactacagcccccagttccacaaggcatctactgctatgcgtggctggtgcccctggccctgtggggcttcctgcggtggcgcaagggtgtccaggagcgcatggggccctacaccttcctggagactgtgtgcatctacggctactccctctttgtcttcatccccatggtggtcctgtggctcatccctgtgccttggctgcagtggctctttggggcgctggccctgggcctgtcagccgccgggctggtattcaccctctggcccgtggtccgtgaggacaccaggctggtggccacagtgctgctgtccgtggtcgtgctgctccacgccctcctggccatgggctgtaagttgtacttcttccagtcgctgcctccggagaacgtggctcctccaccccaaatcacatctctgccctcaaacatcgcgctgtcccctaccttgccgcagtccctggccccctcctaggaaggcccgggtcccacaggcaacacctaagtggaccaacccctctgcctgtcctgccccccagacgatgactgaaggctcctttgacaccttgagatgattctgctactttccagacttttcttacaaagcaaacacttttattttctatgcaaaggtgattcagagaatttatataaaggcgggcgaggggcagccgagcagggagctttgggacagggctggggcccccatatcccccccgggccacctgctttccctcctatggctcccctggaacaggagggagagccaagggggcggcccagcctggacagcgcccgctcctgcctgggtgcacacacggcgggcctgagctccagcatctgagtttgggggtatgagaaacaggggagcagaaggagaagaaaactgcctgtgctgcaacacgtttcctcatttattttttctttctttttctttttttctttttttggagggagaggtccctgcaaggtcccttcccgggcaggggagggatggaaatgccgtcacagtagtagggactggagcgtctacaaggatggaggggagctactcaggcctaacgttagctacaaggaaaaaggacgccttccgtgacagatccttgaggtgtctgtgtctgccccaagtggccggcagtggccttccctccgggcccaaggcctgcagccacctgctctaactcttgagtgggggggcggggggggacctgcaggggctcggggacaggacagcagcaagaggcaggggccgaggacggaggccttcccgacagtggggtgggttgtacattcaagtgtgaggtgaaccctttggtggggagggggcccctgaagcctcggcggggccacccctccccgcggcgcctctgagtctagggagaggggctgctggctcggcccggccggcctggcttcacagagggtctgcggattgacactggttcttttcataaaaaaataaaattaaaaaaagcagcatgtcacg

SEQ ID NO: 296234 - DNA, 899 bp, Homo sapiens
tttgctttgtaagaaaagtctggaaagtagcagaatcatctcaaggtgattcagagaatttatataaaggcgggcgaggggcagccgagcagggagctttgggacagggctggggcccccatatcccccccgggccacctgctttccctcctatggctcccctggaacaggagggagagccaagggggcggcccagcctggacagcgcccgctcctgcctgggtgcacacacggcgggcctgagctccagcatctgagtttgggggtatgagaaacaggggagcagaaggagaagaaaactgcctgtgctgcaacacgtttcctcatttattttttctttctttttctttttttctttttttggagggagaggtccctgcaaggtcccttcccgggcaggggagggatggaaatgccgtcacagtagtagggactggagcgtctacaaggatggaggggagctactcaggcctaacgttagctacaaggaaaaaggacgccttccgtgacagatccttgaggtgtctgtgtctgccccaagtggccggcagtggccttccctccgggcccaaggcctgcagccacctgctctaactcttgagtgggggggcggggggggacctgcaggggctcggggacaggacagcagcaagaggcaggggccgaggacggaggccttcccgacagtggggtgggttgtacattcaagtgtgaggtgaaccctttggtggggagggggcccctgaagcctcggcggggccacccctccccgcggcgcctctgagtctagggagaggggctgctggctcggcccggccggcctggcttcacagagggtctgcggattgacactggttcttttcataaaaaaataaaattaaaaaaagcagcatgtcacg

SEQ ID NO: 296235 - DNA, 3950 bp, Homo sapiens
acaaaaatacctggaaaaaatatgggttattactgaggaaatgtacgagtattccaaggtccgctcatggggcaaacagcttctccataaccaccaagccactaatatgatagcattactcacaggggccttggtgactggagtagataaaggatctaaagcaaatatatggaaacaggctgtagtggatgtcatggaaaagacaatgtttctattgagtcatattgttgatggttctttggatgaaggtgtggcctatggaagctacacagctaaatccgtcacacagtatgtttttctggcccagcgccattttaatatcaacaacttggataataactggttaaagatgcacttttggttctattatgccacccttttacctggcttccaaagaactgtgggtatagcagattccaattataattggttttatggtccagaaagccagctagttttcttggataagttcatcttaaagaatggagctggaaattggttagctcagcaaattagaaagcaccgacctaaagatggaccgatggttccttcaactgcccaaaggtggagtactcttcacactgaatacatctggtatgatccccagctcacaccacagccacctgctgattatggtactgcaaaaatacacacattccctaactggggtgtggttacttatggggctgggttgccaaacacacagaccaacacctttgtgtcttttaaatctgggaagctggggggacgagctgtgtatgacatagttcattttcagccatattcctggattgatgggtggagaagttttaacccaggacatgagcatccagatcagaactcatttacttttgcccccaatggacaagtatttgtttctgaagctctctatggacccaagttgagccaccttaacaatgtattggtgtttgctccatcaccctcaagccagtgtaataagccctgggaaggtcaactgggagaatgtgcgcagtggcttaagtggactggcgaggaggttggtgatgcagctggggaaataatcactgcctctcaacatggggaaatggtatttgtgagtggggaagccgtgtctgcttattcttcagcaatgagactgaaaagtgtatatcgtgctttgcttctcttaaattcccaaactctgctagttgttgatcatattgagaggcaagaagattccccaataaattctgtcagtgccttctttcataatttggatattgattttaaatatatcccatataagtttatgaataggtataatggtgccatgatggatgtgtgggatgcacattacaaaatgttttggtttgatcatcatggcaatagtcccatggccagtatacaggaagcagagcaagctgctgaatttaaaaaacgatggactcaatttgttaatgttacttttcagatggaatccacaatcacaagaattgcatatgtcttttatgggccatatatcaatgtctccagctgcagatttattgatagttccaatcctggacttcagatttctctcaatgtcaataatactgaacatgttgtttctattgtaactgattaccataacctgaagacaagattcaattatctgggattcggtggctttgccagtgtggctgatcaaggccaaataacccgatttggtttgggcactcaagcaatagtaaagcctgtaagacatgataggattattttcccctttggatttaaatttaatatagcagttggattaattttgtgcattagcttggtgattttaactttccaatggcgtttttacctttcttttagaaaactaatgcgatggatattaatacttgttattgccttgtggtttattgagcttttggatgtgtggagcacttgtagtcagcccatttgtgcaaaatggacaaggacagaggctgagggaagcaagaagtctttgtcttctgaagggcaccacatggatcttcctgatgttgtcattacctcacttcctggttcaggagctgaaattctcaaacaactttttttcaacagtagtgattttctctacatcagggttcctacagcctacattgatattcctgaaactgagttggaaatcgactcatttgtagatgcttgtgaatggaaggtgtcagatatccgcagtgggcattttcgtttactccgaggctggttgcagtctttagtccaggacacaaaattacatttgcaaaacatccatctgcatgaacccaataggggtaaactggcccaatattttgcaatgaataaggacaaaaaaagaaaatttaaaaggagagagtctttgccagaacaaagaagtcaaatgaaaggcgcctttgatagagatgctgaatatattagggctttgaggagacacctggtttactatccaagtgcacgtcctgtgctcagtttaagcagtggaagctggacgttaaagcttcatttttttcaggaagttttaggagcttcgatgagggcattgtacatagtaagagaccctcgggcatggatttattcaatgttgtacaatagtaaaccaagtctttattctttgaagaatgtaccagagcatttagcaaaattgtttaaaatagagggaggtaaaggcaaatgtaacttaaattcgggttatgctttcgagtatgaaccattgaggaaagaattatcaaaatccaaatcaaatgcagtgtccctcttgtctcacttgtggctagcaaatacagcagcagccttgagaataaatacagatttgctgcctactagctaccagctggtcaagtttgaagatattgtgcattttcctcagaaaactactgaaaggatttttgcctttcttggaattcctttgtctcctgctagtttaaaccaaatattgtttgccacctctacaaaccttttttaccttccctatgaaggggaaatatcaccaactaatactaatgtttggaaacagaacttgcctagagatgaaattaaactaattgaaaacatctgctggactctgatggatcgcctaggatatccaaagtttatggactaaatgctgcaggtcagcagaaatttgcactaataatacttaccaacccactttgtggatatgaatcagaagagtttgtttattctttagtgtgtgtgtgtgtgtgcacgcgtgtatgtgttcagtgttgtttgcacagagagattgttttaaaaaatggcaccatatttggcctagcaggatttatttttatgtcatcacctcccttgcctttgtttctgaaaattttgtctgctaaaaagtttctgctacagagtggtagatgaagttatatcatggggtcaggggagatgggaaaattttaagtttttgtctaactccccttcatctgtaactgtgctaatctatctagagacctcaaacactgctaaaggccttgcaattgctgctttacccacgcatctcttgctttcaagatggactacaaaagttccttatccttttgaaaaggtcttctgacacacttatcttgcacaaagaaaaagaaaatttcttttactgtgtttaatgttcagtgatatcactgaggaaatggtgaaagctcctatcagaactataggatttcttctgggaaatacagatggaaatacagaatgaatatgtttttttgaggtcggaaactgactttaaaagcctccttgaagttttttacttagaaatataaggaataagtctttgaacaatctgggtggcaagggctggtagattattttagacatgattgtctgtttaaaactctcctttcactttttatcctccctggagctacagctgttcgccatcacatcactcccatcctatcctttctgtcactgtcaagcaaaacaatcagtagttactaatcgctgaactctcaatattgtggggcattttccccccagttgattaattt

SEQ ID NO: 296236 - DNA, 3301 bp, Homo sapiens
acaaaaatacctggaaaaaatatgggttattactgaggaaatgtacgagtattccaaggtccgctcatggggcaaacagcttctccataaccaccaagccactaatatgatagcattactcacaggggccttggtgactggagtagataaaggatctaaagcaaatatatggaaacaggctgtagtggatgtcatggaaaagacaatgtttctattgagtcatattgttgatggttctttggatgaaggtgtggcctatggaagctacacagctaaatccgtcacacagtatgtttttctggcccagcgccattttaatatcaacaacttggataataactggttaaagatgcacttttggttctattatgccacccttttacctggcttccaaagaactgtgggtatagcagattccaattataattggttttatggtccagaaagccagctagttttcttggataagttcatcttaaagaatggagctggaaattggttagctcagcaaattagaaagcaccgacctaaagatggaccgatggttccttcaactgcccaaaggtggagtactcttcacactgaatacatctggtatgatccccagctcacaccacagccacctgctgattatggtactgcaaaaatacacacattccctaactggggtgtggttacttatggggctgggttgccaaacacacagaccaacacctttgtgtcttttaaatctgggaagctggggggacgagctgtgtatgacatagttcattttcagccatattcctggattgatgggtggagaagttttaacccaggacatgagcatccagatcagaactcatttacttttgcccccaatggacaagtatttgtttctgaagctctctatggacccaagttgagccaccttaacaatgtattggtgtttgctccatcaccctcaagccagtgtaataagccctgggaaggtcaactgggagaatgtgcgcagtggcttaagtggactggcgaggaggttggtgatgcagctggggaaataatcactgcctctcaacatggggaaatggtatttgtgagtggggaagccgtgtctgcttattcttcagcaatgagactgaaaagtgtatatcgtgctttgcttctcttaaattcccaaactctgctagttgttgatcatattgagaggcaagaagattccccaataaattctgtcagtgccttctttcataatttggatattgattttaaatatatcccatataagtttatgaataggtataatggtgccatgatggatgtgtgggatgcacattacaaaatgttttggtttgatcatcatggcaatagtcccatggccagtatacaggaagcagagcaagctgctgaatttaaaaaacgatggactcaatttgttaatgttacttttcagatggaatccacaatcacaagaattgcatatgtcttttatgggccatatatcaatgtctccagctgcagatttattgatagttccaatcctggacttcagatttctctcaatgtcaataatactgaacatgttgtttctattgtaactgattaccataacctgaagacaagattcaattatctgggattcggtggctttgccagtgtggctgatcaaggccaaataacccgatttggtttgggcactcaagcaatagtaaagcctgtaagacatgataggattattttcccctttggatttaaatttaatatagcagttggattaattttgtgcattagcttggtgattttaactttccaatggcgtttttacctttcttttagaaaactaatgcgatggatattaatacttgttattgccttgtggtttattgagcttttggatgtgtggagcacttgtagtcagcccatttgtgcaaaatggacaaggacagaggctgagggaagcaagaagtctttgtcttctgaagggcaccacatggatcttcctgatgttgtcattacctcacttcctggttcaggagctgaaattctcaaacaactttttttcaacagtagtgattttctctacatcagggttcctacagcctacattgatattcctgaaactgagttggaaatcgactcatttgtagatgcttgtgaatggaaggtgtcagatatccgcagtgggcattttcgtttactccgaggctggttgcagtctttagtccaggacacaaaattacatttgcaaaacatccatctgcatgaacccaataggggtaaactggcccaatattttgcaatgaataaggacaaaaaaagaaaatttaaaaggagagagtctttgccagaacaaagaagtcaaatgaaaggcgcctttgatagagatgctgaatatattagggctttgaggagacacctggtttactatccaagtgcacgtcctgtgctcagtttaagcagtggaagctggacgttaaagcttcatttttttcaggaagttttaggagcttcgatgagggcattgtacatagtaagagaccctcgggcatggatttattcaatgttgtacaatagtaaaccaagtctttattctttgaagaatgtaccagagcatttagcaaaattgtttaaaatagagggaggtaaaggcaaatgtaacttaaattcgggttatgctttcgagtatgaaccattgaggaaagaattatcaaaatccaaatcaaatgcagtgtccctcttgtctcacttgtggctagcaaatacagcagcagccttgagaataaatacagatttgctgcctactagctaccagctggtcaagtttgaagatattgtgcattttcctcagaaaactactgaaaggatttttgcctttcttggaattcctttgtctcctgctagtttaaaccaaatattgtttgccacctctacaaaccttttttaccttccctatgaaggggaaatatcaccaactaatactaatgtttggaaacagaacttgcatagagtacaatagacacttcaaacaatagattctaacattctctgaaacacttgagatgtttgagctaccatttatatgggttatttatatttagtctaagtaacacatacatgtttaattgattctgttttcatggatagattcaactaagtcttccaagcaattaattttttgttcgtcgtcgtttttccttcatacgttatctagttatgcagcactggaaacagactgaagatcataaaccagttttatcagacctatgtgtaataagactcctgttaatacaaaaataaaaagctaaaagcaacttgtctatga

SEQ ID NO: 296237 - DNA, 771 bp, Homo sapiens
gggatggagtctcactttgttgcccaggctggagtgcagtggtctgatctcggctcactgcaacctccgcctaccgggttcaagtgattctcctacgtcagcctcctgaatagctgggattacaggtgcacgccaccatgcttggctcatttttgtatttttagtagtgacagcgtttcaccacattggtcaggctggtctcaatctcttgacctggtgatctgcccacctgggcctcccaaaatgctgggattacaggcatgagccaccacacctggcaagggtacctgacattctaagatatcaagacacttaatatgtgggctattagctgcttatttaaatgttgaccaaattgtctgatatatctgattaatcatgatttcacttcatttcggaagaaaaattatccatatcatttttaaagacgcaaatgactttggatttttgcatagagtacaatagacacttcaaacaatagattctaacattctctgaaacacttgagatgtttgagctaccatttatatgggttatttatatttagtctaagtaacacatacatgtttaattgattctgttttcatggatagattcaactaagtcttccaagcaattaattttttgttcgtcgtcgtttttccttcatacgttatctagttatgcagcactggaaacagactgaagatcataaaccagttttatcagacctatgtgtaataagactcctgttaatacaaaaataaaaagctaaaagcaacttgtctatga

SEQ ID NO: 296238 - DNA, 3826 bp, Homo sapiens
cggagctggcacagaggatcctcggccgcggcgacatcaccgcctggggacgcgggcgctgctctggatacggcgccaccgagagaacccgccgcccgcgggtctctgtcctgcggtccgtggttgcccccacaagcgtccggcgtttcctgagggcgggcgtgtccgggccgtgcgggtcgcggggaccgagcgcggctgaggagaccgagctggggcagcgcctgccgtagcgcgggagacgacgcgggggtcttgcggagccccgcgggagcctggcccgccgtgcagagcagttttctggaactctccacctccgtctcccttggggcccagtgcggcgccgagcccccgtcgggatctgcctgagaaaagtgtcatgaaaaaagagcagaagagagacctcactgttgctgaaaggggaattttctttccccgttggcggttacttcatgatcggacgagaagtatctaggtgactgaagatattccatttttatgtttgtacacatgaagctgataaaagaagatgtgaacatgatttctctttgtcataataggctgatgagtaagtaagcctgaaaaatatttgaaatgaaggcaagaattttgaatttttaaaaaccaactaagactttgatcacttgttgaggatgtttctctctcataaatgaaagaaaaacgtattcacaagacaagaagtataaaaagttgagaggaatgacaactgagtccactcactcgaagaatgtcagtacttcatcatcttctttgggcaaacatacacaaatgcatcatacatgtgtggtgagcttatcaccagtgatggttttctgtgctagaaatgactcttaatttgaattttggagtgctttttctctttttttacaatgtgtgttccaactctttgtgttaaatagatttaagtaaaggaggtaaatgctaaattcatagtgttttttacctgtatcacttccctgtgtattatggaaaaattagagattttaacgttattcaaagttttactggaagcaaaactgtgccagggacagagatatacaatttaagttttctctttttggcaactgcacttgcttaaaatgtactgaatgtcagctggatttcacagcatatcagatttacagtctttgtcttatcaaggcctttactgtatgttttatactaaccagatgggaaacacattgagcatcatatctgacatgtatgcctaagggaggagctcccccatggatcatggcgttaatgtttacaggacacttactattcttagcattattgatgtttgctttctctacttttgaggaatctgtgagcaattattccgaatgggcagttttcacagatgatatagatcagtttaaaacacagaaagtgcaagatttcagacccaaccaaaagctgaagaaaagtatgcttcatccaagtttatattttgatgctggagaaatccaagcaatgagacaaaagtctcgtgcaagccatttgcatctttttagagctatcagaagtgcagtgacagttatgctgtccaacccaacatactacctacctccaccaaagcatgctgattttgctgccaagtggaatgaaatttatggtaacaatctgcctcctttagcattgtactgtttgttatgcccagaagacaaagttgcctttgaatttgtcttggaatatatggacaggatggttggctacaaagactggctagtagagaatgcaccaggagatgaggttccaattggccattccttaacaggttttgccactgcctttgactttttatataactgcaagaagtctttgtcttctgaagggcaccacatggatcttcctgatgttgtcattacctcacttcctggttcaggagctgaaattctcaaacaactttttttcaacagtagtgattttctctacatcagggttcctacagcctacattgatattcctgaaactgagttggaaatcgactcatttgtagatgcttgtgaatggaaggtgtcagatatccgcagtgggcattttcgtttactccgaggctggttgcagtctttagtccaggacacaaaattacatttgcaaaacatccatctgcatgaacccaataggggtaaactggcccaatattttgcaatgaataaggacaaaaaaagaaaatttaaaaggagagagtctttgccagaacaaagaagtcaaatgaaaggcgcctttgatagagatgctgaatatattagggctttgaggagacacctggtttactatccaagtgcacgtcctgtgctcagtttaagcagtggaagctggacgttaaagcttcatttttttcaggaagttttaggagcttcgatgagggcattgtacatagtaagagaccctcgggcatggatttattcaatgttgtacaatagtaaaccaagtctttattctttgaagaatgtaccagagcatttagcaaaattgtttaaaatagagggaggtaaaggcaaatgtaacttaaattcgggttatgctttcgagtatgaaccattgaggaaagaattatcaaaatccaaatcaaatgcagtgtccctcttgtctcacttgtggctagcaaatacagcagcagccttgagaataaatacagatttgctgcctactagctaccagctggtcaagtttgaagatattgtgcattttcctcagaaaactactgaaaggatttttgcctttcttggaattcctttgtctcctgctagtttaaaccaaatattgtttgccacctctacaaaccttttttaccttccctatgaaggggaaatatcaccaactaatactaatgtttggaaacagaacttgcctagagatgaaattaaactaattgaaaacatctgctggactctgatggatcgcctaggatatccaaagtttatggactaaatgctgcaggtcagcagaaatttgcactaataatacttaccaacccactttgtggatatgaatcagaagagtttgtttattctttagtgtgtgtgtgtgtgtgcacgcgtgtatgtgttcagtgttgtttgcacagagagattgttttaaaaaatggcaccatatttggcctagcaggatttatttttatgtcatcacctcccttgcctttgtttctgaaaattttgtctgctaaaaagtttctgctacagagtggtagatgaagttatatcatggggtcaggggagatgggaaaattttaagtttttgtctaactccccttcatctgtaactgtgctaatctatctagagacctcaaacactgctaaaggccttgcaattgctgctttacccacgcatctcttgctttcaagatggactacaaaagttccttatccttttgaaaaggtcttctgacacacttatcttgcacaaagaaaaagaaaatttcttttactgtgtttaatgttcagtgatatcactgaggaaatggtgaaagctcctatcagaactataggatttcttctgggaaatacagatggaaatacagaatgaatatgtttttttgaggtcggaaactgactttaaaagcctccttgaagttttttacttagaaatataaggaataagtctttgaacaatctgggtggcaagggctggtagattattttagacatgattgtctgtttaaaactctcctttcactttttatcctccctggagctacagctgttcgccatcacatcactcccatcctatcctttctgtcactgtcaagcaaaacaatcagtagttactaatcgctgaactctcaatattgtggggcattttccccccagttgattaattt

SEQ ID NO: 296239 - DNA, 945 bp, Homo sapiens
cggagctggcacagaggatcctcggccgcggcgacatcaccgcctggggacgcgggcgctgctctggatacggcgccaccgagagaacccgccgcccgcgggtctctgtcctgcggtccgtggttgcccccacaagcgtccggcgtttcctgagggcgggcgtgtccgggccgtgcgggtcgcggggaccgagcgcggctgaggagaccgagctggggcagcgcctgccgtagcgcgggagacgacgcgggggtcttgcggagccccgcgggagcctggcccgccgtgcagagcagttttctggaactctccacctccgtctcccttggggcccagtgcggcgccgagcccccgtcgggatctgcctgagaaaagtgtcatgaaaaaagagcagaagagagacctcactgttgctgaaaggggaattttctttccccgttggcggttacttcatgatcggacgagaagtatctaggtgactgaagatattccatttttatgtttgtacacatgaagctgataaaagaagatgtgaacatgatttctctttgtcataataggctgatgagtaagtaagcctgaaaaatatttgaaatgaaggcaagaattttgaatttttaaaaaccaactaagactttgatcacttgttgaggatgtttctctctcataaatgaaagaaaaacgtattcacaagacaagaagtataaaaagttgagaggaatgacaactgagtccactcactcgaagaatgtcagtacttcatcatcttctttgggcaaacatacacaaatgcatcatacatgtgtggtgagcttatcaccagtgatggttttctgtgctagaaatgactcttaatttgaattttggagtgctttttctctttttttacaatgtgtgttccaactctttgtgttaaatagatttaagtaaaggaggtaaatgcta

SEQ ID NO: 296240 - DNA, 338 bp, Homo sapiens
cgagctcgggtaccctatattgtccggccgcgcagctggaggcggcggagcggaagccttgacttcatctcagctccagagcccgccctctcttcctgcagcctgggaacttcagccggctgggccccaccatggctgcaatccgaaagaagctggtgatcgttggggatggtgcctgtgggaagacctgcctcctcatcgtcttcagcaaggatcagtttccggaggtctacgtccctactgtctttgagaactatattgcggacattgaggtggacggcaagcttaaacctagacgcaaagggacttactccgctgacagagccagtctgctgcta

SEQ ID NO: 296241 - DNA, 845 bp, Homo sapiens
gagaaaatgagattgagaatcctccttcttcatactcgaaccaagaaagagtatcctggggtttgggactgggatcccgaggccgagtcccgccctcactctggttttaaagttgagaatgcagtatctcttggtatctccagaacggattccttccctaggtgtagggtgggccggcaaagtcaaccggccgctctggatcatctgggaattcaagagagcgattggagagaggtctgatgtagccacactgtcttgtcttggggaaggccccagaagttccaggctccattccaggccctgtgtggggctcagttgcccctcttaaggggtcagtgggacagtccctctggggctgcctctcacagggagttgtccatgccatcttggccttgggcctagtgtcctggcctgggctgcctgctgttctggcccaatcatagcctggagggaaagtcttctaattgggctggaggctccaggtcccttaacgcatgcctcaaccccgggtttctgtcctctgcctcccaccactctggtgccgtctgaattaccctgctggggggacagcagtggcatactcatgcctaagtgactggctttcaccccagtagtgattgccctccatcaacactgcccaccccaggttggggctaccccagcccatcttcacaaaacagggcaaggtgaactaatggagtgggtggaggagttggaagaaatcccagcgtcagtcaccgggatagaattcccaaggaaccctctttttggaggatggtttccatttctggaggcgatctgccgacagggtgaatgccttcttgcttgtcttctggggaatcaga

SEQ ID NO: 296242 - DNA, 357 bp, Homo sapiens
cggaaggtaccatgggccggggctgcgggcggtggggcgtcttgggaactcgtccccaggagagcactttcccttcctcgctggcccggagatcggggcccgtgcgaggaggggcttcggcctgggcgtggaccccgttccctccaagcggagtcggcatccgggctgggcggtggtcggaccgcgtcggcccctccccgggctgcagcgagggggcccggacctgccggcaggggctctggcctcctgaggtccgagtcggagccccttcccttctcctcccagcttcccggaacctgccccgccgggcgaggggcgagggaacttcaactcagacgccccagcccccagggtggg

SEQ ID NO: 296243 - DNA, 1145 bp, Homo sapiens
tccttgtaatccaagcagtcggggggtcagtctgagcctccggcaccggccgcgcagctggaggcggcggagcggaagccttgacttcatctcagctccagagcccgccctctcttcctgcagcctgggaacttcagccggctggagccccaccatggctgcaatccgaaagaagctggtgatcgttggggatggtgcctgtgggaagacctgcctcctcatcgtcttcagcaaggatcagtttccggaggtctacgtccctactgtctttgagaactatattgcggacattgaggtggacggcaagcaggtggagctggctctgtgggacacagcagggcaggaagactatgatcgactgcggcctctctcctacccggacactgatgtcatcctcatgtgcttctccatcgacagccctgacagcctggaaaacattcctgagaagtggaccccagaggtgaagcacttctgccccaacgtgcccatcatcctggtggggaataagaaggacctgaggcaagacgagcacaccaggagagagctggccaagatgaagcaggagcccgttcggtctgaggaaggccgggacatggcgaaccggatcagtgcctttggctaccttgagtgctcagccaagaccaaggagggagtgcgggaggtgtttgagatggccactcgggctggcctccaggtccgcaagaacaagcgtcggaggggctgtcccattctctgagatccccaaggcctttcctacatgccccctcccttcacaggggtacagaaattatccccctacaaccccagcctcctgagggctccatgctgaaggctcccattttcagttccctcctgcccaggactgcattgttttctagccccgaggtggtggcacgggccctccctcccagcgctctgggagccacgcctatgccctgcccttcctcagggcccctggggatcttgccccctttgaccttccccaaaggatggtcacacaccagcactttatacacttctggctcacaggaaagtgtctgcagtaggggacccagagtcccaggcccctggagttgttttcggcaggggccttgtctctcactgcatttggtcaggggggcatgaataaaggctacaggctccaa

SEQ ID NO: 296244 - DNA, 1095 bp, Homo sapiens
tccttgtaatccaagcagtcggggggtcagtctgagcctccggcaccggccgcgcagctggaggcggcggagcggagggaacttcagccggctggagccccaccatggctgcaatccgaaagaagctggtgatcgttggggatggtgcctgtgggaagacctgcctcctcatcgtcttcagcaaggatcagtttccggaggtctacgtccctactgtctttgagaactatattgcggacattgaggtggacggcaagcaggtggagctggctctgtgggacacagcagggcaggaagactatgatcgactgcggcctctctcctacccggacactgatgtcatcctcatgtgcttctccatcgacagccctgacagcctggaaaacattcctgagaagtggaccccagaggtgaagcacttctgccccaacgtgcccatcatcctggtggggaataagaaggacctgaggcaagacgagcacaccaggagagagctggccaagatgaagcaggagcccgttcggtctgaggaaggccgggacatggcgaaccggatcagtgcctttggctaccttgagtgctcagccaagaccaaggagggagtgcgggaggtgtttgagatggccactcgggctggcctccaggtccgcaagaacaagcgtcggaggggctgtcccattctctgagatccccaaggcctttcctacatgccccctcccttcacaggggtacagaaattatccccctacaaccccagcctcctgagggctccatgctgaaggctcccattttcagttccctcctgcccaggactgcattgttttctagccccgaggtggtggcacgggccctccctcccagcgctctgggagccacgcctatgccctgcccttcctcagggcccctggggatcttgccccctttgaccttccccaaaggatggtcacacaccagcactttatacacttctggctcacaggaaagtgtctgcagtaggggacccagagtcccaggcccctggagttgttttcggcaggggccttgtctctcactgcatttggtcaggggggcatgaataaaggctacaggctccaa

SEQ ID NO: 296245 - DNA, 1091 bp, Homo sapiens
  misc_feature (1)..(1): n is a, c, g, or t
  misc_feature (18)..(18): n is a, c, g, or t
nattcggaacgaggcggnggaaagccttgacttcatctcagctccagagcccgccctctcttcctgcagcctgggaacttcagccggctggagccccaccatggctgcaatccgaaagaagctggtgatcgttggggatggtgcctgtgggaagacctgcctcctcatcgtcttcagcaaggatcagtttccggaggtctacgtccctactgtctttgagaactatattgcggacattgaggtggacggcaagcaggtggagctggctctgtgggacacagcagggcaggaagactatgatcgactgcggcctctctcctacccggacactgatgtcatcctcatgtgcttctccatcgacagccctgacagcctggaaaacattcctgagaagtggaccccagaggtgaagcacttctgccccaacgtgcccatcatcctggtggggaataagaaggacctgaggcaagacgagcacaccaggagagagctggccaagatgaagcaggagcccgttcggtctgaggaaggccgggacatggcgaaccggatcagtgcctttggctaccttgagtgctcagccaagaccaaggagggagtgcgggaggtgtttgagatggccactcgggctggcctccaggtccgcaagaacaagcgtcggaggggctgtcccattctctgagatccccaaggcctttcctacatgccccctcccttcacaggggtacagaaattatccccctacaaccccagcctcctgagggctccatgctgaaggctcccattttcagttccctcctgcccaggactgcattgttttctagccccgaggtggtggcacgggccctccctcccagcgctctgggagccacgcctatgccctgcccttcctcagggcccctggggatcttgccccctttgaccttccccaaaggatggtcacacaccagcactttatacacttctggctcacaggaaagtgtctgcagtaggggacccagagtcccaggcccctggagttgttttcggcaggggccttgtctctcactgcatttggtcaggggggcatgaataaaggctacaggctccaa

SEQ ID NO: 296246 - DNA, 1276 bp, Homo sapiens
tccttgtaatccaagcagtcggggggtcagtctgagcctccggcaccggccgcgcagctggaggcggcggagcggaagggcaaggtgaactaatggagtgggtggaggagttggaagaaatcccagcgtcagtcaccgggatagaattcccaaggaaccctctttttggaggatggtttccatttctggaggcgatctgccgacaggagccttgacttcatctcagctccagagcccgccctctcttcctgcagcctgggaacttcagccggctggagccccaccatggctgcaatccgaaagaagctggtgatcgttggggatggtgcctgtgggaagacctgcctcctcatcgtcttcagcaaggatcagtttccggaggtctacgtccctactgtctttgagaactatattgcggacattgaggtggacggcaagcaggtggagctggctctgtgggacacagcagggcaggaagactatgatcgactgcggcctctctcctacccggacactgatgtcatcctcatgtgcttctccatcgacagccctgacagcctggaaaacattcctgagaagtggaccccagaggtgaagcacttctgccccaacgtgcccatcatcctggtggggaataagaaggacctgaggcaagacgagcacaccaggagagagctggccaagatgaagcaggagcccgttcggtctgaggaaggccgggacatggcgaaccggatcagtgcctttggctaccttgagtgctcagccaagaccaaggagggagtgcgggaggtgtttgagatggccactcgggctggcctccaggtccgcaagaacaagcgtcggaggggctgtcccattctctgagatccccaaggcctttcctacatgccccctcccttcacaggggtacagaaattatccccctacaaccccagcctcctgagggctccatgctgaaggctcccattttcagttccctcctgcccaggactgcattgttttctagccccgaggtggtggcacgggccctccctcccagcgctctgggagccacgcctatgccctgcccttcctcagggcccctggggatcttgccccctttgaccttccccaaaggatggtcacacaccagcactttatacacttctggctcacaggaaagtgtctgcagtaggggacccagagtcccaggcccctggagttgttttcggcaggggccttgtctctcactgcatttggtcaggggggcatgaataaaggctacaggctccaa

SEQ ID NO: 296247 - DNA, 1067 bp, Homo sapiens
aagtcccacacttagtcatagtacgaggccggtgtgaatcggccgagggggaacttcagccggctggagccccaccatggctgcaatccgaaagaagctggtgatcgttggggatggtgcctgtgggaagacctgcctcctcatcgtcttcagcaaggatcagtttccggaggtctacgtccctactgtctttgagaactatattgcggacattgaggtggacggcaagcaggtggagctggctctgtgggacacagcagggcaggaagactatgatcgactgcggcctctctcctacccggacactgatgtcatcctcatgtgcttctccatcgacagccctgacagcctggaaaacattcctgagaagtggaccccagaggtgaagcacttctgccccaacgtgcccatcatcctggtggggaataagaaggacctgaggcaagacgagcacaccaggagagagctggccaagatgaagcaggagcccgttcggtctgaggaaggccgggacatggcgaaccggatcagtgcctttggctaccttgagtgctcagccaagaccaaggagggagtgcgggaggtgtttgagatggccactcgggctggcctccaggtccgcaagaacaagcgtcggaggggctgtcccattctctgagatccccaaggcctttcctacatgccccctcccttcacaggggtacagaaattatccccctacaaccccagcctcctgagggctccatgctgaaggctcccattttcagttccctcctgcccaggactgcattgttttctagccccgaggtggtggcacgggccctccctcccagcgctctgggagccacgcctatgccctgcccttcctcagggcccctggggatcttgccccctttgaccttccccaaaggatggtcacacaccagcactttatacacttctggctcacaggaaagtgtctgcagtaggggacccagagtcccaggcccctggagttgttttcggcaggggccttgtctctcactgcatttggtcaggggggcatgaataaaggctacaggctccaa

SEQ ID NO: 296248 - DNA, 1073 bp, Homo sapiens
cgagctcgggtaccctatattgtccggccgcgcagctggaggcggcggagcggagggaacttcagccggctggagccccaccatggctgcaatccgaaagaagctggtgatcgttggggatggtgcctgtgggaagacctgcctcctcatcgtcttcagcaaggatcagtttccggaggtctacgtccctactgtctttgagaactatattgcggacattgaggtggacggcaagcaggtggagctggctctgtgggacacagcagggcaggaagactatgatcgactgcggcctctctcctacccggacactgatgtcatcctcatgtgcttctccatcgacagccctgacagcctggaaaacattcctgagaagtggaccccagaggtgaagcacttctgccccaacgtgcccatcatcctggtggggaataagaaggacctgaggcaagacgagcacaccaggagagagctggccaagatgaagcaggagcccgttcggtctgaggaaggccgggacatggcgaaccggatcagtgcctttggctaccttgagtgctcagccaagaccaaggagggagtgcgggaggtgtttgagatggccactcgggctggcctccaggtccgcaagaacaagcgtcggaggggctgtcccattctctgagatccccaaggcctttcctacatgccccctcccttcacaggggtacagaaattatccccctacaaccccagcctcctgagggctccatgctgaaggctcccattttcagttccctcctgcccaggactgcattgttttctagccccgaggtggtggcacgggccctccctcccagcgctctgggagccacgcctatgccctgcccttcctcagggcccctggggatcttgccccctttgaccttccccaaaggatggtcacacaccagcactttatacacttctggctcacaggaaagtgtctgcagtaggggacccagagtcccaggcccctggagttgttttcggcaggggccttgtctctcactgcatttggtcaggggggcatgaataaaggctacaggctccaa

SEQ ID NO: 296249 - DNA, 1073 bp, Homo sapiens
ggcgactcccgagcatttctatgccggccgcgccacctgcggcgatagcacgtcgggaacttcagccggctggagccccaccatggctgcaatccgaaagaagctggtgatcgttggggatggtgcctgtgggaagacctgcctcctcatcgtcttcagcaaggatcagtttccggaggtctacgtccctactgtctttgagaactatattgcggacattgaggtggacggcaagcaggtggagctggctctgtgggacacagcagggcaggaagactatgatcgactgcggcctctctcctacccggacactgatgtcatcctcatgtgcttctccatcgacagccctgacagcctggaaaacattcctgagaagtggaccccagaggtgaagcacttctgccccaacgtgcccatcatcctggtggggaataagaaggacctgaggcaagacgagcacaccaggagagagctggccaagatgaagcaggagcccgttcggtctgaggaaggccgggacatggcgaaccggatcagtgcctttggctaccttgagtgctcagccaagaccaaggagggagtgcgggaggtgtttgagatggccactcgggctggcctccaggtccgcaagaacaagcgtcggaggggctgtcccattctctgagatccccaaggcctttcctacatgccccctcccttcacaggggtacagaaattatccccctacaaccccagcctcctgagggctccatgctgaaggctcccattttcagttccctcctgcccaggactgcattgttttctagccccgaggtggtggcacgggccctccctcccagcgctctgggagccacgcctatgccctgcccttcctcagggcccctggggatcttgccccctttgaccttccccaaaggatggtcacacaccagcactttatacacttctggctcacaggaaagtgtctgcagtaggggacccagagtcccaggcccctggagttgttttcggcaggggccttgtctctcactgcatttggtcaggggggcatgaataaaggctacaggctccaa

SEQ ID NO: 296250 - DNA, 1144 bp, Homo sapiens
tccttgtaatccaagcagtcggggggtcagtctgagcctccggcaccggccgcgcagctggaggcggcggagcggaagccttgacttcatctcagctccagagcccgccctctcttcctgcagcctgggaacttcagccggctgggccccaccatggctgcaatccgaaagaagctggtgatcgttggggatggtgcctgtgggaagacctgcctcctcatcgtcttcagcaaggatcagtttccggaggtctacgtccctactgtctttgagaactatattgcggacattgaggtggacggcaagcaggtggagctggctctgtgggacacagcagggcaggaagactatgatcgactgcggcctctctcctacccggacactgatgtcatcctcatgtgcttctccatcgacagccctgacagcctggaaaacattcctgagaagtggaccccagaggtgaagcacttctgccccaacgtgcccatcatcctggtggggaataagaaggacctgaggcaagacgagcacaccaggagagagctggccaagatgaagcaggagcccgttcggtctgaggaaggccgggacatggcgaaccggatcagtgcctttggctaccttgagtgctcagccaagaccaaggagggagtgcgggaggtgtttgagatggccactcgggctggcctccaggtccgcaagaacaagcgtcggaggggctgtcccattctctgagatccccaaggcctttcctacatgccccctcccttcacaggggtacagaaattatccccctacaaccccagcctcctgagggctccatgctgaaggctcccattttcagttccctcctgcccaggactgcattgttttctagccccgaggtggtggcacgggccctccctcccagcgctctgggagccacgcctatgccctgcccttcctcagggcccctggggatcttgccccctttgaccttccccaaaggatggtcacacaccagcactttatacacttctggctcacaggaaagtgtctgcagtaggggacccagagtcccaggcccctggagttgttttcggcaggggccttgtctctcactgcatttggtcaggggggcatgaataaaggctacaggctccaa

SEQ ID NO: 296251 - DNA, 1191 bp, Homo sapiens
tccttgtaatccaagcagtcggggggtcagtctgagcctccggcaccggccgcgcagctggaggcggcggagcggaagccttgacttcatctcagctccagagcccgccctctcttcctgcagcctgggaacttcagccggctggggtcagttcccctccccagggaaggaggaagtgagggaagctgcgaagccccaccatggctgcaatccgaaagaagctggtgatcgttggggatggtgcctgtgggaagacctgcctcctcatcgtcttcagcaaggatcagtttccggaggtctacgtccctactgtctttgagaactatattgcggacattgaggtggacggcaagcaggtggagctggctctgtgggacacagcagggcaggaagactatgatcgactgcggcctctctcctacccggacactgatgtcatcctcatgtgcttctccatcgacagccctgacagcctggaaaacattcctgagaagtggaccccagaggtgaagcacttctgccccaacgtgcccatcatcctggtggggaataagaaggacctgaggcaagacgagcacaccaggagagagctggccaagatgaagcaggagcccgttcggtctgaggaaggccgggacatggcgaaccggatcagtgcctttggctaccttgagtgctcagccaagaccaaggagggagtgcgggaggtgtttgagatggccactcgggctggcctccaggtccgcaagaacaagcgtcggaggggctgtcccattctctgagatccccaaggcctttcctacatgccccctcccttcacaggggtacagaaattatccccctacaaccccagcctcctgagggctccatgctgaaggctcccattttcagttccctcctgcccaggactgcattgttttctagccccgaggtggtggcacgggccctccctcccagcgctctgggagccacgcctatgccctgcccttcctcagggcccctggggatcttgccccctttgaccttccccaaaggatggtcacacaccagcactttatacacttctggctcacaggaaagtgtctgcagtaggggacccagagtcccaggcccctggagttgttttcggcaggggccttgtctctcactgcatttggtcaggggggcatgaataaaggctacaggctccaa

SEQ ID NO: 296252 - DNA, 1256 bp, Homo sapiens
tccttgtaatccaagcagtcggggggtcagtctgagcctccggcaccggccgcgcagctggaggcggcggagcggagggaacttcagccggctggagccccaccatggctgcaatccgaaagaagctggtgatcgttggggatggtgcctgtgggaagacctgcctcctcatcgtcttcagcaaggatcagtttccggaggtctacgtccctactgtctttgagaactatattgcggacattgaggtggacggcaagcaggtggagctggctctgtgggacacagcagggcaggaagactatgatcgactgcggcctctctcctacccggacactgatgtcatcctcatgtgcttctccatcgacagccctgacagcctggaaaacattcctgagaagtggaccccagaggtgaagcacttctgccccaacgtgcccatcatcctggtggggaataagaaggacctgaggcaagacgagcacaccaggagagagctggccaagatgaagcaggagcccgttcggtctgaggaaggccgggacatggcgaaccggatcagtgcctttggctaccttgagtgctcagccaagaccaaggagggagtgcgggaggtgtttgagatggccactcgggctggcctccaggtccgcaagaacaagcgtcggaggggctgtcccattctctgagatccccaaggcctttcctacatgccccctcccttcacaggggtacagaaattatccccctacaaccccagcctcctgagggctccatgctgaaggctcccattttcagttccctcctgcccaggactgcattgttttctagccccgaggtggtggcacgggccctccctcccagcgctctgggagccacgcctatgccctgcccttcctcagggcccctggggatcttgccccctttgaccttccccaaaggatggtcacacaccagcactttatacacttctggctcacaggaaagtgtctgcagtaggggacccagagtcccaggcccctggagttgttttcggcaggggccttgtctctcactgcatttggtcaggggggcatgaataaaggctacaggctccaaaaaaaaaaaaaaaaaaaaaaaaaaatttggcgggcttgggcttggaaaagtttttagacacattctgtgtgggggggggccagtatggtagtaaattggcaaatgttcaaggaaccgggtagatagggtggtttccacaaaaaagcgggaacggttttgaa

SEQ ID NO: 296253 - DNA, 1120 bp, Homo sapiens
tccttgtaatccaagcagtcggggggtcagtctgagcctccggcaccggccgcgcagctggaggcggcggagcggagggaacttcagccggctggagccccaccatggctgcaatccgaaagaagctggtgatcgttggggatggtgcctgtgggaagacctgcctcctcatcgtcttcagcaaggatcagtttccggaggtctacgtccctactgtctttgagaactatattgcggacattgaggtggacggcaagcaggtggagctggctctgtgggacacagcagggcaggaagactatgatcgactgcggcctctctcctacccggacactgatgtcatcctcatgtgcttctccatcgacagccctgacagcctggaaaacattcctgagaagtggaccccagaggtgaagcacttctgccccaacgtgcccatcatcctggtggggaataagaaggacctgaggcaagacgagcacaccaggagagagctggccaagatgaagcaggagcccgttcggtctgaggaaggccgggacatggcgaaccggatcagtgcctttggctaccttgagtgctcagccaagaccaaggagggagtgcgggaggtgtttgagatggccactcgggctggcctccaggtccgcaagaacaagcgtcggaggggctgtcccattctctgagatccccaaggcctttcctacatgccccctcccttcacaggggtacagaaattatccccctacaaccccagcctcctgagggctccatgctgaaggctcccattttcagttccctcctgcccaggactgcattgttttctagccccgaggtggtggcacgggccctccctcccagcgctctgggagccacgcctatgccctgcccttcctcagggcccctggggatcttgccccctttgaccttccccaaaggatggtcacacaccagcactttatacacttctggctcacaggaaagtgtctgcagtaggggacccagagtcccaggcccctggagttgttttcggcaggggccttgtctctcactgcatttggtcaggggggcatgaataaaggctacaggctccaacgtgtgtggcagctttcggtctttc

SEQ ID NO: 296254 - DNA, 1519 bp, Homo sapiens
  misc_feature (1171)..(1171): n is a, c, g, or t
  misc_feature (1189)..(1189): n is a, c, g, or t
tccttgtaatccaagcagtcggggggtcagtctgagcctccggcaccggccgcgcagctggaggcggcggagcggagggaacttcagccggctggagccccaccatggctgcaatccgaaagaagctggtgatcgttggggatggtgcctgtgggaagacctgcctcctcatcgtcttcagcaaggatcagtttccggaggtctacgtccctactgtctttgagaactatattgcggacattgaggtggacggcaagcaggtggagctggctctgtgggacacagcagggcaggaagactatgatcgactgcggcctctctcctacccggacactgatgtcatcctcatgtgcttctccatcgacagccctgacagcctggaaaacattcctgagaagtggaccccagaggtgaagcacttctgccccaacgtgcccatcatcctggtggggaataagaaggacctgaggcaagacgagcacaccaggagagagctggccaagatgaagcaggagcccgttcggtctgaggaaggccgggacatggcgaaccggatcagtgcctttggctaccttgagtgctcagccaagaccaaggagggagtgcgggaggtgtttgagatggccactcgggctggcctccaggtccgcaagaacaagcgtcggaggggctgtcccattctctgagatccccaaggcctttcctacatgccccctcccttcacaggggtacagaaattatccccctacaaccccagcctcctgagggctccatgctgaaggctcccattttcagttccctcctgcccaggactgcattgttttctagccccgaggtggtggcacgggccctccctcccagcgctctgggagccacgcctatgccctgcccttcctcagggcccctggggatcttgccccctttgaccttccccaaaggatggtcacacaccagcactttatacacttctggctcacaggaaagtgtctgcagtaggggacccagagtcccaggcccctggagttgttttcggcaggggccttgtctctcactgcatttggtcaggggggcatgaataaaggctacaggctccaacgtgaaaaaaaaaaaaaaaaaaaaaaaaaaaaaaaaaaaaaaaaaaaaaaaaaaaaaaaaaaaaaaaaaaaaaaanaaaaaaaaaaaaaaaacnaaaaaaaaaaaaaaaagaggggggggggcggaaaaaatccccgggggggggaaaatgagattacgggcacgccgcactagtcaagtagaacagggaggcgccccacacaaaggagggtgtaatataaaaaaaggacggcgggaccgccgcaaacaacagcacgggtgaggatagaaaaccactgctgtcgcgtcaagcttggacgacagcacacccatggtgtggggggaaccaggcagacaacccacacggaaagataggccgggcgaacacaacaacgaggcggaggaggaacaccacacttgctagaaaaggtcggtaaacatttcg

SEQ ID NO: 296255 - DNA, 1365 bp, Homo sapiens
tccttgtaatccaagcagtcggggggtcagtctgagcctccggcaccggccgcgcagctggaggcggcggagcggagggaacttcagccggctggagccccaccatggctgcaatccgaaagaagctggtgatcgttggggatggtgcctgtgggaagacctgcctcctcatcgtcttcagcaaggatcagtttccggaggtctacgtccctactgtctttgagaactatattgcggacattgaggtggacggcaagcaggtggagctggctctgtgggacacagcagggcaggaagactatgatcgactgcggcctctctcctacccggacactgatgtcatcctcatgtgcttctccatcgacagccctgacagcctggaaaacattcctgagaagtggaccccagaggtgaagcacttctgccccaacgtgcccatcatcctggtggggaataagaaggacctgaggcaagacgagcacaccaggagagagctggccaagatgaagcaggagcccgttcggtctgaggaaggccgggacatggcgaaccggatcagtgcctttggctaccttgagtgctcagccaagaccaaggagggagtgcgggaggtgtttgagatggccactcgggctggcctccaggtccgcaagaacaagcgtcggaggggctgtcccattctctgagatccccaaggcctttcctacatgccccctcccttcacaggggtacagaaattatccccctacaaccccagcctcctgagggctccatgctgaaggctcccattttcagttccctcctgcccaggactgcattgttttctagccccgaggtggtggcacgggccctccctcccagcgctctgggagccacgcctatgccctgcccttcctcagggcccctggggatcttgccccctttgaccttccccaaaggatggtcacacaccagcactttatacacttctggctcacaggaaagtgtctgcagtaggggacccagagtcccaggcccctggagttgttttcggcaggggccttgtctctcactgcatttggtcaggggggcatgaataaaggctacaggctccaaaggttccaaaaaaaaaaaaaaaaaaacaaacaaaagacaccatcagaaaaacaaaaaaaactcgcctgagggctattctttttcgtcggggtggcgagaacaacgcgagcggttttagtaaaggggccactttgtttcaactattgttggtttcctgcgcaaccccccttttttctttgttccaagggggtggaaaattctgcgcgggcccccctattaagaggagcagaattaatttgaaaaaacgcgggtaccccggtttaaacagcg

SEQ ID NO: 296256 - DNA, 1395 bp, Homo sapiens
  misc_feature (1096)..(1100): n is a, c, g, or t
tccttgtaatccaagcagtcggggggtcagtctgagcctccggcaccggccgcgcagctggaggcggcggagcggagggaacttcagccggctggagccccaccatggctgcaatccgaaagaagctggtgatcgttggggatggtgcctgtgggaagacctgcctcctcatcgtcttcagcaaggatcagtttccggaggtctacgtccctactgtctttgagaactatattgcggacattgaggtggacggcaagcaggtggagctggctctgtgggacacagcagggcaggaagactatgatcgactgcggcctctctcctacccggacactgatgtcatcctcatgtgcttctccatcgacagccctgacagcctggaaaacattcctgagaagtggaccccagaggtgaagcacttctgccccaacgtgcccatcatcctggtggggaataagaaggacctgaggcaagacgagcacaccaggagagagctggccaagatgaagcaggagcccgttcggtctgaggaaggccgggacatggcgaaccggatcagtgcctttggctaccttgagtgctcagccaagaccaaggagggagtgcgggaggtgtttgagatggccactcgggctggcctccaggtccgcaagaacaagcgtcggaggggctgtcccattctctgagatccccaaggcctttcctacatgccccctcccttcacaggggtacagaaattatccccctacaaccccagcctcctgagggctccatgctgaaggctcccattttcagttccctcctgcccaggactgcattgttttctagccccgaggtggtggcacgggccctccctcccagcgctctgggagccacgcctatgccctgcccttcctcagggcccctggggatcttgccccctttgaccttccccaaaggatggtcacacaccagcactttatacacttctggctcacaggaaagtgtctgcagtaggggacccagagtcccaggcccctggagttgttttcggcaggggccttgtctctcactgcatttggtcaggggggcatgaataaaggctacaggctccaannnnnaaaaaaaaaaaaaaaaaaaaatttttgggcggcttgggccttgaaaaatgtttttaaaacatttgtgttggggacgcgcccggggccccaggagcggtacgtgacacatgtggcgccgaaacgctggtcccaagggagaacccggggccaacacacacggcgcgggatttccccaccagttaaaaaacgcccgggtggccgccgaaagtggtctagacacatcccaagggggtccggagggccaagggggtcgcattacaagggagtgccaaaggaacgtccgatataattatcc

SEQ ID NO: 296257 - DNA, 1545 bp, Homo sapiens
  misc_feature (1096)..(1100): n is a, c, g, or t
  misc_feature (1197)..(1197): n is a, c, g, or t
  misc_feature (1215)..(1215): n is a, c, g, or t
tccttgtaatccaagcagtcggggggtcagtctgagcctccggcaccggccgcgcagctggaggcggcggagcggagggaacttcagccggctggagccccaccatggctgcaatccgaaagaagctggtgatcgttggggatggtgcctgtgggaagacctgcctcctcatcgtcttcagcaaggatcagtttccggaggtctacgtccctactgtctttgagaactatattgcggacattgaggtggacggcaagcaggtggagctggctctgtgggacacagcagggcaggaagactatgatcgactgcggcctctctcctacccggacactgatgtcatcctcatgtgcttctccatcgacagccctgacagcctggaaaacattcctgagaagtggaccccagaggtgaagcacttctgccccaacgtgcccatcatcctggtggggaataagaaggacctgaggcaagacgagcacaccaggagagagctggccaagatgaagcaggagcccgttcggtctgaggaaggccgggacatggcgaaccggatcagtgcctttggctaccttgagtgctcagccaagaccaaggagggagtgcgggaggtgtttgagatggccactcgggctggcctccaggtccgcaagaacaagcgtcggaggggctgtcccattctctgagatccccaaggcctttcctacatgccccctcccttcacaggggtacagaaattatccccctacaaccccagcctcctgagggctccatgctgaaggctcccattttcagttccctcctgcccaggactgcattgttttctagccccgaggtggtggcacgggccctccctcccagcgctctgggagccacgcctatgccctgcccttcctcagggcccctggggatcttgccccctttgaccttccccaaaggatggtcacacaccagcactttatacacttctggctcacaggaaagtgtctgcagtaggggacccagagtcccaggcccctggagttgttttcggcaggggccttgtctctcactgcatttggtcaggggggcatgaataaaggctacaggctccaannnnnaaaaaaaaaaaaaaaaaaaaacgtgaaaaaaaaaaaaaaaaaaaaaaaaaaaaaaaaaaaaaaaaaaaaaaaaaaaaaaaaaaaaaaaaaaaaaaanaaaaaaaaaaaaaaaacnaaaaaaaaaaaaaaaagaggggggggggcggaaaaaatccccgggggggggaaaatgagattacgggcacgccgcactagtcaagtagaacagggaggcgccccacacaaaggagggtgtaatataaaaaaaggacggcgggaccgccgcaaacaacagcacgggtgaggatagaaaaccactgctgtcgcgtcaagcttggacgacagcacacccatggtgtggggggaaccaggcagacaacccacacggaaagataggccgggcgaacacaacaacgaggcggaggaggaacaccacacttgctagaaaaggtcggtaaacatttcg

SEQ ID NO: 296258 - DNA, 1221 bp, Homo sapiens
tccttgtaatccaagcagtcggggggtcagtctgagcctccggcaccggccgcgcagctggaggcggcggagcggaagccttgacttcatctcagctccagagcccgccctctcttcctgcagcctgggaacttcagccggctgggccccaccatggctgcaatccgaaagaagctggtgatcgttggggatggtgcctgtgggaagacctgcctcctcatcgtcttcagcaaggatcagtttccggaggtctacgtccctactgtctttgagaactatattgcggacattgaggtggacggcaagcagactggctctgtaacctgggccgagtccctttgcctctgggtttaagctcccccacctgcaaaatggggatgatgcaggtggagctggctctgtgggacacagcagggcaggaagactatgatcgactgcggcctctctcctacccggacactgatgtcatcctcatgtgcttctccatcgacagccctgacagcctggaaaacattcctgagaagtggaccccagaggtgaagcacttctgccccaacgtgcccatcatcctggtggggaataagaaggacctgaggcaagacgagcacaccaggagagagctggccaagatgaagcaggagcccgttcggtctgaggaaggccgggacatggcgaaccggatcagtgcctttggctaccttgagtgctcagccaagaccaaggagggagtgcgggaggtgtttgagatggccactcgggctggcctccaggtccgcaagaacaagcgtcggaggggctgtcccattctctgagatccccaaggcctttcctacatgccccctcccttcacaggggtacagaaattatccccctacaaccccagcctcctgagggctccatgctgaaggctcccattttcagttccctcctgcccaggactgcattgttttctagccccgaggtggtggcacgggccctccctcccagcgctctgggagccacgcctatgccctgcccttcctcagggcccctggggatcttgccccctttgaccttccccaaaggatggtcacacaccagcactttatacacttctggctcacaggaaagtgtctgcagtaggggacccagagtcccaggcccctggagttgttttcggcaggggccttgtctctcactgcatttggtcaggggggcatgaataaaggctacaggctccaa

SEQ ID NO: 296259 - DNA, 1171 bp, Homo sapiens
tccttgtaatccaagcagtcggggggtcagtctgagcctccggcaccggccgcgcagctggaggcggcggagcggagggaacttcagccggctgggccccaccatggctgcaatccgaaagaagctggtgatcgttggggatggtgcctgtgggaagacctgcctcctcatcgtcttcagcaaggatcagtttccggaggtctacgtccctactgtctttgagaactatattgcggacattgaggtggacggcaagcagactggctctgtaacctgggccgagtccctttgcctctgggtttaagctcccccacctgcaaaatggggatgatgcaggtggagctggctctgtgggacacagcagggcaggaagactatgatcgactgcggcctctctcctacccggacactgatgtcatcctcatgtgcttctccatcgacagccctgacagcctggaaaacattcctgagaagtggaccccagaggtgaagcacttctgccccaacgtgcccatcatcctggtggggaataagaaggacctgaggcaagacgagcacaccaggagagagctggccaagatgaagcaggagcccgttcggtctgaggaaggccgggacatggcgaaccggatcagtgcctttggctaccttgagtgctcagccaagaccaaggagggagtgcgggaggtgtttgagatggccactcgggctggcctccaggtccgcaagaacaagcgtcggaggggctgtcccattctctgagatccccaaggcctttcctacatgccccctcccttcacaggggtacagaaattatccccctacaaccccagcctcctgagggctccatgctgaaggctcccattttcagttccctcctgcccaggactgcattgttttctagccccgaggtggtggcacgggccctccctcccagcgctctgggagccacgcctatgccctgcccttcctcagggcccctggggatcttgccccctttgaccttccccaaaggatggtcacacaccagcactttatacacttctggctcacaggaaagtgtctgcagtaggggacccagagtcccaggcccctggagttgttttcggcaggggccttgtctctcactgcatttggtcaggggggcatgaataaaggctacaggctccaa

SEQ ID NO: 296260 - DNA, 969 bp, Homo sapiens
tccttgtaatccaagcagtcggggggtcagtctgagcctccggcaccggccgcgcagctggaggcggcggagcggagggaacttcagccggctggagccccaccatggctgcaatccgaaagaagctggtgatcgttggggatggtgcctgtgggaagacctgcctcctcatcgtcttcagcaaggatcagtttccggaggtctacgtccctactgtctttgagaactatattgcggacattgaggtggacggcaagcaggtggagctggctctgtgggacacagcagggcaggaagactatgatcgactgcggcctctctcctacccggacactgatgtcatcctcatgtgcttctccatcgacagccctgacagcctggaaaacattcctgagaagtggaccccagaggtgaagcacttctgccccaacgtgcccatcatcctggtggggaataagaaggacctgaggcaagacgagcacaccaggagagagctggccaagatgaagcaggagcccgttcggtctgaggaaggccgggacatggcgaaccggatcagtgcctttggctaccttgagtgctcagccaagaccaaggagggagtgcgggaggtgtttgagatggccactcgggctggcctccaggtccgcaagaacaagcgtcggaggggctgtcccattctctgagatccccaaggcctttcctacatgccccctcccttcacaggggtacagaaattatccccctacaaccccagcctcctgagggctccatgctgaaggctcccattttcagttccctcctgcccaggactgcattgttttctagccccgaggtggtggcacgggccctccctcccagcgctctgggagccacgcctatgccctgcccttcctcagggcccctggggatcttgcccacctcggccacccaaagtgctgggattacaggtgagagccactgcactag

SEQ ID NO: 296261 - DNA, 1450 bp, Homo sapiens
tccttgtaatccaagcagtcggggggtcagtctgagcctccggcaccggccgcgcagctggaggcggcggagcggaagccttgacttcatctcagctccagagcccgccctctcttcctgcagcctgggaacttcagccggctggagccccaccatggctgcaatccgaaagaagctggtgatcgttggggatggtgcctgtgggaagacctgcctcctcatcgtcttcagcaaggatcagtttccggaggtctacgtccctactgtctttgagaactatattgcggacattgaggtggacggcaagcaggtggagctggctctgtgggacacagcagggcaggaagactatgatcgactgcggcctctctcctacccggacactgatgtcatcctcatgtgcttctccatcgacagccctgacagcctgggtgaggggattggagggaggggactgagaaccccttggaatcagccagaggtctcgtgccttggcctgtcttcagtcatcttcagaggtgggggtggggatgcaggggagcactcaggccctgttggtctcctttactgtggtaactggccctctgagggcatactactgttgaggttttgagctgtgaaagggaccatcatgctgaatggcttctaagactgctctgggaagatgagggcccccccaggggagctttctagcttaagtggaggcaccgacacctgttggtgcatgtctacacagaaaacattcctgagaagtggaccccagaggtgaagcacttctgccccaacgtgcccatcatcctggtggggaataagaaggacctgaggcaagacgagcacaccaggagagagctggccaagatgaagcaggagcccgttcggtctgaggaaggccgggacatggcgaaccggatcagtgcctttggctaccttgagtgctcagccaagaccaaggagggagtgcgggaggtgtttgagatggccactcgggctggcctccaggtccgcaagaacaagcgtcggaggggctgtcccattctctgagatccccaaggcctttcctacatgccccctcccttcacaggggtacagaaattatccccctacaaccccagcctcctgagggctccatgctgaaggctcccattttcagttccctcctgcccaggactgcattgttttctagccccgaggtggtggcacgggccctccctcccagcgctctgggagccacgcctatgccctgcccttcctcagggcccctggggatcttgccccctttgaccttccccaaaggatggtcacacaccagcactttatacacttctggctcacaggaaagtgtctgcagtaggggacccagagtcccaggcccctggagttgttttcggcaggggccttgtctctcactgcatttggtcaggggggcatgaataaaggctacaggctccaa

SEQ ID NO: 296262 - DNA, 769 bp, Homo sapiens
cgagctcgggtaccctatattgtccggccgcgcagctggaggcggcggagcggagaaaacattcctgagaagtggaccccagaggtgaagcacttctgccccaacgtgcccatcatcctggtggggaataagaaggacctgaggcaagacgagcacaccaggagagagctggccaagatgaagcaggagcccgttcggtctgaggaaggccgggacatggcgaaccggatcagtgcctttggctaccttgagtgctcagccaagaccaaggagggagtgcgggaggtgtttgagatggccactcgggctggcctccaggtccgcaagaacaagcgtcggaggggctgtcccattctctgagatccccaaggcctttcctacatgccccctcccttcacaggggtacagaaattatccccctacaaccccagcctcctgagggctccatgctgaaggctcccattttcagttccctcctgcccaggactgcattgttttctagccccgaggtggtggcacgggccctccctcccagcgctctgggagccacgcctatgccctgcccttcctcagggcccctggggatcttgccccctttgaccttccccaaaggatggtcacacaccagcactttatacacttctggctcacaggaaagtgtctgcagtaggggacccagagtcccaggcccctggagttgttttcggcaggggccttgtctctcactgcatttggtcaggggggcatgaataaaggctacaggctccaa

SEQ ID NO: 296263 - DNA, 1090 bp, Homo sapiens
tccttgtaatccaagcagtcggggggtcagtctgagcctccggcaccggccgcgcagctggaggcggcggagcggaagccttgacttcatctcagctccagagcccgccctctcttcctgcagcctgggaacttcagccggctggagccccaccatggctgcaatccgaaagaagctggtgatcgttggggatggtgcctgtgggaagacctgcctcctcatcgtcttcagcaaggatcagtttccggaggtctacgtccctactgtctttgagaactatattgcggacattgaggtggacggcaagcaggtggagctggctctgtgggacacagcagggcaggaagactatgatcgactgcggcctctctcctacccggacactgatgtcatcctcatgtgcttctccatcgacagccctgacagcctgccatcatcctggtggggaataagaaggacctgaggcaagacgagcacaccaggagagagctggccaagatgaagcaggagcccgttcggtctgaggaaggccgggacatggcgaaccggatcagtgcctttggctaccttgagtgctcagccaagaccaaggagggagtgcgggaggtgtttgagatggccactcgggctggcctccaggtccgcaagaacaagcgtcggaggggctgtcccattctctgagatccccaaggcctttcctacatgccccctcccttcacaggggtacagaaattatccccctacaaccccagcctcctgagggctccatgctgaaggctcccattttcagttccctcctgcccaggactgcattgttttctagccccgaggtggtggcacgggccctccctcccagcgctctgggagccacgcctatgccctgcccttcctcagggcccctggggatcttgccccctttgaccttccccaaaggatggtcacacaccagcactttatacacttctggctcacaggaaagtgtctgcagtaggggacccagagtcccaggcccctggagttgttttcggcaggggccttgtctctcactgcatttggtcaggggggcatgaataaaggctacaggctccaa

SEQ ID NO: 296264 - DNA, 1395 bp, Homo sapiens
tccttgtaatccaagcagtcggggggtcagtctgagcctccggcaccggccgcgcagctggaggcggcggagcggaagccttgacttcatctcagctccagagcccgccctctcttcctgcagcctgggaacttcagccggctggagccccaccatggctgcaatccgaaagaagctggtgatcgttggggatggtgcctgtgggaagacctgcctcctcatcgtcttcagcaaggatcagtttccggaggtctacgtccctactgtctttgagaactatattgcggacattgaggtggacggcaagcaggtggagctggctctgtgggacacagcagggcaggaagactatgatcgactgcggcctctctcctacccggacactgatgtcatcctcatgtgcttctccatcgacagccctgacagcctgggtgaggggattggagggaggggactgagaaccccttggaatcagccagaggtctcgtgccttggcctgtcttcagtcatcttcagaggtgggggtggggatgcaggggagcactcaggccctgttggtctcctttactgtggtaactggccctctgagggcatactactgttgaggttttgagctgtgaaagggaccatcatgctgaatggcttctaagactgctctgggaagatgagggcccccccaggggagctttctagcttaagtggaggcaccgacacctgttggtgcatgtctacacaccatcatcctggtggggaataagaaggacctgaggcaagacgagcacaccaggagagagctggccaagatgaagcaggagcccgttcggtctgaggaaggccgggacatggcgaaccggatcagtgcctttggctaccttgagtgctcagccaagaccaaggagggagtgcgggaggtgtttgagatggccactcgggctggcctccaggtccgcaagaacaagcgtcggaggggctgtcccattctctgagatccccaaggcctttcctacatgccccctcccttcacaggggtacagaaattatccccctacaaccccagcctcctgagggctccatgctgaaggctcccattttcagttccctcctgcccaggactgcattgttttctagccccgaggtggtggcacgggccctccctcccagcgctctgggagccacgcctatgccctgcccttcctcagggcccctggggatcttgccccctttgaccttccccaaaggatggtcacacaccagcactttatacacttctggctcacaggaaagtgtctgcagtaggggacccagagtcccaggcccctggagttgttttcggcaggggccttgtctctcactgcatttggtcaggggggcatgaataaaggctacaggctccaa

SEQ ID NO: 296265 - DNA, 1221 bp, Homo sapiens
tccttgtaatccaagcagtcggggggtcagtctgagcctccggcaccggccgcgcagctggaggcggcggagcggaagggcaaggtgaactaatggagtgggtggaggagttggaagaaatcccagcgtcagtcaccgggatagaattcccaaggaaccctctttttggaggatggtttccatttctggaggcgatctgccgacaggagccttgacttcatctcagctccagagcccgccctctcttcctgcagcctgggaacttcagccggctggagccccaccatggctgcaatccgaaagaagctggtgatcgttggggatggtgcctgtgggaagacctgcctcctcatcgtcttcagcaaggatcagtttccggaggtctacgtccctactgtctttgagaactatattgcggacattgaggtggacggcaagcaggtggagctggctctgtgggacacagcagggcaggaagactatgatcgactgcggcctctctcctacccggacactgatgtcatcctcatgtgcttctccatcgacagccctgacagcctgccatcatcctggtggggaataagaaggacctgaggcaagacgagcacaccaggagagagctggccaagatgaagcaggagcccgttcggtctgaggaaggccgggacatggcgaaccggatcagtgcctttggctaccttgagtgctcagccaagaccaaggagggagtgcgggaggtgtttgagatggccactcgggctggcctccaggtccgcaagaacaagcgtcggaggggctgtcccattctctgagatccccaaggcctttcctacatgccccctcccttcacaggggtacagaaattatccccctacaaccccagcctcctgagggctccatgctgaaggctcccattttcagttccctcctgcccaggactgcattgttttctagccccgaggtggtggcacgggccctccctcccagcgctctgggagccacgcctatgccctgcccttcctcagggcccctggggatcttgccccctttgaccttccccaaaggatggtcacacaccagcactttatacacttctggctcacaggaaagtgtctgcagtaggggacccagagtcccaggcccctggagttgttttcggcaggggccttgtctctcactgcatttggtcaggggggcatgaataaaggctacaggctccaa

SEQ ID NO: 296266 - DNA, 1142 bp, Homo sapiens
  misc_feature (492)..(492): n is a, c, g, or t
  misc_feature (501)..(501): n is a, c, g, or t
tccttgtaatccaagcagtcggggggtcagtctgagcctccggcaccggccgcgcagctggaggcggcggagcggaagccttgacttcatctcagctccagagcccgccctctcttcctgcagcctgggaacttcagccggctggagccccaccatggctgcaatccgaaagaagctggtgatcgttggggatggtgcctgtgggaagacctgcctcctcatcgtcttcagcaaggatcagtttccggaggtctacgtccctactgtctttgagaactatattgcggacattgaggtggacggcaagcaggtggagctggctctgtgggacacagcagggcaggaagactatgatcgactgcggcctctctcctacccggacactgatgtcatcctcatgtgcttctccatcgacagccctgacagcctggaaaacattcctgagaagtggaccccagaggtgaagcacttctgccccaacgtgcccatatnctggtgggnataagaggacctgaggcaagacgagcacaccaggagagagctggccaagatgaagcaggagcccgttcggtctgaggaaggccgggacatggcgaaccggatcagtgcctttggctaccttgagtgctcagccaagaccaaggagggagtgcgggaggtgtttgagatggccactcgggctggcctccaggtccgcaagaacaagcgtcggaggggctgtcccattctctgagatccccaaggcctttcctacatgccccctcccttcacaggggtacagaaattatccccctacaaccccagcctcctgagggctccatgctgaaggctcccattttcagttccctcctgcccaggactgcattgttttctagccccgaggtggtggcacgggccctccctcccagcgctctgggagccacgcctatgccctgcccttcctcagggcccctggggatcttgccccctttgaccttccccaaaggatggtcacacaccagcactttatacacttctggctcacaggaaagtgtctgcagtaggggacccagagtcccaggcccctggagttgttttcggcaggggccttgtctctcactgcatttggtcaggggggcatgaataaaggctacaggctccaa

SEQ ID NO: 296267 - DNA, 1009 bp, Homo sapiens
tccttgtaatccaagcagtcggggggtcagtctgagcctccggcaccggccgcgcagctggaggcggcggagcggaagccttgacttcatctcagctccagagcccgccctctcttcctgcagcctgggaacttcagccggctggagccccaccatggctgcaatccgaaagaagctggtgatcgttggggatggtgcctgtgggaagacctgcctcctcatcgtcttcagcaaggatcagtttccggaggtctacgtccctactgtctttgagaactatattgcggacattgaggtggacggcaagcaggtggagctggctctgtgggacacagcagggcaggaagactatgatcgactgcggcctctctcctacccggacactgatgtcatcctcatgtgcttctccatcgacagccctgacagcctgccgttcggtctgaggaaggccgggacatggcgaaccggatcagtgcctttggctaccttgagtgctcagccaagaccaaggagggagtgcgggaggtgtttgagatggccactcgggctggcctccaggtccgcaagaacaagcgtcggaggggctgtcccattctctgagatccccaaggcctttcctacatgccccctcccttcacaggggtacagaaattatccccctacaaccccagcctcctgagggctccatgctgaaggctcccattttcagttccctcctgcccaggactgcattgttttctagccccgaggtggtggcacgggccctccctcccagcgctctgggagccacgcctatgccctgcccttcctcagggcccctggggatcttgccccctttgaccttccccaaaggatggtcacacaccagcactttatacacttctggctcacaggaaagtgtctgcagtaggggacccagagtcccaggcccctggagttgttttcggcaggggccttgtctctcactgcatttggtcaggggggcatgaataaaggctacaggctccaa

SEQ ID NO: 296268 - DNA, 1024 bp, Homo sapiens
tccttgtaatccaagcagtcggggggtcagtctgagcctccggcaccggccgcgcagctggaggcggcggagcggagccccaccatggctgcaatccgaaagaagctggtgatcgttggggatggtgcctgtgggaagacctgcctcctcatcgtcttcagcaaggatcagtttccggaggtctacgtccctactgtctttgagaactatattgcggacattgaggtggacggcaagcaggtggagctggctctgtgggacacagcagggcaggaagactatgatcgactgcggcctctctcctacccggacactgatgtcatcctcatgtgcttctccatcgacagccctgacagcctggaaaacattcctgagaagtggaccccagaggtgaagcacttctgccccaacgtgcccatcatcctggtggggaataagaaggaccccgttcggtctgaggaaggccgggacatggcgaaccggatcagtgcctttggctaccttgagtgctcagccaagaccaaggagggagtgcgggaggtgtttgagatggccactcgggctggcctccaggtccgcaagaacaagcgtcggaggggctgtcccattctctgagatccccaaggcctttcctacatgccccctcccttcacaggggtacagaaattatccccctacaaccccagcctcctgagggctccatgctgaaggctcccattttcagttccctcctgcccaggactgcattgttttctagccccgaggtggtggcacgggccctccctcccagcgctctgggagccacgcctatgccctgcccttcctcagggcccctggggatcttgccccctttgaccttccccaaaggatggtcacacaccagcactttatacacttctggctcacaggaaagtgtctgcagtaggggacccagagtcccaggcccctggagttgttttcggcaggggccttgtctctcactgcatttggtcaggggggcatgaataaaggctacaggctccaa

SEQ ID NO: 296269 - DNA, 1055 bp, Homo sapiens
tccttgtaatccaagcagtcggggggtcagtctgagcctccggcaccggccgcgcagctggaggcggcggagcggaagccttgacttcatctcagctccagagcccgccctctcttcctgcagcctgggaacttcagccggctggagccccaccatggctgcaatccgaaagaagctggtgatcgttggggatggtgcctgtgggaagacctgcctcctcatcgtcttcagcaaggatcagtttccggaggtctacgtccctactgtctttgagaactatattgcggacattgaggtggacggcaagcaggtggagctggctctgtgggacacagcagggcaggaagactatgatcgactgcggcctctctcctacccggacactgatgtcatcctcatgtgcttctccatcgacagccctgacagcctggaaaacattcctgagaagtggaccccagaggtgaagcacttctgccccaacgtgcccatcatcctggtggggaataagaaggacctgaggcaagacgagcacaccaggagagagctggccaagatgaagcaggagcccgttcggtctgaggaaggccgggacatggcgaaccggatcagtgcctttggctaccttgagtgctcagccattctctgagatccccaaggcctttcctacatgccccctcccttcacaggggtacagaaattatccccctacaaccccagcctcctgagggctccatgctgaaggctcccattttcagttccctcctgcccaggactgcattgttttctagccccgaggtggtggcacgggccctccctcccagcgctctgggagccacgcctatgccctgcccttcctcagggcccctggggatcttgccccctttgaccttccccaaaggatggtcacacaccagcactttatacacttctggctcacaggaaagtgtctgcagtaggggacccagagtcccaggcccctggagttgttttcggcaggggccttgtctctcactgcatttggtcaggggggcatgaataaaggctacaggctccaa

SEQ ID NO: 296270 - DNA, 984 bp, Homo sapiens
tccttgtaatccaagcagtcggggggtcagtctgagcctccggcaccggccgcgcagctggaggcggcggagcggaagccttgacttcatctcagctccagagcccgccctctcttcctgcagcctgggaacttcagccggctggagccccaccatggctgcaatccgaaagaagctggtgatcgttggggatggtgcctgtgggaagacctgcctcctcatcgtcttcagcaaggatcagtttccggaggtctacgtccctactgtctttgagaactatattgcggacattgaggtggacggcaagcaggtggagctggctctgtgggacacagcagggcaggaagactatgatcgactgcggcctctctcctacccggacactgatgtcatcctcatgtgcttctccatcgacagccctgacagcctggaaaacattcctgagaagtggaccccagaggtgaagcacttctgccccaacgtgcccatcatcctggtggggaataagaaggacctgaggcaagacgagcacaccaggagagagctggccaagatgaagcaggagcattctctgagatccccaaggcctttcctacatgccccctcccttcacaggggtacagaaattatccccctacaaccccagcctcctgagggctccatgctgaaggctcccattttcagttccctcctgcccaggactgcattgttttctagccccgaggtggtggcacgggccctccctcccagcgctctgggagccacgcctatgccctgcccttcctcagggcccctggggatcttgccccctttgaccttccccaaaggatggtcacacaccagcactttatacacttctggctcacaggaaagtgtctgcagtaggggacccagagtcccaggcccctggagttgttttcggcaggggccttgtctctcactgcatttggtcaggggggcatgaataaaggctacaggctccaa

SEQ ID NO: 296271 - DNA, 704 bp, Homo sapiens
tccttgtaatccaagcagtcggggggtcagtctgagcctccggcaccggccgcgcagctggaggcggcggagcggagggaacttcagccggctggagccccaccatggctgcaatccgaaagaagctggtgatcgttggggatggtgcctgtgggaagacctgcctcctcatcgtcttcagcaaggatcagtttccggaggtctacgtccctactgtctttgagaactatattgcggacattgaggtggacggcaagcaggtggagctggctctgtgggacacagcagggcaggaagactatgatcgactgcggcctctctcctacccggacactgatgtcatcctcatgtgcttctccatcgacagccctgacagcctggaaaacattcctgagaagtggaccccagaggtgaagcacttctgccccaacgtgcccatcatcctggtggggaataagaaggacctgaggcaagacgagcacaccaggagagagctggccaagatgaagcaggagcccgttcggtctgaggaaggccgggacatggcgaaccggatcagtgcctttggctaccttgagtgctcagccaagaccaaggagggagtgcgggaggtgtttgagatggccactcgggctggcctccaggtccgcaagaacaagcgtcggaggggctgtcccattctctgaggatccccaagtccttta

SEQ ID NO: 296272 - DNA, 907 bp, Homo sapiens
  misc_feature (702)..(702): n is a, c, g, or t
  misc_feature (831)..(831): n is a, c, g, or t
  misc_feature (865)..(865): n is a, c, g, or t
tccttgtaatccaagcagtcggggggtcagtctgagcctccggcaccggccgcgcagctggaggcggcggagcggagggaacttcagccggctggagccccaccatggctgcaatccgaaagaagctggtgatcgttggggatggtgcctgtgggaagacctgcctcctcatcgtcttcagcaaggatcagtttccggaggtctacgtccctactgtctttgagaactatattgcggacattgaggtggacggcaagcaggtggagctggctctgtgggacacagcagggcaggaagactatgatcgactgcggcctctctcctacccggacactgatgtcatcctcatgtgcttctccatcgacagccctgacagcctggaaaacattcctgagaagtggaccccagaggtgaagcacttctgccccaacgtgcccatcatcctggtggggaataagaaggacctgaggcaagacgagcacaccaggagagagctggccaagatgaagcaggagcccgttcggtctgaggaaggccgggacatggcgaaccggatcagtgcctttggctaccttgagtgctcagccaagaccaaggagggagtgcgggaggtgtttgagatggccactcgggctggcctccaggtccgcaagaacaagcgtcggaggggctgtcccattctgcagcgatgtcagggaacanaccagaggcagccatacttcatctattttcctcaaatcaagacagagaagtcaggtagcattggtgctgcagatagtcctgagaactgggagaaagtctgggacaactggaggctgctgacaatggccnggatctttgacttgctgggagcccccagaggganggagatgtcctgtatttcctattaccatcattacagtgggat

SEQ ID NO: 296273 - DNA, 744 bp, Homo sapiens
tccttgtaatccaagcagtcggggggtcagtctgagcctccggcaccggccgcgcagctggaggcggcggagcggagggaacttcagccggctggagccccaccatggctgcaatccgaaagaagctggtgatcgttggggatggtgcctgtgggaagacctgcctcctcatcgtcttcagcaaggatcagtttccggaggtctacgtccctactgtctttgagaactatattgcggacattgaggtggacggcaagcaggtggagctggctctgtgggacacagcagggcaggaagactatgatcgactgcggcctctctcctacccggacactgatgtcatcctcatgtgcttctccatcgacagccctgacagcctggaaaacattcctgagaagtggaccccagaggtgaagcacttctgccccaacgtgcccatcatcctggtggggaataagaaggacctgaggcaagacgagcacaccaggagagagctggccaagatgaagcaggagcccgttcggtctgaggaaggccgggacatggcgaaccggatcagtgcctttggctaccttgagtgctcagccaagaccaaggagggagtgcgggaggtgtttgagatggccactcgggctggcctccaggtccgcaagaacaagcgtcggaggggctgtcccgcagcccccgcaagacgtgggaaggagtgctgtctgcgcctgccctccgctgggcacagcgtggctg

SEQ ID NO: 296274 - DNA, 1479 bp, Homo sapiens
  misc_feature (1131)..(1131): n is a, c, g, or t
  misc_feature (1149)..(1149): n is a, c, g, or t
tccttgtaatccaagcagtcggggggtcagtctgagcctccggcaccggccgcgcagctggaggcggcggagcggaagccttgacttcatctcagctccagagcccgccctctcttcctgcagcctgggaacttcagccggctggagccccaccatggctgcaatccgaaagaagctggtgatcgttggggatggtgcctgtgggaagacctgcctcctcatcgtcttcagcaaggatcagtttccggaggtctacgtccctactgtctttgagaactatattgcggacattgaggtggacggcaagcaggtggagctggctctgtgggacacagcagggcaggaagactatgatcgactgcggcctctctcctacccggacactgatgtcatcctcatgtgcttctccatcgacagccctgacagcctggaaaacattcctgagaagtggaccccagaggtgaagcacttctgccccaacgtgcccatcatcctggtggggaataagaaggacctgaggcaagacgagcacaccaggagagagctggccaagatgaagcaggagcccgttcggtctgaggaaggccgggacatggcgaaccggatcagtgcctttggctaccttgagtgctcagccattctctgagatccccaaggcctttcctacatgccccctcccttcacaggggtacagaaattatccccctacaaccccagcctcctgagggctccatgctgaaggctcccattttcagttccctcctgcccaggactgcattgttttctagccccgaggtggtggcacgggccctccctcccagcgctctgggagccacgcctatgccctgcccttcctcagggcccctggggatcttgccccctttgaccttccccaaaggatggtcacacaccagcactttatacacttctggctcacaggaaagtgtctgcagtaggggacccagagtcccaggcccctggagttgttttcggcaggggccttgtctctcactgcatttggtcaggggggcatgaataaaggctacaggctccaacgtgaaaaaaaaaaaaaaaaaaaaaaaaaaaaaaaaaaaaaaaaaaaaaaaaaaaaaaaaaaaaaaaaaaaaaaanaaaaaaaaaaaaaaaacnaaaaaaaaaaaaaaaagaggggggggggcggaaaaaatccccgggggggggaaaatgagattacgggcacgccgcactagtcaagtagaacagggaggcgccccacacaaaggagggtgtaatataaaaaaaggacggcgggaccgccgcaaacaacagcacgggtgaggatagaaaaccactgctgtcgcgtcaagcttggacgacagcacacccatggtgtggggggaaccaggcagacaacccacacggaaagataggccgggcgaacacaacaacgaggcggaggaggaacaccacacttgctagaaaaggtcggtaaacatttcg

SEQ ID NO: 296275 - DNA, 653 bp, Homo sapiens
tccttgtaatccaagcagtcggggggtcagtctgagcctccggcaccggccgcgcagctggaggcggcggagcggagggaacttcagccggctggagccccaccatggctgcaatccgaaagaagctggtgatcgttggggatggtgcctgtgggaagacctgcctcctcatcgtcttcagcaaggatcagtttccggaggtctacgtccctactgtctttgagaactatattgcggacattgaggtggacggcaagcaggtggagctggctctgtgggacacagcagggcaggaagactatgatcgactgcggcctctctcctacccggacactgaaggctcccattttcagttccctcctgcccaggactgcattgttttctagccccgaggtggtggcacgggccctccctcccagcgctctgggagccacgcctatgccctgcccttcctcagggcccctggggatcttgccccctttgaccttccccaaaggatggtcacacaccagcactttatacacttctggctcacaggaaagtgtctgcagtaggggacccagagtcccaggcccctggagttgttttcggcaggggccttgtctctcactgcatttggtcaggggggcatgaataaaggctacaggctccaa

SEQ ID NO: 296276 - DNA, 1334 bp, Homo sapiens
  misc_feature (681)..(681): n is a, c, g, or t
  misc_feature (1056)..(1056): n is a, c, g, or t
  misc_feature (1167)..(1167): n is a, c, g, or t
  misc_feature (1236)..(1236): n is a, c, g, or t
  misc_feature (1267)..(1267): n is a, c, g, or t
  misc_feature (1271)..(1271): n is a, c, g, or t
  misc_feature (1301)..(1301): n is a, c, g, or t
  misc_feature (1304)..(1304): n is a, c, g, or t
tccttgtaatccaagcagtcggggggtcagtctgagcctccggcaccggccgcgcagctggaggcggcggagcggaagccttgacttcatctcagctccagagcccgccctctcttcctgcagcctgggaacttcagccggctggagccccaccatggctgcaatccgaaagaagctggtgatcgttggggatggtgcctgtgggaagacctgcctcctcatcgtcttcagcaaggatcagtttccggaggtctacgtccctactgtctttgagaactatattgcggacattgaggtggacggcaagcaggtggagctggctctgtgggacacagcagggcaggaagactatgatcgactgcggcctctctcctacccggacactgatgtcatcctcatgtgcttctccatcgacagccctgacagcctggaaaacattcctgagaagtggaccccagaggtgaagcacttctgccccaacgtgcccatcatcctggtggggaataagaaggacctgaggcaagacgagcacaccaggagagagctggccaagatgaagcaggagcccgttcggtctgaggaaggccgggacatggcgaaccggatcagtgcctttggctaccttgagtgctcagccaagaccaaagatggagagagagaggtttttgaaatggctacganagctgccctgcaagctagacgtgggaagaaaaaatctgggtgccttgtcttgtgaaaccttgctgcaagcacagcccttatgcggttaattttgaagtgctgtttattaatcttagtgtatgattactggcctttttcatttatctataatttacctaagattacaaatcagaagtcatcttgctaccagtatttagaagccaactatgattattaacgatgtccaacccgtctggcccaccagggtccttttgacactgctctaacagccctcctctgcactcccacctgacacaccaggcgctaattcaaggaatttcttaacttcttgcttctttctagaaagagaaacagttggtaacttttgtgaattangctgtaactactttataactaacatgtcctgcctattatctgtcagctgcaaggtactctggtgagtcaccacttcagggctttactccgtaacagattttgttggcatanctctggggtgggcagttttttgaaaatgggctcaaccagaaaaacccaagttcatgccagctgtggcanaattacagttctgttgggtttccatgtttanttanccttaataatttactgtgttaattaagtgnccncttaatgttttgtttacccaaaaataaatt

SEQ ID NO: 296277 - DNA, 682 bp, Homo sapiens
tccttgtaatccaagcagtcggggggtcagtctgagcctccggcaccggccgcgcagctggaggcggcggagcggaagccttgacttcatctcagctccagagcccgccctctcttcctgcagcctgggaacttcagccggctggagccccaccatggctgcaatccgaaagaagctggtgatcgttggggatggtgcctgtgggaagacctgcctcctcatcgtcttcagcaaggatcagtttccggaggtctacgtccctactgtctttgagaactatattgcggacattgaggtggacggcaagcaggtggagctggctctgtgggacacagcagggcaggaagactatgatcgactgcggcctctctcctacccggacactgatgtcatcctcatgtgcttctccatcgacagccctgacagcctggaaaacattcctgagaagtggaccccagaggtgaagcacttctgccccaacgtgcccatcatcctggtggggaataagaaggacctgaggcaagacgagcacaccaggagagagctggccaagatgaagcaggagcgcaggagaattgcttgagcccaggaggcggaggttgcagtgagctgagatcacaccaccgcactccagcctgggcgacagagcaagactccatctcaaaacaaaaacaaaaaacaa

SEQ ID NO: 296278 - DNA, 457 bp, Homo sapiens
tccttgtaatccaagcagtcggggggtcagtctgagcctccggcaccggccgcgcagctggaggcggcggagcggagggaacttcagccggctggagccccaccatggctgcaatccgaaagaagctggtgatcgttggggatggtgcctgtgggaagacctgcctcctcatcgtcttcagcaaggatcagtttccggaggtctacgtccctactgtctttgagaactatattgcggacattgaggtggacggcaagcaggtggagctggctctgtgggacacagcagggcaggaagactatgatcgactgcggcctctctcctacccggacactgatgtcatcctcatgtgcttctccatcgacagccctgacagcctggaaaacattcctgagaagtggaccccagaggtgaagcacttctgccccaacgtgccggtaccgagctcgatttacca

SEQ ID NO: 296279 - DNA, 826 bp, Homo sapiens
  misc_feature (623)..(623): n is a, c, g, or t
  misc_feature (632)..(632): n is a, c, g, or t
  misc_feature (663)..(663): n is a, c, g, or t
  misc_feature (711)..(711): n is a, c, g, or t
tccttgtaatccaagcagtcggggggtcagtctgagcctccggcaccggccgcgcagctggaggcggcggagcggaagggcaaggtgaactaatggagtgggtggaggagttggaagaaatcccagcgtcagtcaccgggatagaattcccaaggaaccctctttttggaggatggtttccatttctggaggcgatctgccgacaggagccttgacttcatctcagctccagagcccgccctctcttcctgcagcctgggaacttcagccggctggagccccaccatggctgcaatccgaaagaagctggtgatcgttggggatggtgcctgtgggaagacctgcctcctcatcgtcttcagcaaggatcagtttccggaggtctacgtccctactgtctttgagaactatattgcggacattgaggtggacggcaagcaggtggagctggctctgtgggacacagcagggcaggaagactatgatcgactgcggcctctctcctacccggacactgatgtcatcctcatgtgcttctccatcgacagccctgacagcctggaaaacattcctgagaagtggaccccagaggtgaagcacttctgccccaacgtgcccatatnctggtgggnataagaggacctgaggcagaacagcacacangagagagctggccacatgagcacgagcccgttcgtctgaggaggccgnacatagggaaccgatcagagctttggtacctgagtgtcagccacaccacgaggagtgcgggagtgtttaatggcactcggctgcctcagtcgcagaccgtggagggtgtctcttt

SEQ ID NO: 296280 - DNA, 460 bp, Homo sapiens
tccttgtaatccaagcagtcggggggtcagtctgagcctccggcaccggccgcgcagctggaggcggcggagcggaagccttgacttcatctcagctccagagcccgccctctcttcctgcagcctgggaacttcagccggctgggccccaccatggctgcaatccgaaagaagctggtgatcgttggggatggtgcctgtgggaagacctgcctcctcatcgtcttcagcaaggatcagtttccggaggtctacgtccctactgtctttgagaactatattgcggacattgaggtggacggcaagcaggtgaaggcagaaatgcccttcccaccccaccctgagaccccgccccccagtcactgaatgacctagtatgtccttccccattcctacccctgtctttgcttcattctccctgctggaaccagtaaaagttaggaagtaaatctgcagtctt

SEQ ID NO: 296281 - DNA, 1748 bp, Homo sapiens
cccgggacatgaggaaaggaacaagggaaagagccggtgaaggggcagaacaggcaggttccctcgacccaggaccccctgttcccaggctatggcccccagtgccctgtagacctggcaggccccccgtgcttgcgacccctatttgggggtctgggtggctactggagggccttgcagaggggcagagaaggcaggaccatgacatctagggcctctgaactttctccggggcgcagcgtgacggctggcatcatcattgttggagatgagatccttaagggacacactcaggacaccaacaccttctttctgtgccggacactgcgctccctaggggtccaggtttgccgagtctcagttgtacctgatgaggtagccaccattgcagctgaggtcacttctttctccaaccgcttcacccatgtcctcacagcagggggcatcggccccactcatgatgatgtgacctttgaggcagtggcacaggcctttggagatgagctgaagccacaccccaagttggaagcagccaccaaagccctaggaggggaaggctgggagaagctatcattggtgccctcctctgcccgcctgcattatggcacagatccttgcactggtcaacctttcagattccctctggtctccgtccgaaacgtctacctcttcccaggcattccagagctgctgcggcgggtgctggaggggatgaagggactattccaaaacccagctgttcagttccactcaaaggagctatatgtggctgctgatgaagcctccatcgcccccattctggctgaggcccaggcccactttggacgtaggcttggcctgggttcctaccctgactggggcagcaactactatcaggtgaagctgactctagactcagaggaagaaggacccctggaggaatgcttggcctacctgactgcccgtttgccccagggatcgctggtcccctacatgcccaacgctgtggagcaggccagtgaggctgtatacaaactcgctgaatcagggtcttctttggggaaaaaggtggcaggtgccctacagaccattgagacctccctggctcagtacagcctcacccagctctgtgtgggcttcaacgggggcaaagactgcactgccctcctgcacctcttccatgcagctgtgcagaggaaattacctgatgttccaaaccccctccagatcctgtatatccgcagcatctcccctttccctgagctggaacagtttctacaggacactatcaagaggtataatctgcagatgttggaagctgagggcagcatgaagcaggccctgggtgaactgcaggcacggcacccccagctggaggctgtccttatgggcacccgccggactgacccctactcctgtagcctctgccctttcagccccactgacccaggctggcccgcattcatgcgcatcaacccactgctggactggacctacagagacatctgggattttctgcgtcagctgtttgtcccatactgtatcctgtatgaccgaggatacacatcactggggagtcgggagaataccgtgcggaacccggccctgaagtgcctgagcccaggaggacaccccacataccgtccagcctatctactggagaacgaagaagaggagcggaactcccgcacatgacctcccaccctaggagggagggaaggacaccgtcctagggtataacctggcaataaaccgtgcctctcactgtg

SEQ ID NO: 296282 - DNA, 1830 bp, Homo sapiens
cccgggacatgaggaaaggaacaagggaaagagccggtgaaggggcagaacaggcaggttccctcgacccaggaccccctgttcccaggctatggcccccagtgccctgtagacctggcaggccccccgtgcttgcgacccctatttgggggtctgggtggctactggagggccttgcagaggggcagagaaggcaggaccatgacatctagggcctctgaactttctccggggcgcagcgtgacggctggcatcatcattgttggagatgagatccttaaggttggaaacaacaaatggcttttgagtccaagagtgatgcaatcacagtgacgcattaaaacggttactccggagacatcagagcactgtggctggaggctgggagcctggccaggaagctgtcgccattgtccaggtgaaaggtgctaaggacctgcttggtggcagtggggacagaaagaagaaagcaggccaggcgtggtggctcacacctataattccagcactttgggaggctgaggcaggaggatcacttgagaccaggaattcaacaccagcctgggcaacatggcaagaccccatttctacaaaaaaaatttaaaatgagctgaatgtggtggcacgcgcctgtagtcccagctactcggaaggctggggtggcccttgaagccaggaggttgaggctgcagtgaactgtgactgagccactatactccagcctgggtgacagagacccagctttaaaaccaaacaaatggattttcccactcttgtgtccagtccaggcccctcagcagcctgaggtggtgtccttcaaagagcagagcactgcatcatcaggtggatgcagccatcatcttcaacccctccccttcatccctacagtactgatggcctcatcttccccttcaacccccagggacacactcaggacaccaacaccttctttctgtgccggacactgcgctccctaggggtccaggtttgccgagtctcagttgtacctgatgaggtagccaccattgcagctgaggtcacttctttctccaaccgcttcacccatgtcctcacagcagggggcatcggccccactcatgatgatgtgacctttgaggcagtggcacaggcctttggagatgagctgaagccacaccccaagttggaagcagccaccaaagccctaggaggggaaggctgggagaagctatcattggtgccctcctctgcccgcctgcattatggcacagatccttgcactggtcaacctttcagattccctctggtctccgtccgaaacgtctacctcttcccaggcattccagagctgctgcggcgggtgctggaggggatgaagggactattccaaaacccagctgttcagttccactcaaaggagctatatgtggctgctgatgaagcctccatcgcccccattctggctgaggcccaggcccactttggacgtaggcttggcctgggttcctaccctgactggggcagcaactactatcaggtgaagctgactctagactcagaggaagaaggacccctggaggaatgcttggcctacctgactgcccgtttgccccagggatcgctggtcccctacatgcccaacgctgtggagcaggccagtgaggctgtatacaaactcgctgaatcaggtagggaccttatggaggaggggcattatgcccaaagccattggtggcaccccagatctcagtaatgcaggggctgttgggtgcttcctgcaaatccctgagagggcagaagatagcttctgttaattcattattcttccaataaatgttgattgagtaccta

SEQ ID NO: 296283 - DNA, 1857 bp, Homo sapiens
agctggtacggtccgagttctttaggatcggtgaaggggcagaacaggcaggttccctcgacccaggaccccctgttcccaggctatggcccccagtgccctgtagacctggcaggccccccgtgcttgcgacccctatttgggggtctgggtggctactggagggccttgcagaggggcagagaaggcaggaccatgacatctagggcctctgaactttctccggggcgcagcgtgacggctggcatcatcattgttggagatgagatccttaagggacacactcaggacaccaacaccttctttctgtgccggacactgcgctccctaggggtccaggtttgccgagtctcagttgtacctgatgaggtagccaccattgcagctgaggtcacttctttctccaaccgcttcacccatgtcctcacagcagggggcatcggccccactcatgatgatgtgacctttgaggcagtggcacaggcctttggagatgagctgaagccacaccccaagttggaagcagccaccaaagccctaggaggggaaggctgggagaagctatcattggtgccctcctctgcccgcctgcattatggcacagatccttgcactggtcaacctttcagattccctctggtctccgtccgaaacgtctacctcttcccaggcattccagagctgctgcggcgggtgctggaggggatgaagggactattccaaaacccagctgttcagttccactcaaaggagctatatgtggctgctgatgaagcctccatcgcccccattctggctgaggcccaggcccactttggacgtaggcttggcctgggttcctaccctgactggggcagcaactactatcaggtgaagctgactctagactcagaggaagaaggacccctggaggaatgcttggcctacctgactgcccgtttgccccagggatcgctggtcccctacatgcccaacgctgtggagcaggccagtgaggctgtatacaaactcgctgaatcagggtcttctttggggaaaaaggtggcaggtgccctacagaccattgagacctccctggctcagtacagcctcacccagctctgtgtgggcttcaacgggggcaaagactgcactgccctcctgcacctcttccatgcagctgtgcagaggaaattacctgatgttccaaaccccctccagatcctgtatatccgcagcatctcccctttccctgagctggaacagtttctacaggacactatcaagaggtataatctgcagatgttggaagctgagggcagcatgaagcaggccctgggtgaactgcaggcacggcacccccagctggaggctgtccttatgggcacccgccggactgacccctactcctgtagcctctgccctttcagccccactgacccaggctggcccgcattcatgcgcatcaacccactgctggactggacctacagagacatctgggattttctgcgtcagctgtttgtcccatactgtatcctgtatgaccgagggtaagggtattaggggaagggaatgggtaagggagtttttagggtgctgggatagggagggccaataggatcgcccaccctaccacatgcttgccctccaccctccctgctccagatacacatcactggggagtcgggagaataccgtgcggaacccggccctgaagtgcctgagcccaggaggacaccccacataccgtccagcctatctactggagaacgaagaagaggagcggaactcccgcacatgacctcccaccctaggagggagggaaggacaccgtcctagggtataacctggcaataaaccgtgcctctcactgtg

SEQ ID NO: 296284 - DNA, 616 bp, Homo sapiens
ctctagaggattactggggcaattctggactgaggcacttcagtgccgggttccgacgttattctcccgactccccagtgatgtgtatcctcggtcatacaggatacagtatgggacaaacagttgacgcagaagatcccaggtataatctgcagatgttggaagctgagggcagcatgaagcaggccctgggtgaactgcaggcacggcacccccagctggaggctgtccttatgggcacccgccggactgacccctactcctgtagcctctgccctttcagccccactgacccaggctggcccgcattcatgcgcatcaacccactgctggactggacctacagagacatctgggattttctgcgtcagctgtttgtcccatactgtatcctgtatgaccgaggatacacatcactggggagtcgggagaataccgtgcggaacccggccctgaagtgcctgagcccaggaggacaccccacataccgtccagcctatctactggagaacgaagaagaggagcggaactcccgcacatgacctcccaccctaggagggagggaaggacaccgtcctagggtataacctggcaataaaccgtgcctctcactgtg

SEQ ID NO: 296285 - DNA, 2223 bp, Homo sapiens
  misc_feature (1966)..(1966): n is a, c, g, or t
cccgggacatgaggaaaggaacaagggaaagagccggtgaaggggcagaacaggcaggttccctcgacccaggaccccctgttcccaggctatggcccccagtgccctgtagacctggcaggccccccgtgcttgcgacccctatttgggggtctgggtggctactggagggccttgcagaggggcagagaaggcaggaccatgacatctagggcctctgaactttctccggggcgcagcgtgacggctggcatcatcattgttggagatgagatccttaagggacacactcaggacaccaacaccttctttctgtgccggacactgcgctccctaggggtccaggtttgccgagtctcagttgtacctgatgaggtagccaccattgcagctgaggtcacttctttctccaaccgcttcacccatgtcctcacagcagggggcatcggccccactcatgatgatgtgacctttgaggcagtggcacaggcctttggagatgagctgaagccacaccccaagttggaagcagccaccaaagccctaggaggggaaggctgggagaagctatcattggtgccctcctctgcccgcctgcattatggcacagatccttgcactggtcaacctttcagattccctctggtctccgtccgaaacgtctacctcttcccaggcattccagagctgctgcggcgggtgctggaggggatgaagggactattccaaaacccagctgttcagttccactcaaaggagctatatgtggctgctgatgaagcctccatcgcccccattctggctgaggcccaggcccactttggacgtaggcttggcctgggttcctaccctgactggggcagcaactactatcaggtgaagctgactctagactcagaggaagaaggacccctggaggaatgcttggcctacctgactgcccgtttgccccagggatcgctggtcccctacatgcccaacgctgtggagcaggccagtgaggctgtatacaaactcgctgaatcagggtcttctttggggaaaaaggtggcaggtgccctacagaccattgagacctccctggctcagtacagcctcacccagctctgtgtgggcttcaacgggggcaaagactgcactgccctcctgcacctcttccatgcagctgtgcagaggaaattacctgatgttccaaaccccctccagatcctgtatatccgcagcatctcccctttccctgagctggaacagtttctacaggacactatcaagaggtataatctgcagatgttggaagctgagggcagcatgaagcaggccctgggtgaactgcaggcacggcacccccagctggaggctgtccttatgggcacccgccggactgacccctactcctgtagcctctgccctttcagccccactgacccaggctggcccgcattcatgcgcatcaacccactgctggactggacctacagagacatctgggattttctgcgtcagctgtttgtcccatactgtatcctgtatgaccgaggatacacatcactggggagtcgggagaataccgtgcggaacccggccctgaagtgcctgagcccaggaggacaccccacataccgtccagcctatctactggagaacgaagaagaggagcggaactcccgcacatgacctcccaccctaggagggagggaaggacaccgtcctagggtataacctggcaataaaccgtgcctctcactgtgaaaaaaaaaataaaagaagataaaacaaaaaaaaaaaataaaaaaaagaaaaaaaaaaaagaaaaaaaaataaaaagaaaaagaaaaaaaaaaaaaaactggtgggccgcttgggccaatgcgattttagactggggcaggtttttgaatgcggccgaatttggggctaattgggccaattcgcctttaggggggccgtttaaaattcaatggcccgnggtttaaaaaggacggaacgggaaaacccttggggttcccaactttaatcgcctggtggaaaatccccttttcgccagttggggaaaataccaaaagggcccgacccgttggcctttccaaaaaggtggccaacctttaagggtaattggaaatggaaggcgttaaatttttggtaaaaattgcgggtaaattttttggtaaacaaagctcatttttaaaccaaagggccgaaaatgcggaaaatacccttataaat

SEQ ID NO: 296286 - DNA, 2192 bp, Homo sapiens
cccgggacatgaggaaaggaacaagggaaagagccggtgaaggggcagaacaggcaggtgagagtctaagagggctcagtaatctgaagcttggtgggaagaagggattctgggctagaaagggtgcagaagcctgaagtagaaagagacgggattttggtccggggtggagagcgaatgcattgaaaagggccaaggcccaggataaggtagacatttaaaggggtacggatgcccaaggtagagcagacacttgaggagaccagctcagcaaacggaagacacttaaagtggtaggttctcaagagagaagaagtttttaagactagagctaagcaagacatttaaaaggacatgggttgggatttgggaacacgtttattccagaggcaggaacaaaggagtcgcttgtcaaggatctggttagagaagactagggtcttcctcgaaggaagcacgcgcacgcctgctctcccccattgtcttttctggcttctccaggttccctcgacccaggaccccctgttcccaggctatggcccccagtgccctgtagacctggcaggccccccgtgcttgcgacccctatttgggggtctgggtggctactggagggccttgcagaggggcagagaaggcaggaccatgacatctagggcctctgaactttctccggggcgcagcgtgacggctggcatcatcattgttggagatgagatccttaagggacacactcaggacaccaacaccttctttctgtgccggacactgcgctccctaggggtccaggtttgccgagtctcagttgtacctgatgaggtagccaccattgcagctgaggtcacttctttctccaaccgcttcacccatgtcctcacagcagggggcatcggccccactcatgatgatgtgacctttgaggcagtggcacaggcctttggagatgagctgaagccacaccccaagttggaagcagccaccaaagccctaggaggggaaggctgggagaagctatcattggtgccctcctctgcccgcctgcattatggcacagatccttgcactggtcaacctttcagattccctctggtctccgtccgaaacgtctacctcttcccaggcattccagagctgctgcggcgggtgctggaggggatgaagggactattccaaaacccagctgttcagttccactcaaaggagctatatgtggctgctgatgaagcctccatcgcccccattctggctgaggcccaggcccactttggacgtaggcttggcctgggttcctaccctgactggggcagcaactactatcaggtgaagctgactctagactcagaggaagaaggacccctggaggaatgcttggcctacctgactgcccgtttgccccagggatcgctggtcccctacatgcccaacgctgtggagcaggccagtgaggctgtatacaaactcgctgaatcagggtcttctttggggaaaaaggtggcaggtgccctacagaccattgagacctccctggctcagtacagcctcacccagctctgtgtgggcttcaacgggggcaaagactgcactgccctcctgcacctcttccatgcagctgtgcagaggaaattacctgatgttccaaaccccctccagatcctgtatatccgcagcatctcccctttccctgagctggaacagtttctacaggacactatcaagaggtataatctgcagatgttggaagctgagggcagcatgaagcaggccctgggtgaactgcaggcacggcacccccagctggaggctgtccttatgggcacccgccggactgacccctactcctgtagcctctgccctttcagccccactgacccaggctggcccgcattcatgcgcatcaacccactgctggactggacctacagagacatctgggattttctgcgtcagctgtttgtcccatactgtatcctgtatgaccgaggatacacatcactggggagtcgggagaataccgtgcggaacccggccctgaagtgcctgagcccaggaggacaccccacataccgtccagcctatctactggagaacgaagaagaggagcggaactcccgcacatgacctcccaccctaggagggagggaaggacaccgtcctagggtataacctggcaataaaccgtgcctctcactgtg

SEQ ID NO: 296287 - DNA, 2041 bp, Homo sapiens
cccgggacatgaggaaaggaacaagggaaagagccggtgaaggggcagaacaggcaggttccctcgacccaggaccccctgttcccaggctatggcccccagtgccctgtagacctggcaggccccccgtgcttgcgacccctatttgggggtctgggtggctactggagggccttgcagaggggcagagaaggcaggaccatgacatctagggcctctgaactttctccggggcgcagcgtgacggctggcatcatcattgttggagatgagatccttaagggacacactcaggacaccaacaccttctttctgtgccggacactgcgctccctaggggtccaggtttgccgagtctcagttgtacctgatgaggtagccaccattgcagctgaggtcacttctttctccaaccgcttcacccatgtcctcacagcagggggcatcggccccactcatgatgatgtgacctttgaggcagtggcacaggcctttggagatgagctgaagccacaccccaagttggaagcagccaccaaagccctaggaggggaaggctgggagaagctatcattggtgccctcctctgcccgcctgcattatggcacagatccttgcactggtcaacctttcagattccctctggtctccgtccgaaacgtctacctcttcccaggcattccagagctgctgcggcgggtgctggaggggatgaagggactattccaaaacccagctgttcagttccactcaaaggagctatatgtggctgctgatgaagcctccatcgcccccattctggctgaggcccaggcccactttggacgtaggcttggcctgggttcctaccctgactggggcagcaactactatcaggtgaagctgactctagactcagaggaagaaggacccctggaggaatgcttggcctacctgactgcccgtttgccccagggatcgctggtcccctacatgcccaacgctgtggagcaggccagtgaggctgtatacaaactcgctgaatcagggtcttctttggggaaaaaggtggcaggtgccctacagaccattgagacctccctggctcagtacagcctcacccagctctgtgtgggcttcaacgggggcaaagactgcactgccctcctgcacctcttccatgcagctgtgcagaggaaattacctgatgttccaaaccccctccagatcctgtatatccgcagcatctcccctttccctgagctggaacagtttctacaggacactatcaagaggtataatctgcagatgttggaagctgagggcagcatgaagcaggccctgggtgaactgcaggcacggcacccccagctggaggctgtccttatgggcacccgccggactgacccctactcctgtagcctctgccctttcagccccactgacccaggctggcccgcattcatgcgcatcaacccactgctggactggacctacagagacatctgggattttctgcgtcagctgtttgtcccatactgtatcctgtatgaccgaggatacacatcactggggagtcgggagaataccgtgcggaacccggccctgaagtgcctgagcccaggaggacaccccacataccgtccagcctatctactggagaacgaagaagaggagcggaactcccgcacatgacctcccaccctaggagggagggaaggacaccgtcctagggtataacctggcaataaaccgtgcctctcactgtgaaagaccacgatcagcaacccaaccaccagcaccccaccaacaccatacagaccgggacggcgccgacaaaaataccacggcaggggccacatagcacgcccccccagttgtctgcaaaagcacacccactaagaagccagttaagacgacgcacggcccggacaaacaaggaacgggaaacacgagctaggatgatggaaagccacattcgggggaaatggcacaccaaagtcagcccgggaacatccgtgatgcggaacccaccgcgcaagccgtaatataaagacacaag

SEQ ID NO: 296288 - DNA, 1831 bp, Homo sapiens
cccgggacatgaggaaaggaacaagggaaagagccggtgaaggggcagaacaggcaggttccctcgacccaggaccccctgttcccaggctatggcccccagtgccctgtagacctggcaggccccccgtgcttgcgacccctatttgggggtctgggtggctactggagggccttgcagaggggcagagaaggcaggaccatgacatctagggcctctgaactttctccggggcgcagcgtgacggctggcatcatcattgttggagatgagatccttaagggacacactcaggacaccaacaccttctttctgtgccggacactgcgctccctaggggtccaggtttgccgagtctcagttgtacctgatgaggtagccaccattgcagctgaggtcacttctttctccaaccgcttcacccatgtcctcacagcagggggcatcggccccactcatgatgatgtgacctttgaggcagtggcacaggcctttggagatgagctgaagccacaccccaagttggaagcagccaccaaagccctaggaggggaaggctgggagaagctatcattggtgccctcctctgcccgcctgcattatggcacagatccttgcactggtcaacctttcagattccctctggtctccgtccgaaacgtctacctcttcccaggcattccagagctgctgcggcgggtgctggaggggatgaagggactattccaaaacccagctgttcagttccactcaaaggagctatatgtggctgctgatgaagcctccatcgcccccattctggctgaggcccaggcccactttggacgtaggcttggcctgggttcctaccctgactggggcagcaactactatcaggtgaagctgactctagactcagaggaagaaggacccctggaggaatgcttggcctacctgactgcccgtttgccccagggatcgctggtcccctacatgcccaacgctgtggagcaggccagtgaggctgtatacaaactcgctgaatcagggtcttctttggggaaaaaggtggcaggtgccctacagaccattgagacctccctggctcagtacagcctcacccagctctgtgtgggcttcaacgggggcaaagactgcactgccctcctgcacctcttccatgcagctgtgcagaggaaattacctgatgttccaaaccccctccagatcctgtatatccgcagcatctcccctttccctgagctggaacagtttctacaggacactatcaagaggtactaggggcctggaggtttgggctccaagagaagcttgacagagcccacgcccgacccctacttctgtttcttcctaaggtgtataatctgcagatgttggaagctgagggcagcatgaagcaggccctgggtgaactgcaggcacggcacccccagctggaggctgtccttatgggcacccgccggactgacccctactcctgtagcctctgccctttcagccccactgacccaggctggcccgcattcatgcgcatcaacccactgctggactggacctacagagacatctgggattttctgcgtcagctgtttgtcccatactgtatcctgtatgaccgaggatacacatcactggggagtcgggagaataccgtgcggaacccggccctgaagtgcctgagcccaggaggacaccccacataccgtccagcctatctactggagaacgaagaagaggagcggaactcccgcacatgacctcccaccctaggagggagggaaggacaccgtcctagggtataacctggcaataaaccgtgcctctcactgtg

SEQ ID NO: 296289 - DNA, 1984 bp, Homo sapiens
cccgggacatgaggaaaggaacaagggaaagagccggtgaaggggcagaacaggcaggtgagagtctaagagggctcagtaatctgaagcttggtgggaagaagggattctgggctagaaagggtgcagaagcctgaagtagaaagagacgggattttggtccggggtggagagcgaatgcattgaaaagggccaaggcccaggataaggtagacatttaaaggggtacggatgcccaaggtagagcagacacttgaggagaccagctcagcaaacggaagacacttaaagtggttccctcgacccaggaccccctgttcccaggctatggcccccagtgccctgtagacctggcaggccccccgtgcttgcgacccctatttgggggtctgggtggctactggagggccttgcagaggggcagagaaggcaggaccatgacatctagggcctctgaactttctccggggcgcagcgtgacggctggcatcatcattgttggagatgagatccttaagggacacactcaggacaccaacaccttctttctgtgccggacactgcgctccctaggggtccaggtttgccgagtctcagttgtacctgatgaggtagccaccattgcagctgaggtcacttctttctccaaccgcttcacccatgtcctcacagcagggggcatcggccccactcatgatgatgtgacctttgaggcagtggcacaggcctttggagatgagctgaagccacaccccaagttggaagcagccaccaaagccctaggaggggaaggctgggagaagctatcattggtgccctcctctgcccgcctgcattatggcacagatccttgcactggtcaacctttcagattccctctggtctccgtccgaaacgtctacctcttcccaggcattccagagctgctgcggcgggtgctggaggggatgaagggactattccaaaacccagctgttcagttccactcaaaggagctatatgtggctgctgatgaagcctccatcgcccccattctggctgaggcccaggcccactttggacgtaggcttggcctgggttcctaccctgactggggcagcaactactatcaggtgaagctgactctagactcagaggaagaaggacccctggaggaatgcttggcctacctgactgcccgtttgccccagggatcgctggtcccctacatgcccaacgctgtggagcaggccagtgaggctgtatacaaactcgctgaatcagggtcttctttggggaaaaaggtggcaggtgccctacagaccattgagacctccctggctcagtacagcctcacccagctctgtgtgggcttcaacgggggcaaagactgcactgccctcctgcacctcttccatgcagctgtgcagaggaaattacctgatgttccaaaccccctccagatcctgtatatccgcagcatctcccctttccctgagctggaacagtttctacaggacactatcaagaggtataatctgcagatgttggaagctgagggcagcatgaagcaggccctgggtgaactgcaggcacggcacccccagctggaggctgtccttatgggcacccgccggactgacccctactcctgtagcctctgccctttcagccccactgacccaggctggcccgcattcatgcgcatcaacccactgctggactggacctacagagacatctgggattttctgcgtcagctgtttgtcccatactgtatcctgtatgaccgaggatacacatcactggggagtcgggagaataccgtgcggaacccggccctgaagtgcctgagcccaggaggacaccccacataccgtccagcctatctactggagaacgaagaagaggagcggaactcccgcacatgacctcccaccctaggagggagggaaggacaccgtcctagggtataacctggcaataaaccgtgcctctcactgtg

SEQ ID NO: 296290 - DNA, 2388 bp, Homo sapiens
cccgggacatgaggaaaggaacaagggaaagagccggtgaaggggcagaacaggcaggttccctcgacccaggaccccctgttcccaggctatggcccccagtgccctgtagacctggcaggccccccgtgcttgcgacccctatttgggggtctgggtggctactggagggccttgcagaggggcagagaaggcaggaccatgacatctagggcctctgaactttctccggggcgcagcgtgacggctggcatcatcattgttggagatgagatccttaaggttggaaacaacaaatggcttttgagtccaagagtgatgcaatcacagtgacgcattaaaacggttactccggagacatcagagcactgtggctggaggctgggagcctggccaggaagctgtcgccattgtccaggtgaaaggtgctaaggacctgcttggtggcagtggggacagaaagaagaaagcaggccaggcgtggtggctcacacctataattccagcactttgggaggctgaggcaggaggatcacttgagaccaggaattcaacaccagcctgggcaacatggcaagaccccatttctacaaaaaaaatttaaaatgagctgaatgtggtggcacgcgcctgtagtcccagctactcggaaggctggggtggcccttgaagccaggaggttgaggctgcagtgaactgtgactgagccactatactccagcctgggtgacagagacccagctttaaaaccaaacaaatggattttcccactcttgtgtccagtccaggcccctcagcagcctgaggtggtgtccttcaaagagcagagcactgcatcatcaggtggatgcagccatcatcttcaacccctccccttcatccctacagtactgatggcctcatcttccccttcaacccccagggacacactcaggacaccaacaccttctttctgtgccggacactgcgctccctaggggtccaggtttgccgagtctcagttgtacctgatgaggtagccaccattgcagctgaggtcacttctttctccaaccgcttcacccatgtcctcacagcagggggcatcggccccactcatgatgatgtgacctttgaggcagtggcacaggcctttggagatgagctgaagccacaccccaagttggaagcagccaccaaagccctaggaggggaaggctgggagaagctatcattggtgccctcctctgcccgcctgcattatggcacagatccttgcactggtcaacctttcagattccctctggtctccgtccgaaacgtctacctcttcccaggcattccagagctgctgcggcgggtgctggaggggatgaagggactattccaaaacccagctgttcagttccactcaaaggagctatatgtggctgctgatgaagcctccatcgcccccattctggctgaggcccaggcccactttggacgtaggcttggcctgggttcctaccctgactggggcagcaactactatcaggtgaagctgactctagactcagaggaagaaggacccctggaggaatgcttggcctacctgactgcccgtttgccccagggatcgctggtcccctacatgcccaacgctgtggagcaggccagtgaggctgtatacaaactcgctgaatcagggtcttctttggggaaaaaggtggcaggtgccctacagaccattgagacctccctggctcagtacagcctcacccagctctgtgtgggcttcaacgggggcaaagactgcactgccctcctgcacctcttccatgcagctgtgcagaggaaattacctgatgttccaaaccccctccagatcctgtatatccgcagcatctcccctttccctgagctggaacagtttctacaggacactatcaagaggtataatctgcagatgttggaagctgagggcagcatgaagcaggccctgggtgaactgcaggcacggcacccccagctggaggctgtccttatgggcacccgccggactgacccctactcctgtagcctctgccctttcagccccactgacccaggctggcccgcattcatgcgcatcaacccactgctggactggacctacagagacatctgggattttctgcgtcagctgtttgtcccatactgtatcctgtatgaccgaggatacacatcactggggagtcgggagaataccgtgcggaacccggccctgaagtgcctgagcccaggaggacaccccacataccgtccagcctatctactggagaacgaagaagaggagcggaactcccgcacatgacctcccaccctaggagggagggaaggacaccgtcctagggtataacctggcaataaaccgtgcctctcactgtg

SEQ ID NO: 296291 - DNA, 1742 bp, Homo sapiens
agctggtacggtccgagttctttaggatcggtgaaggggcagaacaggcaggttccctcgacccaggaccccctgttcccaggctatggcccccagtgccctgtagacctggcaggccccccgtgcttgcgacccctatttgggggtctgggtggctactggagggccttgcagaggggcagagaaggcaggaccatgacatctagggcctctgaactttctccggggcgcagcgtgacggctggcatcatcattgttggagatgagatccttaagggacacactcaggacaccaacaccttctttctgtgccggacactgcgctccctaggggtccaggtttgccgagtctcagttgtacctgatgaggtagccaccattgcagctgaggtcacttctttctccaaccgcttcacccatgtcctcacagcagggggcatcggccccactcatgatgatgtgacctttgaggcagtggcacaggcctttggagatgagctgaagccacaccccaagttggaagcagccaccaaagccctaggaggggaaggctgggagaagctatcattggtgccctcctctgcccgcctgcattatggcacagatccttgcactggtcaacctttcagattccctctggtctccgtccgaaacgtctacctcttcccaggcattccagagctgctgcggcgggtgctggaggggatgaagggactattccaaaacccagctgttcagttccactcaaaggagctatatgtggctgctgatgaagcctccatcgcccccattctggctgaggcccaggcccactttggacgtaggcttggcctgggttcctaccctgactggggcagcaactactatcaggtgaagctgactctagactcagaggaagaaggacccctggaggaatgcttggcctacctgactgcccgtttgccccagggatcgctggtcccctacatgcccaacgctgtggagcaggccagtgaggctgtatacaaactcgctgaatcagggtcttctttggggaaaaaggtggcaggtgccctacagaccattgagacctccctggctcagtacagcctcacccagctctgtgtgggcttcaacgggggcaaagactgcactgccctcctgcacctcttccatgcagctgtgcagaggaaattacctgatgttccaaaccccctccagatcctgtatatccgcagcatctcccctttccctgagctggaacagtttctacaggacactatcaagaggtataatctgcagatgttggaagctgagggcagcatgaagcaggccctgggtgaactgcaggcacggcacccccagctggaggctgtccttatgggcacccgccggactgacccctactcctgtagcctctgccctttcagccccactgacccaggctggcccgcattcatgcgcatcaacccactgctggactggacctacagagacatctgggattttctgcgtcagctgtttgtcccatactgtatcctgtatgaccgaggatacacatcactggggagtcgggagaataccgtgcggaacccggccctgaagtgcctgagcccaggaggacaccccacataccgtccagcctatctactggagaacgaagaagaggagcggaactcccgcacatgacctcccaccctaggagggagggaaggacaccgtcctagggtataacctggcaataaaccgtgcctctcactgtg

SEQ ID NO: 296292 - DNA, 2113 bp, Homo sapiens
ctgaggtgggaggatcactggaggctgaggtgggaggatcacttgagcctggaaggttaaagttgcagtaagttgtgattgagccactgcactccagcctgggcaacagagtgagacagtgtctccaaaaaataacttataaattggactttacaaaattaatatttatgtgccaaaaggctattaagaagatgaaaagccaggcgtggtggctcacacctataattccagcactttgggaggctgaggcaggaggatcacttgagaccaggaattcaacaccagcctgggcaacatggcaagaccccatttctacaaaaaaaatttaaaatgagctgaatgtggtggcacgcgcctgtagtcccagctactcggaaggctggggtggcccttgaagccaggaggttgaggctgcagtgaactgtgactgagccactatactccagcctgggtgacagagacccagctttaaaaccaaacaaatggattttcccactcttgtgtccagtccaggcccctcagcagcctgaggtggtgtccttcaaagagcagagcactgcatcatcaggtggatgcagccatcatcttcaacccctccccttcatccctacagtactgatggcctcatcttccccttcaacccccagggacacactcaggacaccaacaccttctttctgtgccggacactgcgctccctaggggtccaggtttgccgagtctcagttgtacctgatgaggtagccaccattgcagctgaggtcacttctttctccaaccgcttcacccatgtcctcacagcagggggcatcggccccactcatgatgatgtgacctttgaggcagtggcacaggcctttggagatgagctgaagccacaccccaagttggaagcagccaccaaagccctaggaggggaaggctgggagaagctatcattggtgccctcctctgcccgcctgcattatggcacagatccttgcactggtcaacctttcagattccctctggtctccgtccgaaacgtctacctcttcccaggcattccagagctgctgcggcgggtgctggaggggatgaagggactattccaaaacccagctgttcagttccactcaaaggagctatatgtggctgctgatgaagcctccatcgcccccattctggctgaggcccaggcccactttggacgtaggcttggcctgggttcctaccctgactggggcagcaactactatcaggtgaagctgactctagactcagaggaagaaggacccctggaggaatgcttggcctacctgactgcccgtttgccccagggatcgctggtcccctacatgcccaacgctgtggagcaggccagtgaggctgtatacaaactcgctgaatcagggtcttctttggggaaaaaggtggcaggtgccctacagaccattgagacctccctggctcagtacagcctcacccagctctgtgtgggcttcaacgggggcaaagactgcactgccctcctgcacctcttccatgcagctgtgcagaggaaattacctgatgttccaaaccccctccagatcctgtatatccgcagcatctcccctttccctgagctggaacagtttctacaggacactatcaagaggtataatctgcagatgttggaagctgagggcagcatgaagcaggccctgggtgaactgcaggcacggcacccccagctggaggctgtccttatgggcacccgccggactgacccctactcctgtagcctctgccctttcagccccactgacccaggctggcccgcattcatgcgcatcaacccactgctggactggacctacagagacatctgggattttctgcgtcagctgtttgtcccatactgtatcctgtatgaccgaggatacacatcactggggagtcgggagaataccgtgcggaacccggccctgaagtgcctgagcccaggaggacaccccacataccgtccagcctatctactggagaacgaagaagaggagcggaactcccgcacatgacctcccaccctaggagggagggaaggacaccgtcctagggtataacctggcaataaaccgtgcctctcactgtg

SEQ ID NO: 296293 - DNA, 2075 bp, Homo sapiens
  misc_feature (1818)..(1818): n is a, c, g, or t
cccgggacatgaggaaaggaacaagggaaagagccggtgaaggggcagaacaggcaggttccctcgacccaggaccccctgttcccaggctatggcccccagtgccctgtagacctggcaggccccccgtgcttgcgacccctatttgggggtctgggtggctactggagggccttgcagaggggcagagaaggcaggaccatgacatctagggcctctgaactttctccggggcgcagcgtgacggctggcatcatcattgttggagatgagatccttaagggacacactcaggacaccaacaccttctttctgtgccggacactgcgctccctaggggtccaggtttgccgagtctcagttgtacctgatgaggtagccaccattgcagctgaggtcacttctttctccaaccgcttcacccatgtcctcacagcagggggcatcggccccactcatgatgatgtgacctttgaggcagtggcacaggcctttggagatgagctgaagccacaccccaagttggaagcagccaccaaagccctaggaggggaaggctgggagaagctatcattggtgccctcctctgcccgcctgcattatggcacagatccttgcactggtcaacctttcagattccctctggtctccgtccgaaacgtctacctcttcccaggcattccagagctgctgcggcgggtgctggaggggatgaagggactattccaaaacccagctgttcagttccactcaaaggagctatatgtggctgctgatgaagcctccatcgcccccattctggctgaggcccaggcccactttggacgtaggcttggcctgggttcctaccctgactggggcagcaactactatcaggtgaagctgactctagactcagaggaagaaggacccctggaggaatgcttggcctacctgactgcccgtttgccccagggatcgctggtcccctacatgcccaacgctgtggagcaggccagtgaggctgtatacaaactcgctgaatcaggaaattacctgatgttccaaaccccctccagatcctgtatatccgcagcatctcccctttccctgagctggaacagtttctacaggacactatcaagaggtataatctgcagatgttggaagctgagggcagcatgaagcaggccctgggtgaactgcaggcacggcacccccagctggaggctgtccttatgggcacccgccggactgacccctactcctgtagcctctgccctttcagccccactgacccaggctggcccgcattcatgcgcatcaacccactgctggactggacctacagagacatctgggattttctgcgtcagctgtttgtcccatactgtatcctgtatgaccgaggatacacatcactggggagtcgggagaataccgtgcggaacccggccctgaagtgcctgagcccaggaggacaccccacataccgtccagcctatctactggagaacgaagaagaggagcggaactcccgcacatgacctcccaccctaggagggagggaaggacaccgtcctagggtataacctggcaataaaccgtgcctctcactgtgaaaaaaaaaataaaagaagataaaacaaaaaaaaaaaataaaaaaaagaaaaaaaaaaaagaaaaaaaaataaaaagaaaaagaaaaaaaaaaaaaaactggtgggccgcttgggccaatgcgattttagactggggcaggtttttgaatgcggccgaatttggggctaattgggccaattcgcctttaggggggccgtttaaaattcaatggcccgnggtttaaaaaggacggaacgggaaaacccttggggttcccaactttaatcgcctggtggaaaatccccttttcgccagttggggaaaataccaaaagggcccgacccgttggcctttccaaaaaggtggccaacctttaagggtaattggaaatggaaggcgttaaatttttggtaaaaattgcgggtaaattttttggtaaacaaagctcatttttaaaccaaagggccgaaaatgcggaaaatacccttataaat

SEQ ID NO: 296294 - DNA, 1897 bp, Homo sapiens
cccgggacatgaggaaaggaacaagggaaagagccggtgaaggggcagaacaggcaggttccctcgacccaggaccccctgttcccaggctatggcccccagtgccctgtagacctggcaggccccccgtgcttgcgacccctatttgggggtctgggtggctactggagggccttgcagaggggcagagaaggcaggaccatgacatctagggcctctgaactttctccggggcgcagcgtgacggctggcatcatcattgttggagatgagatccttaagggacacactcaggacaccaacaccttctttctgtgccggacactgcgctccctaggggtccaggtttgccgagtctcagttgtacctgatgaggtagccaccattgcagctgaggtcacttctttctccaaccgcttcacccatgtcctcacagcagggggcatcggccccactcatgatgatgtgacctttgaggcagtggcacaggcctttggagatgagctgaagccacaccccaagttggaagcagccaccaaagccctaggaggggaaggctgggagaagctatcattggtgccctcctctgcccgcctgcattatggcacagatccttgcactggtcaacctttcagattccctctggtctccgtccgaaacgtctacctcttcccaggcattccagagctgctgcggcgggtgctggaggggatgaagggactattccaaaacccagctgttcagttccactcaaaggagctatatgtggctgctgatgaagcctccatcgcccccattctggctgaggcccaggcccactttggacgtaggcttggcctgggttcctaccctgactggggcagcaactactatcaggtgaagctgactctagactcagaggaagaaggacccctggaggaatgcttggcctacctgactgcccgtttgccccagggatcgctggtcccctacatgcccaacgctgtggagcaggccagtgaggctgtatacaaactcgctgaatcagggtcttctttggggaaaaaggtggcaggtgccctacagaccattgagacctccctggctcagtacagcctcacccagctctgtgtgggcttcaacgggggcaaagactgcactgccctcctgcacctcttccatgcagctgtgcagaggaaattacctgatgttccaaaccccctccagatcctgtatatccgcagcatctcccctttccctgagctggaacagtttctacaggacactatcaagaggtataatctgcagatgttggaagctgagggcagcatgaagcaggccctgggtgaactgcaggcacggcacccccagctggaggctgtccttatgggcacccgccggactgacccctactcctgtagcctctgccctttcagccccactgacccaggctggcccgcattcatgcgcatcaacccactgctgagcaagctataccagagaatcagatagcaagccctccctcagaggccaagggagcagaagagccatggatgggccccttcccaggacagcaggggtagaagtgggaaaggtgagcatttgtgactattctattactctgacctcccagggactggacctacagagacatctgggattttctgcgtcagctgtttgtcccatactgtatcctgtatgaccgaggatacacatcactggggagtcgggagaataccgtgcggaacccggccctgaagtgcctgagcccaggaggacaccccacataccgtccagcctatctactggagaacgaagaagaggagcggaactcccgcacatgacctcccaccctaggagggagggaaggacaccgtcctagggtataacctggcaataaaccgtgcctctcactgtg

SEQ ID NO: 296295 - DNA, 1783 bp, Homo sapiens
cccgggacatgaggaaaggaacaagggaaagagccggtgaaggggcagaacaggcaggttccctcgacccaggaccccctgttcccaggctatggcccccagtgccctgtagacctggcaggccccccgtgcttgcgacccctatttgggggtctgggtggctactggagggccttgcagaggggcagagaaggcaggaccatgacatctagggcctctgaactttctccggggcgcagcgtgacggctggcatcatcattgttggagatgagatccttaagggacacactcaggacaccaacaccttctttctgtgccggacactgcgctccctaggggtccaggtttgccgagtctcagttgtacctgatgaggtagccaccattgcagctgaggtcacttctttctccaaccgcttcacccatgtcctcacagcagggggcatcggccccactcatgatgatgtgacctttgaggcagtggcacaggcctttggagatgagctgaagccacaccccaagttggaagcagccaccaaagccctaggaggggaaggctgggagaagctatcattggtgccctcctctgcccgcctgcattatggcacagatccttgcactggtcaacctttcagattccctctggtctccgtccgaaacgtctacctcttcccaggcattccagagctgctgcggcgggtgctggaggggatgaagggactattccaaaacccagctgttcagttccactcaaaggagctatatgtggctgctgatgaagcctccatcgcccccattctggctgaggcccaggcccactttggacgtaggcttggcctgggttcctaccctgactggggcagcaactactatcaggtgaagctgactctagactcagaggaagaaggacccctggaggaatgcttggcctacctgactgcccgtttgccccagggatcgctggtcccctacatgcccaacgctgtggagcaggccagtgaggctgtatacaaactcgctgaatcagggtcttctttggggaaaaaggtggcaggtgccctacagaccattgagacctccctggctcagtacagcctcacccagctctgtgtgggcttcaacgggggcaaagactgcactgccctcctgcacctcttccatgcagctgtgcagaggaaattacctgatgttccaaaccccctccagatcctgtatatccgcagcatctcccctttccctgagctggaacagtttctacaggacactatcaagaggtataatctgcagatgttggaagctgagggcagcatgaagcaggccctgggtgaactgcaggcacggcacccccagctggaggctgtccttatgggcacccgccggactgacccctactcctgtagcctctgccctttcagccccactgacccaggctggcccgcattcatgcgcatcaacccactgctgagcaagctataccagagaatcagatagcaagccctccctcagaggccaagggagcagaagagccatggatgggccccttcccaggacagcaggggtagaagtgggaaagatacacatcactggggagtcgggagaataccgtgcggaacccggccctgaagtgcctgagcccaggaggacaccccacataccgtccagcctatctactggagaacgaagaagaggagcggaactcccgcacatgacctcccaccctaggagggagggaaggacaccgtcctagggtataacctggcaataaaccgtgcctctcactgtg

SEQ ID NO: 296296 - DNA, 1190 bp, Homo sapiens
cccgggacatgaggaaaggaacaagggaaagagccggtgaaggggcagaacaggcaggttccctcgacccaggaccccctgttcccaggctatggcccccagtgccctgtagacctggcaggccccccgtgcttgcgacccctatttgggggtctgggtggctactggagggccttgcagaggggcagagaaggcaggaccatgacatctagggcctctgaactttctccggggcgcagcgtgacggctggcatcatcattgttggagatgagatccttaagggacacactcaggacaccaacaccttctttctgtgccggacactgcgctccctaggggtccaggtttgccgagtctcagttgtacctgatgaggtagccaccattgcagctgaggtcacttctttctccaaccgcttcacccatgtcctcacagcagggggcatcggccccactcatgatgatgtgacctttgaggcagtggcacaggcctttggagatgagctgaagccacaccccaagttggaagcagccaccaaagccctaggaggggaaggctgggagaagctatcattggtgccctcctctgcccgcctgcattatggcacagatccttgcactggtcaacctttcagattccctctggtctccgtccgaaacgtctacctcttcccaggcattccagagctgctgcggcgggtgctggaggggatgaagggactattccaaaacccagctgttcagttccactcaaaggagctatatgtggctgctgatgaagcctccatcgcccccattctggctgaggcccaggcccactttggacgtaggcttggcctgggttcctaccctgactggggcagcaactactatcaggtgaagctgactctagactcagaggaagaaggacccctggaggaatgcttggcctacctgactgcccgtttgccccagggatcgctggtcccctacatgcccaacgctgtggagcaggccagtgaggctgtatacaaactcgctgaatcaggtagggaccttatggaggaggggcattatgcccaaagccattggtggcaccccagatctcagtaatgcaggggctgttgggtgcttcctgcaaatccctgagagggcagaagatagcttctgttaattcattattcttccaataaatgttgattgagtaccta

SEQ ID NO: 296297 - DNA, 1553 bp, Homo sapiens
cccgggacatgaggaaaggaacaagggaaagagccggtgaaggggcagaacaggcaggttccctcgacccaggaccccctgttcccaggctatggcccccagtgccctgtagacctggcaggccccccgtgcttgcgacccctatttgggggtctgggtggctactggagggccttgcagaggggcagagaaggcaggaccatgacatctagggcctctgaactttctccggggcgcagcgtgacggctggcatcatcattgttggagatgagatccttaagggacacactcaggacaccaacaccttctttctgtgccggacactgcgctccctaggggtccaggtttgccgagtctcagttgtacctgatgaggtagccaccattgcagctgaggtcacttctttctccaaccgcttcacccatgtcctcacagcagggggcatcggccccactcatgatgatgtgacctttgaggcagtggcacaggcctttggagatgagctgaagccacaccccaagttggaagcagccaccaaagccctaggaggggaaggctgggagaagctatcattggtgccctcctctgcccgcctgcattatggcacagatccttgcactggtcaacctttcagattccctctggtctccgtccgaaacgtctacctcttcccaggcattccagagctgctgcggcgggtgctggaggggatgaagggactattccaaaacccagctgttcagttccactcaaaggagctatatgtggctgctgatgaagcctccatcgcccccattctggctgaggcccaggcccactttggacgtaggcttggcctgggttcctaccctgactggggcagcaactactatcaggtgaagctgactctagactcagaggaagaaggacccctggaggaatgcttggcctacctgactgcccgtttgccccagggatcgctggtcccctacatgcccaacgctgtggagcaggccagtgaggctgtatacaaactcgctgaatcagggtcttctttggggaaaaaggtggcaggtgccctacagaccattgagacctccctggctcagtacagcctcacccagctctgtgtgggcttcaacgggggcaaagactgcactgccctcctgcacctcttccatgcagctgtgcagaggaaattacctgatgttccaaaccccctccagatcctgtatatccgcagcattgacccaggctggcccgcattcatgcgcatcaacccactgctggactggacctacagagacatctgggattttctgcgtcagctgtttgtcccatactgtatcctgtatgaccgaggatacacatcactggggagtcgggagaataccgtgcggaacccggccctgaagtgcctgagcccaggaggacaccccacataccgtccagcctatctactggagaacgaagaagaggagcggaactcccgcacatgacctcccaccctaggagggagggaaggacaccgtcctagggtataacctggcaataaaccgtgcctctcactgtg

SEQ ID NO: 296298 - DNA, 1538 bp, Homo sapiens
cccgggacatgaggaaaggaacaagggaaagagccggtgaaggggcagaacaggcaggttccctcgacccaggaccccctgttcccaggctatggcccccagtgccctgtagacctggcaggccccccgtgcttgcgacccctatttgggggtctgggtggctactggagggccttgcagaggggcagagaaggcaggaccatgacatctagggcctctgaactttctccggggcgcagcgtgacggctggcatcatcattgttggagatgagatccttaagggacacactcaggacaccaacaccttctttctgtgccggacactgcgctccctaggggtccaggtttgccgagtctcagttgtacctgatgaggtagccaccattgcagctgaggtcacttctttctccaaccgcttcacccatgtcctcacagcagggggcatcggccccactcatgatgatgtgacctttgaggcagtggcacaggcctttggagatgagctgaagccacaccccaagttggaagcagccaccaaagccctaggaggggaaggctgggagaagctatcattggtgccctcctctgcccgcctgcattatggcacagatccttgcactggtcaacctttcagattccctctggtctccgtccgaaacgtctacctcttcccaggcattccagagctgctgcggcgggtgctggaggggatgaagggactattccaaaacccagctgttcagttccactcaaaggagctatatgtggctgctgatgaagcctccatcgcccccattctggctgaggcccaggcccactttggacgtaggcttggcctgggttcctaccctgactggggcagcaactactatcaggtgaagctgactctagactcagaggaagaaggacccctggaggaatgcttggcctacctgactgcccgtttgccccagggatcgctggtcccctacatgcccaacgctgtggagcaggccagtgaggctgtatacaaactcgctgaatcagggtcttctttggggaaaaaggtggcaggtgccctacagaccattgagacctccctggctcagtacagcctcacccagctctgtgtgggcttcaacgggggcaaagactgcactgccctcctgcacctcttccatgcagctgtgcagaggaaattacctgatgttccaaaccccctccagatcctgtatatccgcagcatctcccctttccctgagctggaacagtttgactggacctacagagacatctgggattttctgcgtcagctgtttgtcccatactgtatcctgtatgaccgaggatacacatcactggggagtcgggagaataccgtgcggaacccggccctgaagtgcctgagcccaggaggacaccccacataccgtccagcctatctactggagaacgaagaagaggagcggaactcccgcacatgacctcccaccctaggagggagggaaggacaccgtcctagggtataacctggcaataaaccgtgcctctcactgtg

SEQ ID NO: 296299 - DNA, 1405 bp, Homo sapiens
cccgggacatgaggaaaggaacaagggaaagagccggtgaaggggcagaacaggcaggttccctcgacccaggaccccctgttcccaggctatggcccccagtgccctgtagacctggcaggccccccgtgcttgcgacccctatttgggggtctgggtggctactggagggccttgcagaggggcagagaaggcaggaccatgacatctagggcctctgaactttctccggggcgcagcgtgacggctggcatcatcattgttggagatgagatccttaagggacacactcaggacaccaacaccttctttctgtgccggacactgcgctccctaggggtccaggtttgccgagtctcagttgtacctgatgaggtagccaccattgcagctgaggtcacttctttctccaaccgcttcacccatgtcctcacagcagggggcatcggccccactcatgatgatgtgacctttgaggcagtggcacaggcctttggagatgagctgaagccacaccccaagttggaagcagccaccaaagccctaggaggggaaggctgggagaagctatcattggtgccctcctctgcccgcctgcattatggcacagatccttgcactggtcaacctttcagattccctctggtctccgtccgaaacgtctacctcttcccaggcattccagagctgctgcggcgggtgctggaggggatgaagggactattccaaaacccagctgttcagttccactcaaaggagctatatgtggctgctgatgaagcctccatcgcccccattctggctgaggcccaggcccactttggacgtaggcttggcctgggttcctaccctgactggggcagcaactactatcaggtgaagctgactctagactcagaggaagaaggacccctggaggaatgcttggcctacctgactgcccgtttgccccagggatcgctggtcccctacatgcccaacgctgtggagcaggccagtgaggctgtatacaaactcgctgaatcaggaaattacctgatgttccaaaccccctccagatcctgtatatccgcagcattgacccaggctggcccgcattcatgcgcatcaacccactgctggactggacctacagagacatctgggattttctgcgtcagctgtttgtcccatactgtatcctgtatgaccgaggatacacatcactggggagtcgggagaataccgtgcggaacccggccctgaagtgcctgagcccaggaggacaccccacataccgtccagcctatctactggagaacgaagaagaggagcggaactcccgcacatgacctcccaccctaggagggagggaaggacaccgtcctagggtataacctggcaataaaccgtgcctctcactgtg

SEQ ID NO: 296300 - DNA, 2052 bp, Homo sapiens
  misc_feature (1795)..(1795): n is a, c, g, or t
cccgggacatgaggaaaggaacaagggaaagagccggtgaaggggcagaacaggcaggttccctcgacccaggaccccctgttcccaggctatggcccccagtgccctgtagacctggcaggccccccgtgcttgcgacccctatttgggggtctgggtggctactggagggccttgcagaggggcagagaaggcaggaccatgacatctagggcctctgaactttctccggggcgcagcgtgacggctggcatcatcattgttggagatgagatccttaagggacacactcaggacaccaacaccttctttctgtgccggacactgcgctccctaggggtccaggtttgccgagtctcagttgtacctgatgaggtagccaccattgcagctgaggtcacttctttctccaaccgcttcacccatgtcctcacagcagggggcatcggccccactcatgatgatgtgacctttgaggcagtggcacaggcctttggagatgagctgaagccacaccccaagttggaagcagccaccaaagccctaggaggggaaggctgggagaagctatcattggtgccctcctctgcccgcctgcattatggcacagatccttgcactggtcaacctttcagattccctctggtctccgtccgaaacgtctacctcttcccaggcattccagagctgctgcggcgggtgctggaggggatgaagggactattccaaaacccagctgttcagttccactcaaaggagctatatgtggctgctgatgaagcctccatcgcccccattctggctgaggcccaggcccactttggacgtaggcttggcctgggttcctaccctgactggggcagcaactactatcaggtggcaggtgccctacagaccattgagacctccctggctcagtacagcctcacccagctctgtgtgggcttcaacgggggcaaagactgcactgccctcctgcacctcttccatgcagctgtgcagaggaaattacctgatgttccaaaccccctccagatcctgtatatccgcagcatctcccctttccctgagctggaacagtttctacaggacactatcaagaggtataatctgcagatgttggaagctgagggcagcatgaagcaggccctgggtgaactgcaggcacggcacccccagctggaggctgtccttatgggcacccgccggactgacccctactcctgtagcctctgccctttcagccccactgacccaggctggcccgcattcatgcgcatcaacccactgctggactggacctacagagacatctgggattttctgcgtcagctgtttgtcccatactgtatcctgtatgaccgaggatacacatcactggggagtcgggagaataccgtgcggaacccggccctgaagtgcctgagcccaggaggacaccccacataccgtccagcctatctactggagaacgaagaagaggagcggaactcccgcacatgacctcccaccctaggagggagggaaggacaccgtcctagggtataacctggcaataaaccgtgcctctcactgtgaaaaaaaaaataaaagaagataaaacaaaaaaaaaaaataaaaaaaagaaaaaaaaaaaagaaaaaaaaataaaaagaaaaagaaaaaaaaaaaaaaactggtgggccgcttgggccaatgcgattttagactggggcaggtttttgaatgcggccgaatttggggctaattgggccaattcgcctttaggggggccgtttaaaattcaatggcccgnggtttaaaaaggacggaacgggaaaacccttggggttcccaactttaatcgcctggtggaaaatccccttttcgccagttggggaaaataccaaaagggcccgacccgttggcctttccaaaaaggtggccaacctttaagggtaattggaaatggaaggcgttaaatttttggtaaaaattgcgggtaaattttttggtaaacaaagctcatttttaaaccaaagggccgaaaatgcggaaaatacccttataaat

SEQ ID NO: 296301 - DNA, 2146 bp, Homo sapiens
cccgggacatgaggaaaggaacaagggaaagagccggtgaaggggcagaacaggcaggtgagagtctaagagggctcagtaatctgaagcttggtgggaagaagggattctgggctagaaagggtgcagaagcctgaagtagaaagagacgggattttggtccggggtggagagcgaatgcattgaaaagggccaaggcccaggataaggtagacatttaaaggggtacggatgcccaaggtagagcagacacttgaggagaccagctcagcaaacggaagacacttaaagtggtaggttctcaagagagaagaagtttttaagactagagctaagcaagacatttaaaaggacatgggttgggatttgggaacacgtttattccagaggcaggaacaaaggagtcgcttgtcaaggatctggttagagaagactagggtcttcctcgaaggaagcacgcgcacgcctgctctcccccattgtcttttctggcttctccaggttccctcgacccaggaccccctgttcccaggctatggcccccagtgccctgtagacctggcaggccccccgtgcttgcgacccctatttgggggtctgggtggctactggagggccttgcagaggggcagagaaggcaggaccatgacatctagggcctctgaactttctccggggcgcagcgtgacggctggcatcatcattgttggagatgagatccttaagggacacactcaggacaccaacaccttctttctgtgccggacactgcgctccctaggggtccaggtttgccgagtctcagttgtacctgatgaggtagccaccattgcagctgaggtcacttctttctccaaccgcttcacccatgtcctcacagcagggggcatcggccccactcatgatgatgtgacctttgaggcagtggcacaggcctttggagatgagctgaagccacaccccaagttggaagcagccaccaaagccctaggaggggaaggctgggagaagctatcactggtcaacctttcagattccctctggtctccgtccgaaacgtctacctcttcccaggcattccagagctgctgcggcgggtgctggaggggatgaagggactattccaaaacccagctgttcagttccactcaaaggagctatatgtggctgctgatgaagcctccatcgcccccattctggctgaggcccaggcccactttggacgtaggcttggcctgggttcctaccctgactggggcagcaactactatcaggtgaagctgactctagactcagaggaagaaggacccctggaggaatgcttggcctacctgactgcccgtttgccccagggatcgctggtcccctacatgcccaacgctgtggagcaggccagtgaggctgtatacaaactcgctgaatcagggtcttctttggggaaaaaggtggcaggtgccctacagaccattgagacctccctggctcagtacagcctcacccagctctgtgtgggcttcaacgggggcaaagactgcactgccctcctgcacctcttccatgcagctgtgcagaggaaattacctgatgttccaaaccccctccagatcctgtatatccgcagcatctcccctttccctgagctggaacagtttctacaggacactatcaagaggtataatctgcagatgttggaagctgagggcagcatgaagcaggccctgggtgaactgcaggcacggcacccccagctggaggctgtccttatgggcacccgccggactgacccctactcctgtagcctctgccctttcagccccactgacccaggctggcccgcattcatgcgcatcaacccactgctggactggacctacagagacatctgggattttctgcgtcagctgtttgtcccatactgtatcctgtatgaccgaggatacacatcactggggagtcgggagaataccgtgcggaacccggccctgaagtgcctgagcccaggaggacaccccacataccgtccagcctatctactggagaacgaagaagaggagcggaactcccgcacatgacctcccaccctaggagggagggaaggacaccgtcctagggtataacctggcaataaaccgtgcctctcactgtg

SEQ ID NO: 296302 - DNA, 1229 bp, Homo sapiens
cccgggacatgaggaaaggaacaagggaaagagccggtgaaggggcagaacaggcaggttccctcgacccaggaccccctgttcccaggctatggcccccagtgccctgtagacctggcaggccccccgtgcttgcgacccctatttgggggtctgggtggctactggagggccttgcagaggggcagagaaggcaggaccatgacatctagggcctctgaactttctccggggcgcagcgtgacggctggcatcatcattgttggagatgagatccttaagggacacactcaggacaccaacaccttctttctgtgccggacactgcgctccctaggggtccaggtttgccgagtctcagttgtacctgatgaggtagccaccattgcagctgaggtcacttctttctccaaccgcttcacccatgtcctcacagcagggggcatcggccccactcatgatgatgtgacctttgaggcagtggcacaggcctttggagatgagctgaagccacaccccaagttggaagcagccaccaaagccctaggaggggaaggctgggagaagctatcattggtgccctcctctgcccgcctgcattatggcacagatccttgcactggtcaacctttcagattccctctggtctccgtccgaaacgtctacctcttcccaggcattccagagctgctgcggcgggtgctggaggggatgaagggactattccaaaacccagctgttcagttccactcaaaggagctatatgtggctgctgatgaagcctccatcgcccccattctggctgaggcccaggcccactttggacgtaggcttggcctgggttcctaccctgactggggcagcaactactatcaggtgaagctgactctagactcagaggaagaaggacccctggaggaatgcttggcctacctgactgcccgtttgccccagggatcgctggtcccctacatgcccaacgctgtggagcaggccagtgaggctgtatacaaactcgctgaatcaggtagggaccttatggaggaggggcattatgcccaaagccattggtggcaccccagatctcagtaatgcaggggctgttgggtgcttcctgcaaatccctgagagggcagaagatagcttctgttaattcattattcttccaataaatgttgattgagtacctattttcatcagcactgtgctaggtgttggggataacatca

SEQ ID NO: 296303 - DNA, 1140 bp, Homo sapiens
  misc_feature (23)..(23): n is a, c, g, or t
  misc_feature (68)..(69): n is a, c, g, or t
  misc_feature (73)..(73): n is a, c, g, or t
  misc_feature (88)..(88): n is a, c, g, or t
  misc_feature (90)..(90): n is a, c, g, or t
  misc_feature (98)..(99): n is a, c, g, or t
  misc_feature (102)..(102): n is a, c, g, or t
  misc_feature (106)..(106): n is a, c, g, or t
agtttatggcctctctcccctgntttgaaaacctgactgtaacttcaaatcctctgtccgtcgaactnncctntccagcattccaggntntgcgcggnntgngggntgaggactattccaaaacccagctgttcagttccactcaaaggagctatatgtggctgctgatgaagcctccatcgcccccattctggctgaggcccaggcccactttggacgtaggcttggcctgggttcctaccctgactggggcagcaactactatcaggtgaagctgactctagactcagaggaagaaggacccctggaggaatgcttggcctacctgactgcccgtttgccccagggatcgctggtcccctacatgcccaacgctgtggagcaggccagtgaggctgtatacaaactcgctgaatcagggtcttctttggggaaaaaggtggcaggtgccctacagaccattgagacctccctggctcagtacagcctcacccagctctgtgtgggcttcaacgggggcaaagactgcactgccctcctgcacctcttccatgcagctgtgcagaggaaattacctgatgttccaaaccccctccagatcctgtatatccgcagcatctcccctttccctgagctggaacagtttctacaggacactatcaagaggtataatctgcagatgttggaagctgagggcagcatgaagcaggccctgggtgaactgcaggcacggcacccccagctggaggctgtccttatgggcacccgccggactgacccctactcctgtagcctctgccctttcagccccactgacccaggctggcccgcattcatgcgcatcaacccactgctggactggacctacagagacatctgggattttctgcgtcagctgtttgtcccatactgtatcctgtatgaccgaggatacacatcactggggagtcgggagaataccgtgcggaacccggccctgaagtgcctgagcccaggaggacaccccacataccgtccagcctatctactggagaacgaagaagaggagcggaactcccgcacatgacctcccaccctaggagggagggaaggacaccgtcctagggtataacctggcaataaaccgtgcctctcactgtg

SEQ ID NO: 296304 - DNA, 2715 bp, Homo sapiens
  misc_feature (2458)..(2458): n is a, c, g, or t
cccgggacatgaggaaaggaacaagggaaagagccggtgaaggggcagaacaggcaggttccctcgacccaggaccccctgttcccaggctatggcccccagtgccctgtagacctggcaggccccccgtgcttgcgacccctatttgggggtctgggtggctactggagggccttgcagaggggcagagaaggcaggaccatgacatctagggcctctgaactttctccggggcgcagcgtgacggctggcatcatcattgttggagatgagatccttaaggttggaaacaacaaatggcttttgagtccaagagtgatgcaatcacagtgacgcattaaaacggttactccggagacatcagagcactgtggctggaggctgggagcctggccaggaagctgtcgccattgtccaggtgaaaggtgctaaggacctgcttggtggcagtggggacagaaagaagaaagcaggccaggcgtggtggctcacacctataattccagcactttgggaggctgaggcaggaggatcacttgagaccaggaattcaacaccagcctgggcaacatggcaagaccccatttctacaaaaaaaatttaaaatgagctgaatgtggtggcacgcgcctgtagtcccagctactcggaaggctggggtggcccttgaagccaggaggttgaggctgcagtgaactgtgactgagccactatactccagcctgggtgacagagacccagctttaaaaccaaacaaatggattttcccactcttgtgtccagtccaggcccctcagcagcctgaggtggtgtccttcaaagagcagagcactgcatcatcaggtggatgcagccatcatcttcaacccctccccttcatccctacagtactgatggcctcatcttccccttcaacccccagggacacactcaggacaccaacaccttctttctgtgccggacactgcgctccctaggggtccaggtttgccgagtctcagttgtacctgatgaggtagccaccattgcagctgaggtcacttctttctccaaccgcttcacccatgtcctcacagcagggggcatcggccccactcatgatgatgtgacctttgaggcagtggcacaggcctttggagatgagctgaagccacaccccaagttggaagcagccaccaaagccctaggaggggaaggctgggagaagctatcattggtgccctcctctgcccgcctgcattatggcacagatccttgcactggtcaacctttcagattccctctggtctccgtccgaaacgtctacctcttcccaggcattccagagctgctgcggcgggtgctggaggggatgaagggactattccaaaacccagctgttcagttccactcaaaggagctatatgtggctgctgatgaagcctccatcgcccccattctggctgaggcccaggcccactttggacgtaggcttggcctgggttcctaccctgactggggcagcaactactatcaggtgaagctgactctagactcagaggaagaaggacccctggaggaatgcttggcctacctgactgcccgtttgccccagggatcgctggtcccctacatgcccaacgctgtggagcaggccagtgaggctgtatacaaactcgctgaatcaggaaattacctgatgttccaaaccccctccagatcctgtatatccgcagcatctcccctttccctgagctggaacagtttctacaggacactatcaagaggtataatctgcagatgttggaagctgagggcagcatgaagcaggccctgggtgaactgcaggcacggcacccccagctggaggctgtccttatgggcacccgccggactgacccctactcctgtagcctctgccctttcagccccactgacccaggctggcccgcattcatgcgcatcaacccactgctggactggacctacagagacatctgggattttctgcgtcagctgtttgtcccatactgtatcctgtatgaccgaggatacacatcactggggagtcgggagaataccgtgcggaacccggccctgaagtgcctgagcccaggaggacaccccacataccgtccagcctatctactggagaacgaagaagaggagcggaactcccgcacatgacctcccaccctaggagggagggaaggacaccgtcctagggtataacctggcaataaaccgtgcctctcactgtgaaaaaaaaaataaaagaagataaaacaaaaaaaaaaaataaaaaaaagaaaaaaaaaaaagaaaaaaaaataaaaagaaaaagaaaaaaaaaaaaaaactggtgggccgcttgggccaatgcgattttagactggggcaggtttttgaatgcggccgaatttggggctaattgggccaattcgcctttaggggggccgtttaaaattcaatggcccgnggtttaaaaaggacggaacgggaaaacccttggggttcccaactttaatcgcctggtggaaaatccccttttcgccagttggggaaaataccaaaagggcccgacccgttggcctttccaaaaaggtggccaacctttaagggtaattggaaatggaaggcgttaaatttttggtaaaaattgcgggtaaattttttggtaaacaaagctcatttttaaaccaaagggccgaaaatgcggaaaatacccttataaat

SEQ ID NO: 296305 - DNA, 2085 bp, Homo sapiens
cccgggacatgaggaaaggaacaagggaaagagccggtgaaggggcagaacaggcaggttccctcgacccaggaccccctgttcccaggctatggcccccagtgccctgtagacctggcaggccccccgtgcttgcgacccctatttgggggtctgggtggctactggagggccttgcagaggggcagagaaggcaggaccatgacatctagggcctctgaactttctccggggcgcagcgtgacggctggcatcatcattgttggagatgagatccttaaggttggaaacaacaaatggcttttgagtccaagagtgatgcaatcacagtgacgcattaaaacggttactccggagacatcagagcactgtggctggaggctgggagcctggccaggaagctgtcgccattgtccaggtgaaaggtgctaaggacctgcttggtggcagtggggacagaaagaagaaagcaggccaggcgtggtggctcacacctataattccagcactttgggaggctgaggcaggaggatcacttgagaccaggaattcaacaccagcctgggcaacatggcaagaccccatttctacaaaaaaaatttaaaatgagctgaatgtggtggcacgcgcctgtagtcccagctactcggaaggctggggtggcccttgaagccaggaggttgaggctgcagtgaactgtgactgagccactatactccagcctgggtgacagagacccagctttaaaaccaaacaaatggattttcccactcttgtgtccagtccaggcccctcagcagcctgaggtggtgtccttcaaagagcagagcactgcatcatcaggtggatgcagccatcatcttcaacccctccccttcatccctacagtactgatggcctcatcttccccttcaacccccagggacacactcaggacaccaacaccttctttctgtgccggacactgcgctccctaggggtccaggtttgccgagtctcagttgtacctgatgaggtagccaccattgcagctgaggtcacttctttctccaaccgcttcacccatgtcctcacagcagggggcatcggccccactcatgatgatgtgacctttgaggcagtggcacaggcctttggagatgagctgaagccacaccccaagttggaagcagccaccaaagccctaggaggggaaggctgggagaagctatcattggtgccctcctctgcccgcctgcattatggcacagatccttgcactggtcaacctttcagattccctctggtctccgtccgaaacgtctacctcttcccaggcattccagagctgctgcggcgggtgctggaggggatgaagggactattccaaaacccagctgttcagttccactcaaaggagctatatgtggctgctgatgaagcctccatcgcccccattctggctgaggcccaggcccactttggacgtaggcttggcctgggttcctaccctgactggggcagcaactactatcaggtgaagctgactctagactcagaggaagaaggacccctggaggaatgcttggcctacctgactgcccgtttgccccagggatcgctggtcccctacatgcccaacgctgtggagcaggccagtgaggctgtatacaaactcgctgaatcaggaaattacctgatgttccaaaccccctccagatcctgtatatccgcagcatctcccctttccctgagctggaacagtttctacaggacactatcaagagagcaagctataccagagaatcagatagcaagccctccctcagaggccaagggagcagaagagccatggatgggccccttcccaggacagcaggggtagaagtgggaaagatacacatcactggggagtcgggagaataccgtgcggaacccggccctgaagtgcctgagcccaggaggacaccccacataccgtccagcctatctactggagaacgaagaagaggagcggaactcccgcacatgacctcccaccctaggagggagggaaggacaccgtcctagggtataacctggcaataaaccgtgcctctcactgtg

SEQ ID NO: 296306 - DNA, 874 bp, Homo sapiens
cccgggacatgaggaaaggaacaagggaaagagccggtgaaggggcagaacaggcaggttccctcgacccaggaccccctgttcccaggctatggcccccagtgccctgtagacctggcaggccccccgtgcttgcgacccctatttgggggtctgggtggctactggagggccttgcagaggggcagagaaggcaggaccatgacatctagggcctctgaactttctccggggcgcagcgtgacggctggcatcatcattgttggagatgagatccttaaggttggaaacaacaaatggcttttgagtccaagagtgatgcaatcacagtgacgcattaaaacggttactccggagacatcagagcactgtggctggaggctgggagcctggccaggaagctgtcgccattgtccaggtgaaaggtgctaaggacctgcttggtggcagtggggacagaaagaagaaagcaggccaggcgtggtggctcacacctataattccagcactttgggaggctgaggcaggaggatcacttgagaccaggaattcaacaccagcctgggcaacatggcaagaccccatttctacaaaaaaaatttaaaatgagctgaatgtggtggcacgcgcctgtagtcccagctactcggaaggctggggtggcccttgaagccaggaggttgaggctgcagtgaactgtgactgagccactatactccagcctgggtgacagacaccccacataccgtccagcctatctactggagaacgaagaagaggagcggaactcccgcacatgacctcccaccctaggagggagggaaggacaccgtcctagggtataacctggcaataaaccgtgcctctcactgtg

SEQ ID NO: 296307 - DNA, 566 bp, Homo sapiens
cccgggacatgaggaaaggaacaagggaaagagccggtgaaggggcagaacaggcaggttccctcgacccaggaccccctgttcccaggctatggcccccagtgccctgtagacctggcaggccccccgtgcttgcgacccctatttgggggtctgggtggctactggagggccttgcagaggggcagagaaggcaggaccatgacatctagggcctctgaactttctccggggcgcagcgtgacggctggcatcatcattgttggagatgagatccttaaggactggacctacagagacatctgggattttctgcgtcagctgtttgtcccatactgtatcctgtatgaccgaggatacacatcactggggagtcgggagaataccgtgcggaacccggccctgaagtgcctgagcccaggaggacaccccacataccgtccagcctatctactggagaacgaagaagaggagcggaactcccgcacatgacctcccaccctaggagggagggaaggacaccgtcctagggtataacctggcaataaaccgtgcctctcactgtg

SEQ ID NO: 296308 - DNA, 1273 bp, Homo sapiens
cccgggacatgaggaaaggaacaagggaaagagccggtgaaggggcagaacaggcaggtgagagtctaagagggctcagtaatctgaagcttggtgggaagaagggattctgggctagaaagggtgcagaagcctgaagtagaaagagacgggattttggtccggggtggagagcgaatgcattgaaaagggccaaggcccaggataaggtagacatttaaaggggtacggatgcccaaggtagagcagacacttgaggagaccagctcagcaaacggaagacacttaaagtggtaggttctcaagagagaagaagtttttaagactagagctaagcaagacatttaaaaggacatgggttgggatttgggaacacgtttattccagaggcaggaacaaaggagtcgcttgtcaaggatctggttagagaagactagggtcttcctcgaaggaagcacgcgcacgcctgctctcccccattgtcttttctggcttctccaggttccctcgacccaggaccccctgttcccaggctatggcccccagtgccctgtagacctggcaggccccccgtgcttgcgacccctatttgggggtctgggtggctactggagggccttgcagaggggcagagaaggcaggaccatgacatctagggcctctgaactttctccggggcgcagcgtgacggctggcatcatcattgttggagatgagatccttaaggtgtgtctgggacagaaaaggggggagggcgctgcgttctcctgtccttaagggcctgctgcacatccctccatggaaggaggtgaaacagggtgggagcctctttgctgcagtaggatcctggagtgaatccagcatattggaggaaaattaaccctcattctttcaattactctactgaaaaacttgtagcaaagtccctacaatttttcaacctgagagagctgattgaaaaaaagaaaaataaaaaggtcattgcaatttaccaagcagtatggtagagggcagaggagctacacaacaatgacaggaagcccctcgagtagaggaggtacaggtgtgtgtattgtatatttaagagttttggccgggtgcggtggctcacgcatgtaatcccagcactttgggaggccgaggcgggtggatcacgagttcaggagttcgagaccagcctcaacatggagaaaccccatctctactaaaaatacaaaattagccaggcgtggtggtgcatgcctgtaatcccagctacttggcaggctgaggc

SEQ ID NO: 296309 - DNA, 374 bp, Homo sapiens
ataagttaaatattgttattctaattccagtcagaatcaccttagcattggtgagatagtatttggagatttgtctttgcattttttcagtctactttttgggtattttatgaatgtgaaagcctaaactttccccttcattaggaagagatacttaataattcttgatagcccattcatcatctaggtgagcagtgcattctggtgctttactcttctcaggtggaaaaaataatggactgtaaatgcagtggtcctatactttacccacatttagctcttaaaaaatacaaaattgaaggcatttttaagattagacctcatgtaaagtttctctttgatgatttttaaaacaatctcctttacttttgaaa

SEQ ID NO: 296310 - DNA, 611 bp, Homo sapiens
agggaagccagatgatatgaacttcagtgatgtaaagcaaatccatcaaacagacactggcagtactttagacacaacaggagcaggatgtgcagtggcgactgaatctatgacattcactctgataagtgtggtgatgttacttcccgggatttgaacaagctgacagagcataggagcatgttatctgggcctctgtattgcaggagctcgctcagaaaaatgaagaaagacgagaaaatgctctgtcattcagcaagaaagcagacggaagcttagaatcacagcttatttaaaaggacagcttataaatatgatgtgtttataattttactatttcattttcctcatttataaaaaaattaaagaaaatctcatgagaatttcatcacagatggttaactgcaataaatttatattgaataatttgatttacttctattttgactacacatctattatagtatgggtgtgattgaatgcaaatccacagacacatgtacacatttatctatatctatccataaaatatacatattcatgtttattgttgctatgattgtattgatgcttatatttatatttgtataaaatttgcctttatgtcagtt

SEQ ID NO: 296311 - DNA, 962 bp, Homo sapiens
agggaagccagatgatatgaacttcagtgatgtaaagcaaatccatcaaacagacactggcagtactttagacacaacaggagcaggatgtgcagtggcgactgaatctatgacattcactctgataagtgtggtgatgttacttcccgggatttggtaactgaactcttctgtcctgacataccttactgaagtctcgatttcttctctctctgcatatgcctggaataagagatcctttttcaatgtaacaattatatttatgaaaagatatgttacactaacttctcagaagccaagctgaaatattcataaagtccctaaaactcaacgtttaaatgacacactttaaaaatatgtcttttttcaatctaactgaaaaccttcttaacttctaatatattaaatctgaagatgtgaagggcacagaagtgactttgaataagaagaatttagtgtatctgtaattttattatcaattccaagccccttcctttctaaattaaaaatgttttcatttgaaagtgtatttgccagacaatgaaaacagtatgcagtatttcttaaagtattgaaattagaatatcatgaaataaatcaaaacatacaatggcaagtagtatgcatgcatattcaagagactcttccatttttgcaagctgtagaaggaaatgtctgaatgtctataagttatggggtagattcttgagaagcatttcatataatttcactgaagaaccttgataattttgacccactgaacttagccactgatgaaccttaagctgagtattttattaacacctgatttgtattccattatattcaaaatgcatctttggtattgtgcctctgctcccatctctctctttgcctcatagatttagctatgttgggaagcacatgcttgctctaggaatatctccaataaagctgttaactatttggtggaaaaatttgaa

SEQ ID NO: 296312 - DNA, 2174 bp, Homo sapiens
tgggagtgcgaggctgacgcggcggctctatctcccgtaactgtgacacgggtgcacgcaagcgtcattgggggtgatgggggccgtgctcggtgcgcttctgcaccggtgacgcaaccgctgtgtctccgccagtccgcgcaggccagcatccttcagaaaaagcatccccgaggaggaagacgaatcgttaaacatcttaggtcagctctagcctctcggaatttgtcttcttcagtggaaaccccgagaagactgatcagttcttcagttctaaaacaatggcccagggtttggtgacgttcgccgacgtagccatagacttttctcaggaggagtgggcctgtctgaactctgctcagagggacctgtactgggacgtgatgctggagaactacagtaacttggtctcactggatttggagtcagcatatgaaaataagagtttacctacagaaaaaaacattcatgaaataagggcttccaaaaggaattcagatagaagaagtaaatcccttggccgtaactggatatgtgaaggtacgcttgaaagaccacagcgctccagagggaggtatgtcaatcagatgatcatcaattatgtcaaaaggcctgctactagagaaggcacccctcctagaacacatcagagacatcataaggagaattcctttgaatgtaaggactgtgggaaggcctttagtcgtggctatcaacttagtcaacatcagaaaatccatactggtgagaaaccttatgaatgtaaagaatgtaagaaggccttccgttggggcaatcagcttactcaacatcaaaaaattcatactggggagaagccctacgaatgtaaagactgtgggaaggcttttcgatggggctcaagcctcgttattcataagaggattcatactggtgaaaaaccctatgaatgtaaagactgtggaaaggcctttcggcgtggtgatgagctcactcagcaccagagattccacactggggagaaagactacgaatgcaaagactgtgggaagacctttagccgtgtgtataaacttattcagcacaagagaattcatagtggggagaagccttacgagtgtaaagactgtgggaaggcttttatttgtggttcaagcctcattcagcataaaagaattcacacaggtgagaaaccctatgaatgtcaagaatgtgggaaggcctttactcgagtcaattaccttactcagcatcagaagatccacaccggtgagaagcctcacgaatgtaaggagtgtgggaaggcctttcgctggggttcgagcctcgttaagcacgagaggatacatacgggcgagaagccgtacaagtgcacagaatgtgggaaggccttcaattgtggctatcacctcactcagcacgagagaatccacacaggcgaaaccccgtataaatgtaaggagtgtgggaaggctttcatttatggatcgagcctcgtgaaacatgagagaattcataccggggtgaaaccctatgggtgtacagaatgtgggaagagctttagtcacggccatcagcttacacaacatcagaaaacgcacagtggggcgaaatcctacgaatgtaaggagtgcgggaaggcatgtaaccacctaaaccatctccgagaacatcagaggatccacaacagttgaagagccttttgaacgcagtagcccgctcgtatctatggtttcgctttccacagtttgttacctgcagtcaactgcagttcaaaaatattaaatggaaaattccagaaataaagaattttaagtctcaaatggtgtgcccttctgagtagcgtgatgaaatctctcgctgtccggctccagccggccggggatgtgagtcatcccttggtccagcacatccacgctgtatacgccacccaccctgctagtgacttagtagccgtcttggtgatcagatcaactatcccagcatcacagtgcctgtgcccaagcagtcctcactttgcttaacagtggccccagagagcaggagtagtgatgctggtgattcggatatgccaaagagaagccacaaagtgcttccttttaaatgaaaaggtgaaagttctcaacttaaaacagaaaagaaaaaaatcatatactgaggttgctaagatctacatgacaataagatattttggg

SEQ ID NO: 296313 - DNA, 2318 bp, Homo sapiens
tgcgtcgaagcttctctggtttcgcattacatttcccagagggccttggggcacagtccaatgaggagcgagccgggtggccggctgaggggcgtgcttcatgctcgcgggatttttaaaaatggtttctcctggatcttatcccaactgcgcctgagaccttgtttcacctcctgatgtgctgggtgtggttaggcctcgagccgggagctatttgcctcccaggaggaagccagggcagggttccgcggggaatggcggtgagggagccactcgggacgcggaggccctaaaatgaagaagcttcggcctgaggcttcgggagcggcgagcagtgtctccgttgcttcctgtgccttggccttccagccatgtggtacctgctagggagcagtggtcccaaagtgacgtgagaggctctacgctgttgtgaaaatgaccaagaagaaggcttcacaagtcacgagatggcagttttggagccagaagtgctctccgtgcacactacctggacgacaagaggaagtaacctcaagaatagaattccttttggggaagaaagagctggccttcaggaaaagcatcccggaggaggaagaagaagtgttatatgtcctaaagtaaggtttcaggccagcatccttcagaaaaagcatccccgaggaggaagacgaatcgttaaacatcttaggtcagctttaccagtgaggaaaccgacactgtgagctctagcctctcggaatttgtcttcttcagtggaaaccccgagaagactgatcagttcttcagttctaaaacaatggcccagggtttggtgacgttcgccgacgtagccatagacttttctcaggaggagtgggcctgtctgaactctgctcagagggacctgtactgggacgtgatgctggagaactacagtaacttggtctcactggatttggagtcagcatatgaaaataagagtttacctacagaaaaaaacattcatgaaataagggcttccaaaaggaattcagatagaagaagtaaatcccttggccgtaactggatatgtgaaggtacgcttgaaagaccacagcgctccagagggaggtatgtcaatcagatgatcatcaattatgtcaaaaggcctgctactagagaaggcacccctcctagaacacatcagagacatcataaggagaattcctttgaatgtaaggactgtgggaaggcctttagtcgtggctatcaacttagtcaacatcagaaaatccatactggtgagaaaccttatgaatgtaaagaatgtaagaaggccttccgttggggcaatcagcttactcaacatcaaaaaattcatactggggagaagccctacgaatgtaaagactgtgggaaggcttttcgatggggctcaagcctcgttattcataagaggattcatactggtgaaaaaccctatgaatgtaaagactgtggaaaggcctttcggcgtggtgatgagctcactcagcaccagagattccacactggggagaaagactacgaatgcaaagactgtgggaagacctttagccgtgtgtataaacttattcagcacaagagaattcatagtggggagaagccttacgagtgtaaagactgtgggaaggcttttatttgtggttcaagcctcattcagcataaaagaattcacacaggtgagaaaccctatgaatgtcaagaatgtgggaaggcctttactcgagtcaattaccttactcagcatcagaagatccacaccggtgagaagcctcacgaatgtaaggagtgtgggaaggcctttcgctggggttcgagcctcgttaagcacgagaggatacatacgggcgagaagccgtacaagtgcacagaatgtgggaaggccttcaattgtggctatcacctcactcagcacgagagaatccacacaggcgaaaccccgtataaatgtaaggagtgtgggaaggctttcatttatggatcgagcctcgtgaaacatgagagaattcataccggggtgaaaccctatgggtgtacagaatgtgggaagagctttagtcacggccatcagcttacacaacatcagaaaacgcacagtggggcgaaatcctacgaatgtaaggagtgcgggaaggcatgtaaccacctaaaccatctccgagaacatcagaggatccacaacagttgaagagccttttgaacgcagtagcccgctcgtatctatggtttcgctttccacagtttgttacctgcagtcaactgcagttcaaaaatattaaatggaaaattccagaaataaagaattttaagtctca

SEQ ID NO: 296314 - DNA, 2627 bp, Homo sapiens
aggctttgggtcaacgcagcccgtgcctgtgaacctcggcggtgcgtccctgggactctgctccgtgaggtgcgctctgggggttgtgcgggggcagcggtcgggacgggtctccgtggcccacggatgcacctctgcaccgtgtggggtggtggggcccgtagcatggccgtgctgggcgttagtgggtatgaggggcgcagatgtgtctcaggacagagtgagctgtggtgaggctgagctgtgcagacttgtgctgggatgggtgatcgggccttctgggtgacgcaggtgtgtgtgacaacacaacctgtagcttcagcgtctctgtgctgggatggatgatcgggccttctgagtgatgcaggtgtgtgtgacagtgcaacttgtagctccagcgtctctgctgcttcccctgccttcacctcctaaccaagcggtacctgcctgagaacaagggccgcggagggacgtgagcgcctgagcctcgcctggaaattcaccagcaagaaggcagaaacagccatgaggccagcatccttcagaaaaagcatccccgaggaggaagacgaatcgttaaacatctgaaagggtcaggccagcatccttcagaaaaagcatccccgaggaggaagacgaatcgttaaacatcttaggtcagctctagcctctcggaatttgtcttcttcagtggaaaccccgagaagactgatcagttcttcagttctaaaacaatggcccagggtttggtgacgttcgccgacgtagccatagacttttctcaggaggagtgggcctgtctgaactctgctcagagggacctgtactgggacgtgatgctggagaactacagtaacttggtctcactggatttggagtcagcatatgaaaataagagtttacctacagaaaaaaacattcatgaaataagggcttccaaaaggaattcagatagaagaagtaaatcccttggccgtaactggatatgtgaaggtacgcttgaaagaccacagcgctccagagggaggtatgtcaatcagatgatcatcaattatgtcaaaaggcctgctactagagaaggcacccctcctagaacacatcagagacatcataaggagaattcctttgaatgtaaggactgtgggaaggcctttagtcgtggctatcaacttagtcaacatcagaaaatccatactggtgagaaaccttatgaatgtaaagaatgtaagaaggccttccgttggggcaatcagcttactcaacatcaaaaaattcatactggggagaagccctacgaatgtaaagactgtgggaaggcttttcgatggggctcaagcctcgttattcataagaggattcatactggtgaaaaaccctatgaatgtaaagactgtggaaaggcctttcggcgtggtgatgagctcactcagcaccagagattccacactggggagaaagactacgaatgcaaagactgtgggaagacctttagccgtgtgtataaacttattcagcacaagagaattcatagtggggagaagccttacgagtgtaaagactgtgggaaggcttttatttgtggttcaagcctcattcagcataaaagaattcacacaggtgagaaaccctatgaatgtcaagaatgtgggaaggcctttactcgagtcaattaccttactcagcatcagaagatccacaccggtgagaagcctcacgaatgtaaggagtgtgggaaggcctttcgctggggttcgagcctcgttaagcacgagaggatacatacgggcgagaagccgtacaagtgcacagaatgtgggaaggccttcaattgtggctatcacctcactcagcacgagagaatccacacaggcgaaaccccgtataaatgtaaggagtgtgggaaggctttcatttatggatcgagcctcgtgaaacatgagagaattcataccggggtgaaaccctatgggtgtacagaatgtgggaagagctttagtcacggccatcagcttacacaacatcagaaaacgcacagtggggcgaaatcctacgaatgtaaggagtgcgggaaggcatgtaaccacctaaaccatctccgagaacatcagaggatccacaacagttgaagagccttttgaacgcagtagcccgctcgtatctatggtttcgctttccacagtttgttacctgcagtcaactgcagttcaaaaatattaaatggaaaattccagaaataaagaattttaagtctcaaatggtgtgcccttctgagtagcgtgatgaaatctctcgctgtccggctccagccggccggggatgtgagtcatcccttggtccagcacatccacgctgtatacgccacccaccctgctagtgacttagtagccgtcttggtgatcagatcaactatcccagcatcacagtgcctgtgcccaagcagtcctcactttgcttaacagtggccccagagagcaggagtagtgatgctggtgattcggatatgccaaagagaagccacaaagtgcttccttttaaatgaaaaggtgaaagttctcaacttaaaacagaaaagaaaaaaatcatatactgaggttgctaagatctacatgacaataagatattttggg

SEQ ID NO: 296315 - DNA, 2315 bp, Homo sapiens
gcggccgctgggtgcgcgtgcgcatgcgcgctggcctccagggggtggcgggaccgagtgtgtgacgcacttgcgtgggagtacgaggctgacgcggcggccctgtccccgtaactgtgacacgggtgcacgcgagcgtcattgggggcgatgggggccgtgctgggtgcgcgtttgcaccagtgacgcagccgctgcatctccgccagtccgcgcaggccagcatccttcagaaaaagcatccccgaggaggaagacgaatcgttaaacatctgaaagggtcaggccagcatccttcagaaaaagcatccccgaggaggaagacgaatcgttaaacatcttaggtcagctctagcctctcggaatttgtcttcttcagtggaaaccccgagaagactgatcagttcttcagttctaaaacaatggcccagggtttggtgacgttcgccgacgtagccatagacttttctcaggaggagtgggcctgtctgaactctgctcagagggacctgtactgggacgtgatgctggagaactacagtaacttggtctcactggatttggagtcagcatatgaaaataagagtttacctacagaaaaaaacattcatgaaataagggcttccaaaaggaattcagatagaagaagtaaatcccttggccgtaactggatatgtgaaggtacgcttgaaagaccacagcgctccagagggaggtatgtcaatcagatgatcatcaattatgtcaaaaggcctgctactagagaaggcacccctcctagaacacatcagagacatcataaggagaattcctttgaatgtaaggactgtgggaaggcctttagtcgtggctatcaacttagtcaacatcagaaaatccatactggtgagaaaccttatgaatgtaaagaatgtaagaaggccttccgttggggcaatcagcttactcaacatcaaaaaattcatactggggagaagccctacgaatgtaaagactgtgggaaggcttttcgatggggctcaagcctcgttattcataagaggattcatactggtgaaaaaccctatgaatgtaaagactgtggaaaggcctttcggcgtggtgatgagctcactcagcaccagagattccacactggggagaaagactacgaatgcaaagactgtgggaagacctttagccgtgtgtataaacttattcagcacaagagaattcatagtggggagaagccttacgagtgtaaagactgtgggaaggcttttatttgtggttcaagcctcattcagcataaaagaattcacacaggtgagaaaccctatgaatgtcaagaatgtgggaaggcctttactcgagtcaattaccttactcagcatcagaagatccacaccggtgagaagcctcacgaatgtaaggagtgtgggaaggcctttcgctggggttcgagcctcgttaagcacgagaggatacatacgggcgagaagccgtacaagtgcacagaatgtgggaaggccttcaattgtggctatcacctcactcagcacgagagaatccacacaggcgaaaccccgtataaatgtaaggagtgtgggaaggctttcatttatggatcgagcctcgtgaaacatgagagaattcataccggggtgaaaccctatgggtgtacagaatgtgggaagagctttagtcacggccatcagcttacacaacatcagaaaacgcacagtggggcgaaatcctacgaatgtaaggagtgcgggaaggcatgtaaccacctaaaccatctccgagaacatcagaggatccacaacagttgaagagccttttgaacgcagtagcccgctcgtatctatggtttcgctttccacagtttgttacctgcagtcaactgcagttcaaaaatattaaatggaaaattccagaaataaagaattttaagtctcaaatggtgtgcccttctgagtagcgtgatgaaatctctcgctgtccggctccagccggccggggatgtgagtcatcccttggtccagcacatccacgctgtatacgccacccaccctgctagtgacttagtagccgtcttggtgatcagatcaactatcccagcatcacagtgcctgtgcccaagcagtcctcactttgcttaacagtggccccagagagcaggagtagtgatgctggtgattcggatatgccaaagagaagccacaaagtgcttccttttaaatgaaaaggtgaaagttctcaacttaaaacagaaaagaaaaaaatcatatactgaggttgctaagatctacatgacaataagatattttggg

SEQ ID NO: 296316 - DNA, 2166 bp, Homo sapiens
aggctttgggtcaacgcagcccgtgcctgtgaacctcggcggtgcgtccctgggactctgctccgtgaggccagcatccttcagaaaaagcatccccgaggaggaagacgaatcgttaaacatctgaaagggtcaggccagcatccttcagaaaaagcatccccgaggaggaagacgaatcgttaaacatcttaggtcagctctagcctctcggaatttgtcttcttcagtggaaaccccgagaagactgatcagttcttcagttctaaaacaatggcccagggtttggtgacgttcgccgacgtagccatagacttttctcaggaggagtgggcctgtctgaactctgctcagagggacctgtactgggacgtgatgctggagaactacagtaacttggtctcactggatttggagtcagcatatgaaaataagagtttacctacagaaaaaaacattcatgaaataagggcttccaaaaggaattcagatagaagaagtaaatcccttggccgtaactggatatgtgaaggtacgcttgaaagaccacagcgctccagagggaggtatgtcaatcagatgatcatcaattatgtcaaaaggcctgctactagagaaggcacccctcctagaacacatcagagacatcataaggagaattcctttgaatgtaaggactgtgggaaggcctttagtcgtggctatcaacttagtcaacatcagaaaatccatactggtgagaaaccttatgaatgtaaagaatgtaagaaggccttccgttggggcaatcagcttactcaacatcaaaaaattcatactggggagaagccctacgaatgtaaagactgtgggaaggcttttcgatggggctcaagcctcgttattcataagaggattcatactggtgaaaaaccctatgaatgtaaagactgtggaaaggcctttcggcgtggtgatgagctcactcagcaccagagattccacactggggagaaagactacgaatgcaaagactgtgggaagacctttagccgtgtgtataaacttattcagcacaagagaattcatagtggggagaagccttacgagtgtaaagactgtgggaaggcttttatttgtggttcaagcctcattcagcataaaagaattcacacaggtgagaaaccctatgaatgtcaagaatgtgggaaggcctttactcgagtcaattaccttactcagcatcagaagatccacaccggtgagaagcctcacgaatgtaaggagtgtgggaaggcctttcgctggggttcgagcctcgttaagcacgagaggatacatacgggcgagaagccgtacaagtgcacagaatgtgggaaggccttcaattgtggctatcacctcactcagcacgagagaatccacacaggcgaaaccccgtataaatgtaaggagtgtgggaaggctttcatttatggatcgagcctcgtgaaacatgagagaattcataccggggtgaaaccctatgggtgtacagaatgtgggaagagctttagtcacggccatcagcttacacaacatcagaaaacgcacagtggggcgaaatcctacgaatgtaaggagtgcgggaaggcatgtaaccacctaaaccatctccgagaacatcagaggatccacaacagttgaagagccttttgaacgcagtagcccgctcgtatctatggtttcgctttccacagtttgttacctgcagtcaactgcagttcaaaaatattaaatggaaaattccagaaataaagaattttaagtctcaaatggtgtgcccttctgagtagcgtgatgaaatctctcgctgtccggctccagccggccggggatgtgagtcatcccttggtccagcacatccacgctgtatacgccacccaccctgctagtgacttagtagccgtcttggtgatcagatcaactatcccagcatcacagtgcctgtgcccaagcagtcctcactttgcttaacagtggccccagagagcaggagtagtgatgctggtgattcggatatgccaaagagaagccacaaagtgcttccttttaaatgaaaaggtgaaagttctcaacttaaaacagaaaagaaaaaaatcatatactgaggttgctaagatctacatgacaataagatattttggg

SEQ ID NO: 296317 - DNA, 3207 bp, Homo sapiens
tgcgtcgaagcttctctggtttcgcattacatttcccagagggccttggggcacagtccaatgaggagcgagccgggtggccggctgaggggcgtgcttcatgctcgcgggatttttaaaaatggtttctcctggatcttatcccaactgcgcctgagaccttgtttcacctcctgatgtgctgggtgtggttaggcctcgagccgggagctatttgcctcccaggaggaagccagggcagggttccgcggggaatggcggtgagggagccactcgggacgcggaggccctaaaatgaagaagcttcggcctgaggcttcgggagcggcgagcagggaagtgggagtgtgtgtgagtggtgtgtgtgtgtgtgtgtgtgtgtgtgtgaataagccagaggctgcctggtggggccccgccgtggcccagtgactgagataattgtcttcgtctgtggggtaatgcgaacaagccccgttcccctaagccgtgatgcatgcggggttgacgcggccgggctctgtccccataaactgtgacacaggtgtgtgtagacgtctatgagggccatagcgccgggctgtaagggcatctgtaggggtgacgcagccgggctgtgtctctgcacctccgttctgtgcgaggtcaatgctggtggggtctgcagaggtggcacggccaggacgggtctccgtgtctctgaaatgtgcctttgcacttctgtcaggttgacagggacaggcagtgtccctctggtgtgagcgtctgtgggtgtgaaagggccagcgagtgtgcggctgtgactggtcgggatcgggcctgggtgcatggccttttgagtgagcacaggtgtgtgcgaccatgtcacctgtctttctagtgtctccgttgcttcctgtgccttggccttccagccatgtggtacctgctagggagcagtggtcccaaagtgacgtgagaggctctacgctgttgtgaaaatgaccaagaagaaggcttcacaagtcacgagatggcagttttggagccagaagtgctctccgtgcacactacctggacgacaagaggaagtaacctcaagaatagaattccttttggggaagaaagagctggccttcaggaaaagcatcccggaggaggaagaagaagtgttatatgtcctaaagtaaggtttcaggccagcatccttcagaaaaagcatccccgaggaggaagacgaatcgttaaacatcttaggtcagctctagcctctcggaatttgtcttcttcagtggaaaccccgagaagactgatcagttcttcagttctaaaacaatggcccagggtttggtgacgttcgccgacgtagccatagacttttctcaggaggagtgggcctgtctgaactctgctcagagggacctgtactgggacgtgatgctggagaactacagtaacttggtctcactggatttggagtcagcatatgaaaataagagtttacctacagaaaaaaacattcatgaaataagggcttccaaaaggaattcagatagaagaagtaaatcccttggccgtaactggatatgtgaaggtacgcttgaaagaccacagcgctccagagggaggtatgtcaatcagatgatcatcaattatgtcaaaaggcctgctactagagaaggcacccctcctagaacacatcagagacatcataaggagaattcctttgaatgtaaggactgtgggaaggcctttagtcgtggctatcaacttagtcaacatcagaaaatccatactggtgagaaaccttatgaatgtaaagaatgtaagaaggccttccgttggggcaatcagcttactcaacatcaaaaaattcatactggggagaagccctacgaatgtaaagactgtgggaaggcttttcgatggggctcaagcctcgttattcataagaggattcatactggtgaaaaaccctatgaatgtaaagactgtggaaaggcctttcggcgtggtgatgagctcactcagcaccagagattccacactggggagaaagactacgaatgcaaagactgtgggaagacctttagccgtgtgtataaacttattcagcacaagagaattcatagtggggagaagccttacgagtgtaaagactgtgggaaggcttttatttgtggttcaagcctcattcagcataaaagaattcacacaggtgagaaaccctatgaatgtcaagaatgtgggaaggcctttactcgagtcaattaccttactcagcatcagaagatccacaccggtgagaagcctcacgaatgtaaggagtgtgggaaggcctttcgctggggttcgagcctcgttaagcacgagaggatacatacgggcgagaagccgtacaagtgcacagaatgtgggaaggccttcaattgtggctatcacctcactcagcacgagagaatccacacaggcgaaaccccgtataaatgtaaggagtgtgggaaggctttcatttatggatcgagcctcgtgaaacatgagagaattcataccggggtgaaaccctatgggtgtacagaatgtgggaagagctttagtcacggccatcagcttacacaacatcagaaaacgcacagtggggcgaaatcctacgaatgtaaggagtgcgggaaggcatgtaaccacctaaaccatctccgagaacatcagaggatccacaacagttgaagagccttttgaacgcagtagcccgctcgtatctatggtttcgctttccacagtttgttacctgcagtcaactgcagttcaaaaatattaaatggaaaattccagaaataaagaattttaagtctcaaatggtgtgcccttctgagtagcgtgatgaaatctctcgctgtccggctccagccggccggggatgtgagtcatcccttggtccagcacatccacgctgtatacgccacccaccctgctagtgacttagtagccgtcttggtgatcagatcaactatcccagcatcacagtgcctgtgcccaagcagtcctcactttgcttaacagtggccccagagagcaggagtagtgatgctggtgattcggatatgccaaagagaagccacaaagtgcttccttttaaatgaaaaggtgaaagttctcaacttaaaacagaaaagaaaaaaatcatatactgaggttgctaagatctacatgacaataagatattttggg

SEQ ID NO: 296318 - DNA, 2086 bp, Homo sapiens
  misc_feature (20)..(20): n is a, c, g, or t
  misc_feature (24)..(24): n is a, c, g, or t
  misc_feature (44)..(44): n is a, c, g, or t
cccgatgcattgtcttccangagnaagacgaatcgttaaacatntgaaagggtcaggccagcatccttcagaaaaagcatccccgaggaggaagacgaatcgttaaacatcttaggtcagctctagcctctcggaatttgtcttcttcagtggaaaccccgagaagactgatcagttcttcagttctaaaacaatggcccagggtttggtgacgttcgccgacgtagccatagacttttctcaggaggagtgggcctgtctgaactctgctcagagggacctgtactgggacgtgatgctggagaactacagtaacttggtctcactggatttggagtcagcatatgaaaataagagtttacctacagaaaaaaacattcatgaaataagggcttccaaaaggaattcagatagaagaagtaaatcccttggccgtaactggatatgtgaaggtacgcttgaaagaccacagcgctccagagggaggtatgtcaatcagatgatcatcaattatgtcaaaaggcctgctactagagaaggcacccctcctagaacacatcagagacatcataaggagaattcctttgaatgtaaggactgtgggaaggcctttagtcgtggctatcaacttagtcaacatcagaaaatccatactggtgagaaaccttatgaatgtaaagaatgtaagaaggccttccgttggggcaatcagcttactcaacatcaaaaaattcatactggggagaagccctacgaatgtaaagactgtgggaaggcttttcgatggggctcaagcctcgttattcataagaggattcatactggtgaaaaaccctatgaatgtaaagactgtggaaaggcctttcggcgtggtgatgagctcactcagcaccagagattccacactggggagaaagactacgaatgcaaagactgtgggaagacctttagccgtgtgtataaacttattcagcacaagagaattcatagtggggagaagccttacgagtgtaaagactgtgggaaggcttttatttgtggttcaagcctcattcagcataaaagaattcacacaggtgagaaaccctatgaatgtcaagaatgtgggaaggcctttactcgagtcaattaccttactcagcatcagaagatccacaccggtgagaagcctcacgaatgtaaggagtgtgggaaggcctttcgctggggttcgagcctcgttaagcacgagaggatacatacgggcgagaagccgtacaagtgcacagaatgtgggaaggccttcaattgtggctatcacctcactcagcacgagagaatccacacaggcgaaaccccgtataaatgtaaggagtgtgggaaggctttcatttatggatcgagcctcgtgaaacatgagagaattcataccggggtgaaaccctatgggtgtacagaatgtgggaagagctttagtcacggccatcagcttacacaacatcagaaaacgcacagtggggcgaaatcctacgaatgtaaggagtgcgggaaggcatgtaaccacctaaaccatctccgagaacatcagaggatccacaacagttgaagagccttttgaacgcagtagcccgctcgtatctatggtttcgctttccacagtttgttacctgcagtcaactgcagttcaaaaatattaaatggaaaattccagaaataaagaattttaagtctcaaatggtgtgcccttctgagtagcgtgatgaaatctctcgctgtccggctccagccggccggggatgtgagtcatcccttggtccagcacatccacgctgtatacgccacccaccctgctagtgacttagtagccgtcttggtgatcagatcaactatcccagcatcacagtgcctgtgcccaagcagtcctcactttgcttaacagtggccccagagagcaggagtagtgatgctggtgattcggatatgccaaagagaagccacaaagtgcttccttttaaatgaaaaggtgaaagttctcaacttaaaacagaaaagaaaaaaatcatatactgaggttgctaagatctacatgacaataagatattttggg

SEQ ID NO: 296319 - DNA, 1466 bp, Homo sapiens
tgcgtcgaagcttctctggtttcgcattacatttcccagagggccttggggcacagtccaatgaggagcgagccgggtggccggctgaggggcgtgcttcatgctcgcgggatttttaaaaatggtttctcctggatcttatcccaactgcgcctgagaccttgtttcacctcctgatgtgctgggtgtggttaggcctcgagccgggagctatttgcctcccaggaggaagccagggcagggttccgcggggaatggcggtgagggagccactcgggacgcggaggccctaaaatgaagaagcttcggcctgaggcttcgggagcggcgagcagggaagtgggagtgtgtgtgagtggtgtgtgtgtgtgtgtgtgtgtgtgtgtgaataagccagaggctgcctggtggggccccgccgtggcccagtgactgagataattgtcttcgtctgtggggtaatgcgaacaagccccgttcccctaagccgtgatgcatgcggggttgacgcggccgggctctgtccccataaactgtgacacaggtgtgtgtagacgtctatgagggccatagcgccgggctgtaagggcatctgtaggggtgacgcagccgggctgtgtctctgcacctccgttctgtgcgaggtcaatgctggtggggtctgcagaggtggcacggccaggacgggtctccgtgtctctgaaatgtgcctttgcacttctgtcaggttgacagggacaggcagtgtccctctggtgtgagcgtctgtgggtgtgaaagggccagcgagtgtgcggctgtgactggtcgggatcgggcctgggtgcatggccttttgagtgagcacaggtgtgtgcgaccatgtcacctgtctttctagtgtctccgttgcttcctgtgccttggccttccagccatgtggtacctgctagggagcagtggtcccaaagtgacgtgagaggctctacgctgttgtgaaaatgaccaagaagaaggcttcacaagtcacgagatggcagttttggagccagaagtgctctccgtgcacactacctggacgacaagaggaagtaacctcaagaatagaattccttttggggaagaaagagctggccttcaggaaaagcatcccggaggaggaagaagaagtgttatatgtcctaaagtaaggtttcaggctggagtgcaatggcatgatctcagctcactggaacctctgcgtcctgggttgcagcgattctcctgcctcagcctcccaagtagctggaattataggcacccaccaccatgcctggctaatttttgtatttttagtagagacggggtttcatcatgttggccaggctggtctcaaactcctgatttcaagttatctgcccgcctcagcctcccaaagtcctgggattacaggtgtgagccaccatgccctgcctttgtcccaatttttaatcaaatttttttttcac

SEQ ID NO: 296320 - DNA, 1240 bp, Homo sapiens
tgcgtcgaagcttctctggtttcgcattacatttcccagagggccttggggcacagtccaatgaggagcgagccgggtggccggctgaggggcgtgcttcatgctcgcgggatttttaaaaatggtttctcctggatcttatcccaactgcgcctgagaccttgtttcacctcctgatgtgctgggtgtggttaggcctcgagccgggagctatttgcctcccaggaggaagccagggcagggttccgcggggaatggcggtgagggagccactcgggacgcggaggccctaaaatgaagaagcttcggcctgaggcttcgggagcggcgagcagggaagtgggagtgtgtgtgagtggtgtgtgtgtgtgtgtgtgtgtgtgtgtgaataagccagaggctgcctggtggggccccgccgtggcccagtgactgagataattgtcttcgtctgtggggtaatgcgaacaagccccgttcccctaagccgtgatgcatgcggggttgacgcggccgggctctgtccccataaactgtgacacaggtgtgtgtagacgtctatgagggccatagcgccgggctgtaagggcatctgtaggggtgacgcagccgggctgtgtctctgcacctccgttctgtgcgaggtcaatgctggtggggtctgcagaggtggcacggccaggacgggtctccgtgtctctgaaatgtgcctttgcacttctgtcaggttgacagggacaggcagtgtccctctggtgtgagcgtctgtgggtgtgaaagggccagcgagtgtgcggctgtgactggtcgggatcgggcctgggtgcatggccttttgagtgagcacaggtgtgtgcgaccatgtcacctgtctttctagtgtctccgttgcttcctgtgccttggccttccagccatgtggtacctgctagggagcagtggtcccaaagtgacgtgagaggctctacgctgttgtgaaaatgaccaagaagaaggcttcacaagtcacgagatggcagttttggagccagaagtgctctccgtgcacactacctggacgacaagaggaagtaacctcaagaatagaattccttttggggaagaaagagctggccttcaggaaaagcatcccggaggaggaagaagaagtgttatatgtcctaaagtaaggtttcagcaagcaagggacaccgaatagcagctccggcagcttgtgctagcggcctgcagagaattccag

SEQ ID NO: 296321 - DNA, 1229 bp, Homo sapiens
tgcgtcgaagcttctctggtttcgcattacatttcccagagggccttggggcacagtccaatgaggagcgagccgggtggccggctgaggggcgtgcttcatgctcgcgggatttttaaaaatggtttctcctggatcttatcccaactgcgcctgagaccttgtttcacctcctgatgtgctgggtgtggttaggcctcgagccgggagctatttgcctcccaggaggaagccagggcagggttccgcggggaatggcggtgagggagccactcgggacgcggaggccctaaaatgaagaagcttcggcctgaggcttcgggagcggcgagcagggaagtgggagtgtgtgtgagtggtgtgtgtgtgtgtgtgtgtgtgtgtgtgaataagccagaggctgcctggtggggccccgccgtggcccagtgactgagataattgtcttcgtctgtggggtaatgcgaacaagccccgttcccctaagccgtgatgcatgcggggttgacgcggccgggctctgtccccataaactgtgacacaggtgtgtgtagacgtctatgagggccatagcgccgggctgtaagggcatctgtaggggtgacgcagccgggctgtgtctctgcacctccgttctgtgcgaggtcaatgctggtggggtctgcagaggtggcacggccaggacgggtctccgtgtctctgaaatgtgcctttgcacttctgtcaggttgacagggacaggcagtgtccctctggtgtgagcgtctgtgggtgtgaaagggccagcgagtgtgcggctgtgactggtcgggatcgggcctgggtgcatggccttttgagtgagcacaggtgtgtgcgaccatgtcacctgtctttctagtgtctccgttgcttcctgtgccttggccttccagccatgtggtacctgctagggagcagtggtcccaaagtgacgtgagaggctctacgctgttgtgaaaatgaccaagaagaaggcttcacaagtcacgagatggcagttttggagccagaagtgctctccgtgcacactacctggacgacaagaggaagtaacctcaagaatagaattccttttggggaagaaagaggtacctgacgtgggaggcggggaggtggtgagaggggcagctccatgtttcagaaccccagttcctagagttttccagcatttctctgaaaaactcacatgcctgtgccctcttatttct

SEQ ID NO: 296322 - DNA, 945 bp, Homo sapiens
aggctttgggtcaacgcagcccgtgcctgtgaacctcggcggtgcgtccctgggactctgctccgtgaggtgcgctctgggggttgtgcgggggcagcggtcgggacgggtctccgtggcccacggatgcacctctgcaccgtgtggggtggtggggcccgtagcatggccgtgctgggcgttagtgggtatgaggggcgcagatgtgtctcaggacagagtgagctgtggtgaggctgagctgtgcagacttgtgctgggatgggtgatcgggccttctgggtgacgcaggtgtgtgtgacaacacaacctgtagcttcagcgtctctgtgctgggatggatgatcgggccttctgagtgatgcaggtgtgtgtgacagtgcaacttgtagctccagcgtctctgctgcttcccctgccttcacctcctaaccaagcggtacctgcctgagaacaagggccgcggagggacgtgagcgcctgagcctcgcctggaaattcaccagcaagaaggcagaaacagccatgaggtgacgctttcagagccagaagtgctgtgcatgcaggccacctgagtgacaggggacggtggcctcaggagtagaattcctcctgtagagggacaggtccctgatgtgggagacagggaggggggcagctccacgcgtcatcatctcaatcgccacagcgtgctcttcaggaatctcccagaaactccatctcggggcctcgtatttctcattggttttattaggtatggcaggtgttacccttccggttctgttttccccaggccagcatccttcagaaaaagcatccccgaggaggaagacgaatcgttaaacatctgaaagggtcaggtgagtatccttttttttttatattaaatgatatgtgtttataagacttaagaccaaacattaaaggtagatgaccaagatttga

SEQ ID NO: 296323 - DNA, 235 bp, Homo sapiens
gcgtgagccaccgcacctggcctgatccatgatactcttcacctttcccagatatgtcacggttatgtgtttgtgttgggaagccaagacagaggagccaaaaggtcatattacatcactatggggaccccagatgcacctcgttttaatctctttttttccacccctagctctagcctctcggaatttgtcttcttcagtggaaaccccgagaagactgatcagttcttcagtt

SEQ ID NO: 296324 - DNA, 326 bp, Homo sapiens
ggtttggtgacgttcgccgacgtagccatagacttttctcaggaggagtgggcctgtctgaactctgctcagagggacctgtactgggacgtgatgctggagaactacagtaacttggtctcactgggtgagttgcacgcctcagataacttagactgcctcctggaatatccgctctcccctgtgaatttcaggaccgcctttcaagaaactagttgaatttcttcttcctgtccccaaggaatgtattgagccttattgatgtggccgtgagcaccacaaccttcccctcccatccatcggttaccttcccacctttgtcgact

SEQ ID NO: 296325 - DNA, 485 bp, Homo sapiens
ggatgctttccattttagatgctttattaacatgttcacctcttaaatggggtaacatttaaatggaagattaggttaaagacttaggttcttttctccctggaatgcttacataacacataatttgtgtgtagttggccttcttcaaggatacttgatttgtattaactgaatttaggctgggcgcagtggctcacacctgtaatcctagcactttgggaggctgaggtgggaagatcacttgagtcaggagttcgagaccagcctggccaatgtggtgaaatcctgtctctactaaaaatacaaaaattagctgggcatcatggcgcacacccataatcccagctactcaggaggctgaggcaggagaattgcttgaacctgggaggcagaggttgcagtaagctaagatcacgccactgcactccagcctgggtgacagagtgagactccgtctcaaaaaaaaaaaaaaaaaaaaaaaagga

SEQ ID NO: 296326 - DNA, 738 bp, Homo sapiens
caaaactggcacacgtgcccatgcaagtgtggcatggatttgatcctggggccatgtttagaaaatggttcccagcgctaagaggatttaaaactcttataataaaagttataatagtaataggaatctgcttactgctcccttgtttgctacctgtacttcttcagatgataaaaagcttcattgttaccttggttcaccaaaatgcttcagcacaagtgtaatatatgaatcactatcgatctgtcttgcaagaaaacataggtagtaaaaataaaagtgagaactcccactattgagagtctcaaagtgggggaataagggaggagaccacccctcatattgtcttatgcccaatttctgcttccaaagaaagaaaaagtaaaaactaaaaggcagaaatgaaatccacaagcagacagcccagcgccacaccctgggcctggtagttaaagatcaacccctgacctaatcggttatgttatctacagattacagacattgtatagaaatgcactgtgaaaatccctatcctgttttgttctaatctaactaccggtgcatgcagcccccagtcatgtaccccctgcttgctcaatcaatcatgaccctctcacacacatccccttagagttgtgaacctttaaaagggacaggaattgctcacttggggagctcagctcttgagacaggagtcttgccaatgcccctggctgaataaaccccttccttctttaa

SEQ ID NO: 296327 - DNA, 1704 bp, Homo sapiens
ggtttcagaaactgcctacttaatttgaaaagaacaatggtaggaaaggctagatcttccaattttaccttatccgaaaagcttgatttgctaaagcttgtgaagccatatgtgaaaattctcgaagaacacactaataaacattcagtaatagtagaaaagaatagatgttgggatatcatagcagttaactataatgcaattggagtagaccgccctcctcgaacagcacagggcctacgcaccctttataaaaggctcaaagaatatgccaaacaggagctattgcagcaaaaagagacccaatcagattttaaaagcaatatttctgagccaaccaagaaagttatggagatgattccccagatttccagtttttgcctggtaagagacaggaaccacatacaaagtgcaaacttggatgaggaggcacaggctggtaccagttcactacaggtaatgttggatcaccatcctgttgctattacagtggaggtgaagcaagaagaagacattaaaccacctcctccactggttttaaattctcaacagagtgatactttagagcaaagagaagaacatgaattagtacatgttatggaaagatccttgtcgccttcactttcctctgttgatatgagaatgacatcgtctccatcttctattccaaggagagatgatttttttcggcatgagagtggtgaacactttaggtcactattagggtatgatcctcagatcctgcaaatgttgaaagaggagcatcagataattttagaaaatcaaaaaaattttggattgtatgttcaggagaagagggatggattgaaaagaaggcagcagctagaggaagagctactaagagcaaaaattgaagtggagaagctgaaagcaattcgcttacggcatgatctacctgaatataacagtctctaagtttttttttcaatcttgcaatttgataattttgattttggccaaattactttaatttgggaatatcctgaaacagaatacacgttcttgaaaaatgttgttaatctctattatggaaaaactttttagatataattttctaattattttcttttgagatattaaaatttactggttggttggcatggttatagtttttattgtcttcttttttttttccctaagtttaattgttgaccttacaaaagatattttattctgatcactaagatatacacaaatgcatatacaaacacatattctttcaaagttctgagtcttcaacatttttagttagaactttgaaagctataattagagatttttaagtcagtctaatttaggagctatactaacctaataccaagaagcttgtctgtatgacattggtttttatgcttttatcttttgaaggagtaaatcctaggattttagagatggaagatatttggagaacactttttttccatctctgcagtttaggggtaatgaaacaggtccagggagaactcaatgacttacttagggtaacaaagctatttatggcagagcagagaccagcacttagtttttctttgtgtaatttccatcccgctattcgatagaagtaaatatccactaaaacattctctagatttaaatattagaagcatttctttcattaaaattgcctttaaagattgttaggttgtgaaatcaggataattacatcaattacccccattctct

SEQ ID NO: 296328 - DNA, 1668 bp, Homo sapiens
ggttaccagaaggacttctttgcagggccagtggtttctgtcagattttcgccggtcacgactgctgaatatgagacgatctgcagcaccaagtcagttgcaggggaattccttcaaaaaaccaaaatttatacctccaggaagaagtaatccaggtctgaatgaagagattacaaaactgaatccagatataaaattatttgagggtgttgcaattaataacacctttctcccgtcacaaaatgatcttagaatatgcagtttaaatctgcctagtgaagaaagtactagagaaatcaataacagagataattgcagtggaaaatattgttttgaagcacctacactggcaacattagatccacctcatacagtgcaaacttggatgaggaggcacaggctggtaccagttcactacaggtaatgttggatcaccatcctgttgctattacagtggaggtgaagcaagaagaagacattaaaccacctcctccactggttttaaattctcaacagagtgatactttagagcaaagagaagaacatgaattagtacatgttatggaaagatccttgtcgccttcactttcctctgttgatatgagaatgacatcgtctccatcttctattccaaggagagatgatttttttcggcatgagagtggtgaacactttaggtcactattagggtatgatcctcagatcctgcaaatgttgaaagaggagcatcagataattttagaaaatcaaaaaaattttggattgtatgttcaggagaagagggatggattgaaaagaaggcagcagctagaggaagagctactaagagcaaaaattgaagtggagaagctgaaagcaattcgcttacggcatgatctacctgaatataacagtctctaagtttttttttcaatcttgcaatttgataattttgattttggccaaattactttaatttgggaatatcctgaaacagaatacacgttcttgaaaaatgttgttaatctctattatggaaaaactttttagatataattttctaattattttcttttgagatattaaaatttactggttggttggcatggttatagtttttattgtcttcttttttttttccctaagtttaattgttgaccttacaaaagatattttattctgatcactaagatatacacaaatgcatatacaaacacatattctttcaaagttctgagtcttcaacatttttagttagaactttgaaagctataattagagatttttaagtcagtctaatttaggagctatactaacctaataccaagaagcttgtctgtatgacattggtttttatgcttttatcttttgaaggagtaaatcctaggattttagagatggaagatatttggagaacactttttttccatctctgcagtttaggggtaatgaaacaggtccagggagaactcaatgacttacttagggtaacaaagctatttatggcagagcagagaccagcacttagtttttctttgtgtaatttccatcccgctattcgatagaagtaaatatccactaaaacattctctagatttaaatattagaagcatttctttcattaaaattgcctttaaagattgttaggttgtgaaatcaggataattacatcaattacccccattctct

SEQ ID NO: 296329 - DNA, 3940 bp, Homo sapiens
tgttaactcctatctgatttttttggatgaaactgttgttttgtttttaaataggagatgaagtaatggatttttttccctcccttaaaatggcatagctgagaaagccccggtactactaattgagatgatctgcttaagagtcttcatattctgaactcgaaaggccttttatgttatattattgctcgctttacgcaactccaaattgctttcctatttaaatgaatgttcttctagtaaactggtgttagatttaaagaaatcactcaagcttcaccttggtaaactgaactcagtttaagattaagaaactgatttcggccgggtgcggtggctcacgcctgtaattccagcactttgggaggcccgggcgggcggatcacctgaggtcaggagttcaagaccagcctgactaatatggtgaaaccccgtttctactaaaaatacaaaaaaattagccgggtgtcgtggcttgtgcctgtagtcccagctactccggagtctgagacaggaaaattgcttgaacccgggaggcggaggttgcagtatgccgagatcgctgcacttcagcctgggcgacagagcgagactccgtaaaaaaaagaaaaaaaaaaaaaataaaagaaactggtttcaaattggccctttggcctctggagcaaattcaaatgtaactcttccccaatcccccttctcttcttccagattaattaaaagaagaatgaactataatccttgaagataactgggcaattttttaagtcggaggctgttcttactggtgtgaggatttacacacgtcttcagtttttcagcacagaccagcagaccatcatttttagaggaaatactccctctgccctcctttttggtttccttggtggtaaagattaaatttggttgcatcattttgacttgtgtttgagtctagattttatggcacaaggaatggcataaacttttcatgtgttttggttaaaacaaaccagaccattgcattgaccctggacatctttaattgagaaattggtaactttattttaatatgtatatctgaagaattcaagaaaacaaaggcatcctcagaggtgtgcctcttttctttattattagaggcaaaacgaacaattttataggatttgtagtgaaattataccagattataaggagaaccaaaactaagtcgcaaaatttattaatttaaggggctctcgctttgaaagtttgagagtaagttacgataggcatttgtatccattcattactttcctcttttcaaataagcaactaaatagaaatgctaatctcagacttaattatttaacagaagagtgtaccatggaaaacctccagacaaatttctccttggttcagggctcaactaaaaaactgaatgggatgggagatgatggcagccccccagcgaaaaaaatgataacggacattcatgtaaatggaaaaacgataaacaaggtgccaacagttaagaaggaacacttggatgactatggagaagcaccagtggaaactgatggagagcatgttaagcgaacctgtacttctgttcctgaaactttgcatttaaatcccagtttgaaacacacattggcacaattccatttaagtagtcagagctcgctgggtggaccagcagcattttctgctcggcattcccaagaaagcatgtcgcctactgtatttctgcctcttccatcacctcaggttcttcctggcccattgctcatcccttcagatagctccacagaactcactcagactgtgttggaaggggaatctatttcttgttttcaagttggaggagaaaagagactctgtttgccccaagtcttaaattctgttctccgagaatttacactccagcaaataaatacagtgtgtgatgaactgtacatatattgttcaaggtgtacttcagaccagcttcatatcttaaaggtactgggcatacttccattcaatgccccatcctgtgggctgattacattaactgatgcacaaagattatgtaatgctttattgcggccacgaacttttcctcaaaatggtagcgtacttcctgctaaaagctcattggcccagttaaaggaaactggcagtgcctttgaagtggagcatgaatgcctaggcaaatgtcagggtttatttgcaccccagttttatgttcagcctgatgctccgtgtattcaatgtctggagtgttgtggaatgtttgcaccccagacgtttgtgatgcattctcacagatcacctgacaaaagaacttgccactggggctttgaatcagctaaatggcattgctatcttcatgtgaaccaaaaatacttaggaacacctgaagaaaagaaactgaagataattttagaagaaatgaaggagaagtttagcatgagaagtggaaagagaaatcaatccaagacagatgcaccatcaggaatggaattacagtcatggtatcctgttataaagcaggaaggtgaccatgtttctcagacacattcatttttacaccccagctactacttatacatgtgtgataaagtggttgccccaaatgtgtcacttacttctgctgtatcccagtctaaagagctcacaaagacagaggcaagtaagtccatatcaagacagtcagagaaggctcacagtagtggtaaacttcaaaaaacagtgtcttatccagatgtctcacttgaggaacaggagaaaatggatttaaaaacaagtagagaattatgtagccgtttagatgcatcaatctcaaataattctacaagtaaaaggaaatctgagtctgccacttgcaacttagtcagagacataaacaaagtgggaattggccttgttgctgccgcttcatctccgcttcttgtgaaagatgtcatttgtgaggatgataagggaaaaatcatggaagaagtaatgagaacttatttaaaacaacaggaaaaactaaacttgattttgcaaaagaagcaacaacttcagatggaagtaaaaatgttgagtagttcaaaatctatgaaggaactcactgaagaacagcagaatttacagaaagagcttgaatctttgcagaatgaacatgctcaaagaatggaagaattttatgttgaacagaaagacttagagaaaaaattggagcagataatgaagcaaaaatgtacctgtgactcaaatttagaaaaagacaaagaggctgaatatgcaggacagttggcagaactgaggcagagattggaccatgctgaggccgataggcaagaactccaagatgaactcagacaggaacgggaagcaagacagaagttagagatgatgataaaagagctaaagctgcaaattctgaaatcatcaaagactgctaaagaatagaaactgttaaagagattcatctgtgtattactgacaaggttttttttgtttgttgcttgctttggtaattgaattctgaagaatttatctgcatgacgataactaggcattctatccatttgtagatcagagaaagtgaagagattatatattagtacttaaatttttacattttccaaatgaatgaaaatgtatgtttctttgtacttttttaaaaaaatcagcttagtaacaatactatatggtttcaactagtaggtaatctgcttatatttctaatgcaaacttaacaattgtgtactttttaaaagctgcaatatgtgttggaaaatagctgtggtcaattttgttatccatatttcagactcaattttagatacaatggtggctttatattttaagtatatagagctactcaaggagttgaatctccccttttctcattaacacaatttttctaagttgatatggtgtactcattaacatacaccaaatttacttttactttgttcagattgtggaatgaatttccaccagttctctt

SEQ ID NO: 296330 - DNA, 3547 bp, Homo sapiens
gagacagagtctcgctgtctcccaggctggagttcagtggtgcaatctcggctcactgcaagctctgcctcctgggttcaagccattctcctgctcccagctactccggagtctgagacaggaaaattgcttgaacccgggaggcggaggttgcagtatgccgagatcgctgcacttcagcctgggcgacagagcgagactccgtaaaaaaaagaaaaaaaaaaaaaataaaagaaactggtttcaaattggccctttggcctctggagcaaattcaaatgtaactcttccccaatcccccttctcttcttccagattaattaaaagaagaatgaactataatccttgaagataactgggcaattttttaagtcggaggctgttcttactggtgtgaggatttacacacgtcttcagtttttcagcacagaccagcagaccatcatttttagaggaaatactccctctgccctcctttttggtttccttggtggtaaagattaaatttggttgcatcattttgacttgtgtttgagtctagattttatggcacaaggaatggcataaacttttcatgtgttttggttaaaacaaaccagaccattgcattgaccctggacatctttaattgagaaattggtaactttattttaatatgtatatctgaagaattcaagaaaacaaaggcatcctcagaggtgtgcctcttttctttattattagaggcaaaacgaacaattttataggatttgtagtgaaattataccagattataaggagaaccaaaactaagtcgcaaaatttattaatttaaggggctctcgctttgaaagtttgagagtaagttacgataggcatttgtatccattcattactttcctcttttcaaataagcaactaaatagaaatgctaatctcagacttaattatttaacagaagagtgtaccatggaaaacctccagacaaatttctccttggttcagggctcaactaaaaaactgaatgggatgggagatgatggcagccccccagcgaaaaaaatgataacggacattcatgtaaatggaaaaacgataaacaaggtgccaacagttaagaaggaacacttggatgactatggagaagcaccagtggaaactgatggagagcatgttaagcgaacctgtacttctgttcctgaaactttgcatttaaatcccagtttgaaacacacattggcacaattccatttaagtagtcagagctcgctgggtggaccagcagcattttctgctcggcattcccaagaaagcatgtcgcctactgtatttctgcctcttccatcacctcaggttcttcctggcccattgctcatcccttcagatagctccacagaactcactcagactgtgttggaaggggaatctatttcttgttttcaagttggaggagaaaagagactctgtttgccccaagtcttaaattctgttctccgagaatttacactccagcaaataaatacagtgtgtgatgaactgtacatatattgttcaaggtgtacttcagaccagcttcatatcttaaaggtactgggcatacttccattcaatgccccatcctgtgggctgattacattaactgatgcacaaagattatgtaatgctttattgcggccacgaacttttcctcaaaatggtagcgtacttcctgctaaaagctcattggcccagttaaaggaaactggcagtgcctttgaagtggagcatgaatgcctaggcaaatgtcagggtttatttgcaccccagttttatgttcagcctgatgctccgtgtattcaatgtctggagtgttgtggaatgtttgcaccccagacgtttgtgatgcattctcacagatcacctgacaaaagaacttgccactggggctttgaatcagctaaatggcattgctatcttcatgtgaaccaaaaatacttaggaacacctgaagaaaagaaactgaagataattttagaagaaatgaaggagaagtttagcatgagaagtggaaagagaaatcaatccaagacagatgcaccatcaggaatggaattacagtcatggtatcctgttataaagcaggaaggtgaccatgtttctcagacacattcatttttacaccccagctactacttatacatgtgtgataaagtggttgccccaaatgtgtcacttacttctgctgtatcccagtctaaagagctcacaaagacagaggcaagtaagtccatatcaagacagtcagagaaggctcacagtagtggtaaacttcaaaaaacagtgtcttatccagatgtctcacttgaggaacaggagaaaatggatttaaaaacaagtagagaattatgtagccgtttagatgcatcaatctcaaataattctacaagtaaaaggaaatctgagtctgccacttgcaacttagtcagagacataaacaaagtgggaattggccttgttgctgccgcttcatctccgcttcttgtgaaagatgtcatttgtgaggatgataagggaaaaatcatggaagaagtaatgagaacttatttaaaacaacaggaaaaactaaacttgattttgcaaaagaagcaacaacttcagatggaagtaaaaatgttgagtagttcaaaatctatgaaggaactcactgaagaacagcagaatttacagaaagagcttgaatctttgcagaatgaacatgctcaaagaatggaagaattttatgttgaacagaaagacttagagaaaaaattggagcagataatgaagcaaaaatgtacctgtgactcaaatttagaaaaagacaaagaggctgaatatgcaggacagttggcagaactgaggcagagattggaccatgctgaggccgataggcaagaactccaagatgaactcagacaggaacgggaagcaagacagaagttagagatgatgataaaagagctaaagctgcaaattctgaaatcatcaaagactgctaaagaatagaaactgttaaagagattcatctgtgtattactgacaaggttttttttgtttgttgcttgctttggtaattgaattctgaagaatttatctgcatgacgataactaggcattctatccatttgtagatcagagaaagtgaagagattatatattagtacttaaatttttacattttccaaatgaatgaaaatgtatgtttctttgtacttttttaaaaaaatcagcttagtaacaatactatatggtttcaactagtaggtaatctgcttatatttctaatgcaaacttaacaattgtgtactttttaaaagctgcaatatgtgttggaaaatagctgtggtcaattttgttatccatatttcagactcaattttagatacaatggtggctttatattttaagtatatagagctactcaaggagttgaatctccccttttctcattaacacaatttttctaagttgatatggtgtactcattaacatacaccaaatttacttttactttgttcagattgtggaatgaatttccaccagttctctt

SEQ ID NO: 296331 - DNA, 3802 bp, Homo sapiens
tgttaactcctatctgatttttttggatgaaactgttgttttgtttttaaataggagatgaagtaatggatttttttccctcccttaaaatggcatagctgagaaagccccggtactactaattgagatgatctgcttaagagtcttcatattctgaactcgaaaggccttttatgttatattattgctcgctttacgcaactccaaattgctttcctatttaaatgaatgttcttctagtaaactggtgttagatttaaagaaatcactcaagcttcaccttggtaaactgaactcagtttaagattaagaaactgatttcggccgggtgcggtggctcacgcctgtaattccagcactttgggaggcccgggcgggcggatcacctgaggtcaggagttcaagaccagcctgactaatatggtgaaaccccgtttctactaaaaatacaaaaaaattagccgggtgtcgtggcttgtgcctgtagtcccagctactccggagtctgagacaggaaaattgcttgaacccgggaggcggaggttgcagtatgccgagatcgctgcacttcagcctgggcgacagagcgagactccgtaaaaaaaagaaaaaaaaaaaaaataaaagaaactggtttcaaattggccctttggcctctggagcaaattcaaatgtaactcttccccaatcccccttctcttcttccagattaattaaaagaagaatgaactataatccttgaagataactgggcaattttttaagtcggaggctgttcttactggtgtgaggatttacacacgtcttcagtttttcagcacagaccagcagaccatcatttttagaggaaatactccctctgccctcctttttggtttccttggtggtaaagattaaatttggttgcatcattttgacttgtgtttgagtctagattttatggcacaaggaatggcataaacttttcatgtgttttggttaaaacaaaccagaccattgcattgaccctggacatctttaattgagaaattggtaactttattttaatatgtatatctgaagaattcaagaaaacaaaggcatcctcagaggtgtgcctcttttctttattattagaggcaaaacgaacaattttataggatttgtagtgaaattataccagattataaggagaaccaaaactaagtcgcaaaatttattaatttaaggggctctcgctttgaaagtttgagagtaagttacgataggcatttgtatccattcattactttcctcttttcaaataagcaactaaatagaaatgctaatctcagacttaattatttaacagaagagtgtaccatggaaaacctccagacaaatttctccttggttcagggctcaactaaaaaactgaatgggatgggagatgatggcagccccccagcgaaaaaaatgataacggacattcatgtaaatggaaaaacgataaacaaggtgccaacagttaagaaggaacacttggatgactatggagaagcaccagtggaaactgatggagagcatgttaagcgaacctgtacttctgttcctgaaactttgcatttaaatcccagtttgaaacacacattggcacaattccatttaagtagtcagagctcgctgggtggaccagcagcattttctgctcggcattcccaagaaagcatgtcgcctactgtatttctgcctcttccatcacctcaggttcttcctggcccattgctcatcccttcagatagctccacagaactcactcagactgtgttggaaggggaatctatttcttgttttcaagttggaggagaaaagagactctgtttgccccaagtcttaaattctgttctccgagaatttacactccagcaaataaatacagtgtgtgatgaactgtacatatattgttcaaggtgtacttcagaccagcttcatatcttaaaggtactgggcatacttccattcaatgccccatcctgtgggctgattacattaactgatgcacaaagattatgtaatgctttattgcggccacgaacttttcctcaaaatggtagcgtacttcctgctaaaagctcattggcccagttaaaggaaactggcagtgcctttgaagtggagcatgaatgcctaggcaaatgtcagggtttatttgcaccccagttttatgttcagcctgatgctccgtgtattcaatgtctggagtgttgtggaatgtttgcaccccagacgtttgtgatgcattctcacagatcacctgacaaaagaacttgccactggggctttgaatcagctaaatggcattgctatcttcatgtgaaccaaaaatacttaggaacacctgaagaaaagaaactgaagataattttagaagaaatgaaggagaagtttagcatgagaagtggaaagagaaatcaatccaagacagatgcaccatcaggaatggaattacagtcatggtatcctgttataaagcaggaaggtgaccatgtttctcagacacattcatttttacaccccagctactacttatacatgtgtgataaagtggttgccccaaatgtgtcacttacttctgctgtatcccagtctaaagagctcacaaagacagaggcaaatgcatcaatctcaaataattctacaagtaaaaggaaatctgagtctgccacttgcaacttagtcagagacataaacaaagtgggaattggccttgttgctgccgcttcatctccgcttcttgtgaaagatgtcatttgtgaggatgataagggaaaaatcatggaagaagtaatgagaacttatttaaaacaacaggaaaaactaaacttgattttgcaaaagaagcaacaacttcagatggaagtaaaaatgttgagtagttcaaaatctatgaaggaactcactgaagaacagcagaatttacagaaagagcttgaatctttgcagaatgaacatgctcaaagaatggaagaattttatgttgaacagaaagacttagagaaaaaattggagcagataatgaagcaaaaatgtacctgtgactcaaatttagaaaaagacaaagaggctgaatatgcaggacagttggcagaactgaggcagagattggaccatgctgaggccgataggcaagaactccaagatgaactcagacaggaacgggaagcaagacagaagttagagatgatgataaaagagctaaagctgcaaattctgaaatcatcaaagactgctaaagaatagaaactgttaaagagattcatctgtgtattactgacaaggttttttttgtttgttgcttgctttggtaattgaattctgaagaatttatctgcatgacgataactaggcattctatccatttgtagatcagagaaagtgaagagattatatattagtacttaaatttttacattttccaaatgaatgaaaatgtatgtttctttgtacttttttaaaaaaatcagcttagtaacaatactatatggtttcaactagtaggtaatctgcttatatttctaatgcaaacttaacaattgtgtactttttaaaagctgcaatatgtgttggaaaatagctgtggtcaattttgttatccatatttcagactcaattttagatacaatggtggctttatattttaagtatatagagctactcaaggagttgaatctccccttttctcattaacacaatttttctaagttgatatggtgtactcattaacatacaccaaatttacttttactttgttcagattgtggaatgaatttccaccagttctctt

SEQ ID NO: 296332 - DNA, 3672 bp, Homo sapiens
  misc_feature (2901)..(2903): n is a, c, g, or t
  misc_feature (3346)..(3346): n is a, c, g, or t
  misc_feature (3349)..(3349): n is a, c, g, or t
tgttaactcctatctgatttttttggatgaaactgttgttttgtttttaaataggagatgaagtaatggatttttttccctcccttaaaatggcatagctgagaaagccccggtactactaattgagatgatctgcttaagagtcttcatattctgaactcgaaaggccttttatgttatattattgctcgctttacgcaactccaaattgctttcctatttaaatgaatgttcttctagtaaactggtgttagatttaaagaaatcactcaagcttcaccttggtaaactgaactcagtttaagattaagaaactgatttcggccgggtgcggtggctcacgcctgtaattccagcactttgggaggcccgggcgggcggatcacctgaggtcaggagttcaagaccagcctgactaatatggtgaaaccccgtttctactaaaaatacaaaaaaattagccgggtgtcgtggcttgtgcctgtagtcccagctactccggagtctgagacaggaaaattgcttgaacccgggaggcggaggttgcagtatgccgagatcgctgcacttcagcctgggcgacagagcgagactccgtaaaaaaaagaaaaaaaaaaaaaataaaagaaactggtttcaaattggccctttggcctctggagcaaattcaaatgtaactcttccccaatcccccttctcttcttccagattaattaaaagaagaatgaactataatccttgaagataactgggcaattttttaagtcggaggctgttcttactggtgtgaggatttacacacgtcttcagtttttcagcacagaccagcagaccatcatttttagaggaaatactccctctgccctcctttttggtttccttggtggtaaagattaaatttggttgcatcattttgacttgtgtttgagtctagattttatggcacaaggaatggcataaacttttcatgtgttttggttaaaacaaaccagaccattgcattgaccctggacatctttaattgagaaattggtaactttattttaatatgtatatctgaagaattcaagaaaacaaaggcatcctcagaggtgtgcctcttttctttattattagaggcaaaacgaacaattttataggatttgtagtgaaattataccagattataaggagaaccaaaactaagtcgcaaaatttattaatttaaggggctctcgctttgaaagtttgagagtaagttacgataggcatttgtatccattcattactttcctcttttcaaataagcaactaaatagaaatgctaatctcagacttaattatttaacagaagagtgtaccatggaaaacctccagacaaatttctccttggttcagggctcaactaaaaaactgaatgggatgggagatgatggcagccccccagcgaaaaaaatgataacggacattcatgtaaatggaaaaacgataaacaaggtgccaacagttaagaaggaacacttggatgactatggagaagcaccagtggaaactgatggagagcatgttaagcgaacctgtacttctgttcctgaaactttgcatttaaatcccagtttgaaacacacattggcacaattccatttaagtagtcagagctcgctgggtggaccagcagcattttctgctcggcattcccaagaaagcatgtcgcctactgtatttctgcctcttccatcacctcaggttcttcctggcccattgctcatcccttcagatagctccacagaactcactcagactgtgttggaaggggaatctatttcttgttttcaagttggaggagaaaagagactctgtttgccccaagtcttaaattctgttctccgagaatttacactccagcaaataaatacagtgtgtgatgaactgtacatatattgttcaaggtgtacttcagaccagcttcatatcttaaaggtactgggcatacttccattcaatgccccatcctgtgggctgattacattaactgatgcacaaagattatgtaatgctttattgcggccacgaacttttcctcaaaatggtagcgtacttcctgctaaaagctcattggcccagttaaaggaaactggcagtgcctttgaagtggagcatgaatgcctaggcaaatgtcagggtttatttgcaccccagttttatgttcagcctgatgctccgtgtattcaatgtctggagtgttgtggaatgtttgcaccccagacgtttgtgatgcattctcacagatcacctgacaaaagaacttgccactggggctttgaatcagctaaatggcattgctatcttcatgtgaaccaaaaatacttaggaacacctgaagaaaagaaactgaagataattttagaagaaatgaaggagaagtttagcatgagaagtggaaagagaaatcaatccaaggcaagttttttatatcaatttttaataatggtaatggtttactttgaaatgaaaattctatgtttagtgtgtaacttaacctgtatgttgaacattgctcatgcaacaacaacaaaataccgattgatatatttgtattgcagtttttaggccataaagtgctttgcagtatgtttcctcatttgactttccaaacatcctgtgagagaagtaagactattattccgttttacagataaagtgaatgaagctcagagagataaaatgactttcccaaaattatgtagccagggagtggaggagttagggcttctttttttttttttttgtgcttttagtagaggccaggtttcagcatgttggccaggctggtcttgaactcctgaccgcgtgatccgcccaccttggcctcccaaagggctgggattacatccttgagcccctgtgtccagccagggcttnnntttcttatcctctttggcacacatcttgcttcttgaccactacatctgttgtttttctaggactcgataatttgcgctttggtgttatctccatttgcaaatggtacaatggccacaattcccgtgggctcaaaacagcattttcagagatacacctatgatttctgatgtttctatgtttggatattcaggcttgctcaatatttgaaacaaatggaaaagacatgtatctgaagaatttgtgatttgaaaggaataacaaaaaaaatgacagctagagtaaggaaaagttattttaaactaataaaatattaatataaaaacctgccgggctcagtggctcacacctgtaatcccaacactttggggggctgaagtaggtggatcacctgaggtcaggagtttgagaccagcctggccaacatggtgaaatcccatctctnctnaaaatacaaaaattagacggatgtggtgtcgcacacttgtaatcccagctactcaggagctgaggcaggagaatcgcttgaaccccggaggcggaggttgtagtgagccgagattgtgccattgcgctccagcgtaggcgtcgagggaaactccatcaaaaaacaaaacaaaacaaacaaacaacctatcaacaggtgggagcaatgaatggctcacaatcccagcactttgggaggcccaggtgggcagatcacttcaggtcaggagtttgagaccagcctggccaacatggtaaaaccccatctctactaaaaatacaaaa

SEQ ID NO: 296333 - DNA, 3369 bp, Homo sapiens
taggggctcccccattctaggtcatgcctcttgctctcttccttggcctgtgttgagtaaggtgtgttcctgtggtggacgaaagtctgtacgatggttggtggcattggtccttaatcctttgggtctgttttaagattaattaaaagaagaatgaactataatccttgaagataactgggcaattttttaagtcggaggctgttcttactggtgtgaggatttacacacgtcttcagtttttcagcacagaccagcagaccatcatttttagaggaaatactccctctgccctcctttttggtttccttggtggtaaagattaaatttggttgcatcattttgacttgtgtttgagtctagattttatggcacaaggaatggcataaacttttcatgtgttttggttaaaacaaaccagaccattgcattgaccctggacatctttaattgagaaattggtaactttattttaatatgtatatctgaagaattcaagaaaacaaaggcatcctcagaggtgtgcctcttttctttattattagaggcaaaacgaacaattttataggatttgtagtgaaattataccagattataaggagaaccaaaactaagtcgcaaaatttattaatttaaggggctctcgctttgaaagtttgagagtaagttacgataggcatttgtatccattcattactttcctcttttcaaataagcaactaaatagaaatgctaatctcagacttaattatttaacagaagagtgtaccatggaaaacctccagacaaatttctccttggttcagggctcaactaaaaaactgaatgggatgggagatgatggcagccccccagcgaaaaaaatgataacggacattcatgtaaatggaaaaacgataaacaaggtgccaacagttaagaaggaacacttggatgactatggagaagcaccagtggaaactgatggagagcatgttaagcgaacctgtacttctgttcctgaaactttgcatttaaatcccagtttgaaacacacattggcacaattccatttaagtagtcagagctcgctgggtggaccagcagcattttctgctcggcattcccaagaaagcatgtcgcctactgtatttctgcctcttccatcacctcaggttcttcctggcccattgctcatcccttcagatagctccacagaactcactcagactgtgttggaaggggaatctatttcttgttttcaagttggaggagaaaagagactctgtttgccccaagtcttaaattctgttctccgagaatttacactccagcaaataaatacagtgtgtgatgaactgtacatatattgttcaaggtgtacttcagaccagcttcatatcttaaaggtactgggcatacttccattcaatgccccatcctgtgggctgattacattaactgatgcacaaagattatgtaatgctttattgcggccacgaacttttcctcaaaatggtagcgtacttcctgctaaaagctcattggcccagttaaaggaaactggcagtgcctttgaagtggagcatgaatgcctaggcaaatgtcagggtttatttgcaccccagttttatgttcagcctgatgctccgtgtattcaatgtctggagtgttgtggaatgtttgcaccccagacgtttgtgatgcattctcacagatcacctgacaaaagaacttgccactggggctttgaatcagctaaatggcattgctatcttcatgtgaaccaaaaatacttaggaacacctgaagaaaagaaactgaagataattttagaagaaatgaaggagaagtttagcatgagaagtggaaagagaaatcaatccaagacagatgcaccatcaggaatggaattacagtcatggtatcctgttataaagcaggaaggtgaccatgtttctcagacacattcatttttacaccccagctactacttatacatgtgtgataaagtggttgccccaaatgtgtcacttacttctgctgtatcccagtctaaagagctcacaaagacagaggcaagtaagtccatatcaagacagtcagagaaggctcacagtagtggtaaacttcaaaaaacagtgtcttatccagatgtctcacttgaggaacaggagaaaatggatttaaaaacaagtagagaattatgtagccgtttagatgcatcaatctcaaataattctacaagtaaaaggaaatctgagtctgccacttgcaacttagtcagagacataaacaaagtgggaattggccttgttgctgccgcttcatctccgcttcttgtgaaagatgtcatttgtgaggatgataagggaaaaatcatggaagaagtaatgagaacttatttaaaacaacaggaaaaactaaacttgattttgcaaaagaagcaacaacttcagatggaagtaaaaatgttgagtagttcaaaatctatgaaggaactcactgaagaacagcagaatttacagaaagagcttgaatctttgcagaatgaacatgctcaaagaatggaagaattttatgttgaacagaaagacttagagaaaaaattggagcagataatgaagcaaaaatgtacctgtgactcaaatttagaaaaagacaaagaggctgaatatgcaggacagttggcagaactgaggcagagattggaccatgctgaggccgataggcaagaactccaagatgaactcagacaggaacgggaagcaagacagaagttagagatgatgataaaagagctaaagctgcaaattctgaaatcatcaaagactgctaaagaatagaaactgttaaagagattcatctgtgtattactgacaaggttttttttgtttgttgcttgctttggtaattgaattctgaagaatttatctgcatgacgataactaggcattctatccatttgtagatcagagaaagtgaagagattatatattagtacttaaatttttacattttccaaatgaatgaaaatgtatgtttctttgtacttttttaaaaaaatcagcttagtaacaatactatatggtttcaactagtaggtaatctgcttatatttctaatgcaaacttaacaattgtgtactttttaaaagctgcaatatgtgttggaaaatagctgtggtcaattttgttatccatatttcagactcaattttagatacaatggtggctttatattttaagtatatagagctactcaaggagttgaatctccccttttctcattaacacaatttttctaagttgatatggtgtactcattaacatacaccaaatttacttttactttgttcagattgtggaatgaatttccaccagttctctt

SEQ ID NO: 296334 - DNA, 403 bp, Homo sapiens
cactgcactccagcctgggcaacagagcgagactacgtctcaaaacgaaacaaacaaacaaaaaaaccgcaaaacccagtcaagataacagtaaatgcagcagataagttcccagatgccaataaggaaatcactgaattatggaagctcttattgcccaggctggagtatccagcctgggcaataagagctactccagcaaagtgtctggcatatagtaggtgctcaacacctgagtgaatggcttctgtgagagcaggaaggtgagtgaatggaaattttttccttaaggcttacaggggcagctccgacctagagacatccgttgcaacctttcattctcacacccttcccaaggccgtcacggtccatatctgcaccccagtctgtgcttatcacacaa

SEQ ID NO: 296335 - DNA, 1084 bp, Homo sapiens
gaagcaaccatgtagatgagagatatttatgatttcttctggacttttttttctccagggcatggagagagtggagaaggaaataaattctcttttcttcttggatccgttttttttgttttttttttcattaaaaaaatgggggtgggggcaagggtcctgagaactcagagatgagcctgtttacacacaaactcttaagtaatagtgaatggaaataacataatgctgtcctgaaacccagagactctgccctcagtccctccctttccccataaaccccactcacaagtcagtctggggcattgcctataaggctcctgtccttcctttaggactcagtgcagtgttctgcattggtgcccccacaacatgtccatcaaacaccttttcattctcagaccattaccttctacagagaatgtctgctcgtattattcattctttcttctttgtcccctaaacttacaccctccttgcttatcacctcattccccaaccagtttcaagaacagatgaagggttaatactggtaaccgtcagtattctctgcccttcctgtagtcccggaaatagaaattgtgagtccggttcctcatccaggaaaggggcagagcatggaagagccagggctgggcgcctactccaagatcaccgtggggaagggatctggcccatgccaagattctgctgctccatcaggtctcttaagtgctctgaagctccatgttctcgactgtaaataaccatgatgctgactgcaccagcttaatgtgaggattaaaggaagtatggaccatggaagactctggagcacagaagctatttaaatgtttgttgaatccacattgtagtctctgaaataatctcgtgctttgccctgtccttctcctggtagtaaggggagcctgagcagtagccctacccccctgcctgctccatccacctctcacctgctgtggccaccttcttgaaaacagcagcctctgcattcctgggccactttctctgctgtgttttaataacacagcactcatcactttctgatatgtgataaatacaattaaatttccacaatggcaag

SEQ ID NO: 296336 - DNA, 384 bp, Homo sapiens
ttctcatcattaggctgtgaaatagatggtattactctgtattagagatgaggagggaacagagtctaagtatgtaattagatcaaaattacacagctagtaattggcagagtgagggtttgaatccaggtcttactgaatacgaagtccattcccttaccattaatctgagtcttcttgttaaaacatgtgttggaggccacacgcggtggctcacgcatgtaatcccagcactttgggaggccgaggcagatggatcacttgaggtcaggagtttgagaccagcctggccaatatggtgaaaccctgtgtctactaaagatacaaaaattagctgcatgtggtggtgcatgcctgtcctcccagctgctcaggaggctgatg

SEQ ID NO: 296337 - DNA, 283 bp, Homo sapiens
tttttctttttttattgataggtaatgtacatagtttcagggtacatgtgataatttaatacattaatataatttgtaaagataaatcagcatacttgggatagccatcaccttaactacttcacagctgaactgtgcagcttttattactgaatattattcccttaatatttatgctaggaacatttgaattaatctagctattttgaaatgtacaatcaaatattataaactctggtcaccctgtgatctatcttaacagtaggtctcattctattataat

SEQ ID NO: 296338 - DNA, 587 bp, Homo sapiens
ccggtctcagctctgggagggaacgggagatgttgcaggcgccgagagggcgggccagggccgcactccggagactcgcggttgctacgcgcaccatggctggagcgcccacggtctcgcttcctgaactccgttcactcctagcctccggacgggcccggctcttcgatgtgcgctctcgcgaggaggcggcagctgggaccatcccaggggcgctcaacatcccggtgtccgagttggagagtgctctgcagatggagccagctgccttccaggctttatattctgctgagaagccaaagctggaagatgagcatctcgttttcttctgtcagatgggcaagcggggcctccaggccacgcagctggcccggagtcttggatacactggggctcgcaactacgctggagcctatagagaatggttggagaaagagagttaggcaggaggcagcttactgattgccaccccctggccccttaatggccaccttaactaagggtgtgaacgggctgacttggtgaattgggcaactccttatagtgttgtgcacacaaaagcatcaaataaagaacatttaatcaaa

SEQ ID NO: 296339 - DNA, 896 bp, Homo sapiens
  misc_feature (896)..(896): n is a, c, g, or t
ccggtctcagctctgggagggaacgggagatgttgcaggcgccgagagggcgggccagggccgcactccggagactcgcggttgctacgcgcaccatggctggagcgcccacggtctcgcttcctgaactccgttcactcctagcctccggacgggcccggctcttcgatgtgcgctctcgcgaggaggcggcagctgggaccatcccaggggcgctcaacatcccggtgtccgagttggagagtgctctgcagatggagccagctgccttccaggctttatattctgctgagaagccaaagctggaagatgagcatctcgttttcttctgtcagatgggcaagcggggcctccaggccacgcagctggcccggagtcttggatacactggggctcgcaactacgctggagcctatagagaatggttggagaaagagagttaggcaggaggcagcttactgattgccaccccctggccccttaatggccaccttaactaagggtgtgaacgggctgacttggtgaattgggcaactccttatagtgttgtgcacacaaaagcatcaaataaagaacatttaatcaaaaaaaaaaaaaaaaaaaaaaaaaaaaaagggcggggagaacaaaaccaccggaggaggaccacatacatcacaccaagtctgttggaaggaagagaccaagaaagaaacacaaaacgaggcgggggccgaacaaacggtggggggaaacggtcgtgtctcggaaaaccctgctggggggcacagccaaccacacaaagagcgacgaaaaataagttggcgacaacctggcgtcaacgtccgttatatgagagtaataagaatagcaacgatgaaacacaaggcaaagagcacagacaactcacaggcagn

SEQ ID NO: 296340 - DNA, 448 bp, Homo sapiens
  misc_feature (9)..(9): n is a, c, g, or t
  misc_feature (17)..(17): n is a, c, g, or t
gctgtggtngatctctnaggatccccgatgcgatgtgcgctctcgcgaggaggcggcagctgggaccatcccaggggcgctcaacatcccggtgtccgagttggagagtgctctgcagatggagccagctgccttccaggctttatattctgctgagaagccaaagctggaagatgagcatctcgttttcttctgtcagatgggcaagcggggcctccaggccacgcagctggcccggagtcttggatacactggggctcgcaactacgctggagcctatagagaatggttggagaaagagagttaggcaggaggcagcttactgattgccaccccctggccccttaatggccaccttaactaagggtgtgaacgggctgacttggtgaattgggcaactccttatagtgttgtgcacacatcgcatacggggactcctctatgagtc

SEQ ID NO: 296341 - DNA, 650 bp, Homo sapiens
aactttaggctaggtacgaggcctgggcgggccagggccgcactccggagactcgcggttgctacgcgcaccatggctggagcgcccacggtctcgcttcctgaactccgttcactcctagcctccggacgggcccggctcttcgatgtgcgctctcgcgaggaggcggcagctgggaccatcccaggggcgctcaacatcccggtgtccgagttggagagtgctctgcagatggagccagctgccttccaggctttatattctgctgagaagccaaagctggaagatgagcatctcgttttcttctgtcagatgggcaagcggggcctccaggccacgcagctggcccggagtcttggatacactgggtacggggaggtgtggctgctagctgggaggtgatggggactgcctgtcattcctgtcagtctctcacgcttctttgtctccacagggctcgcaactacgctggagcctatagagaatggttggagaaagagagttaggcaggaggcagcttactgattgccaccccctggccccttaatggccaccttaactaagggtgtgaacgggctgacttggtgaattgggcaactccttatagtgttgtgcacacaaaagcatcaaataaagaacatttaatcaaa

SEQ ID NO: 296342 - DNA, 926 bp, Homo sapiens
aaatgttagacattcttcaatgtcagtgccttggatgaatttataaggctttgccttaaagttacttgtgggcttataaagcctgtgtcaaagctaaacaaagccagacaatagtttagacaagaagtaaggataggtatttatttatttatttgagatggagtttcgctcttgtcgcccaggctggagggtaatggcgcgatcttggctcaccgcaacctccgtgtccggggttcaagcgattctcctgcctcagcctcctgaatagctgggattgcaggcatgcaccaccacgcccggctaatttttttgtgtttttagtggagacagcgtttctccgtgttggtcaggctggttttgaacttttgaccccaggtgatctgcccgcctcggcctcccaaagtgttgggattacaggcgtgagccactgcacccggcctaggataggtttttttaagtagtaactattgcagtagggaagagggcccaaggtgaactgaacttaacttccttaaaaaaaaaaaaaatgcaggaggccttttgaaggctgggatgtgctaagggataggcatgaagatattaaggagaattgctccatgtgactagacaatctggatttgtgaattggctcttgtccagaagagaaataagcacctatttttacgacaggagctagtagtgcaagttagagcaaggcacccacctggttgggagctggagcaagatttatttcctcaaatgtttgcatttcaaagaaactctcaggtcccagtgaaaatagctctgggtagaagatttacatctcaaagaggcagagaaagatgttttaattgcaagctttctttctaagtaattgcactaagatgaagttcaggggcctgtgtctattgctaggtttgggctgggatgcacagtaaatttttctg

SEQ ID NO: 296343 - DNA, 402 bp, Homo sapiens
gcctgtggtgctgtggagatgtgtgtagtggtcttagctctttgttgagcttgtgtgtgtgttgtgtagtcttagctgtatgctgaaattgggcgtgtgttggagggcttcttagctctttggtgagattgtatttctatgtgtttgtatcagctgctcaggagcctggcaacaagagcaaaactccagctcaaaaaaaaaaaagaaagaaaagaaagctggagctggtggcttaggccatcacccttcccttggctggaactactggacagacccttttgagatgtgcctgtggtgctgtggagatgtgtgtagtggtcttagctctttgttgagcatggtggtgcatgcctgtagtcccagctgctcaggagcctggcaacaagagcaaaactccagctc

SEQ ID NO: 296344 - DNA, 3850 bp, Homo sapiens
aactttaggctaggtacgaggcctgggcgggccagggccgcactccggagactcgcggttgctacgcgcaccatggctggagaggtacttctcagccctctagctccaactgagaacccagccagtcaggaagtcgctacttcgggaacaccaaccaatcagggggccgtcacctgctgaagggctggctctcagtcccctcgctgtagtcgcggagctgtgtctgttcccaggagtccttcggcggctgttgtgtcagtggcctgatcgcgatggggacaaaggcgcaagtcgagaggaaactgttgtgcctcttcatattggcgatcctgttgtgctccctggcattgggcagtgttacagtgcactcttctgaacctgaagtcagaattcctgagaataatcctgtgaagttgtcctgtgcctactcgggcttttcttctccccgtgtggagtggaagtttgaccaaggagacaccaccagactcgtttgctataataacaagatcacagcttcctatgaggaccgggtgaccttcttgccaactggtatcaccttcaagtccgtgacacgggaagacactgggacatacacttgtatggtctctgaggaaggcggcaacagctatggggaggtcaaggtcaagctcatcgtgcttgtgcctccatccaagcctacagttaacatcccctcctctgccaccattgggaaccgggcagtgctgacatgctcagaacaagatggttccccaccttctgaatacacctggttcaaagatgggatagtgatgcctacgaatcccaaaagcacccgtgccttcagcaactcttcctatgtcctgaatcccacaacaggagagctggtctttgatcccctgtcagcctctgatactggagaatacagctgtgaggcacggaatgggtatgggacacccatgacttcaaatgctgtgcgcatggaagctgtggagcggaatgtgggggtcatcgtggcagccgtccttgtaaccctgattctcctgggaatcttggtttttggcatctggtttgcctatagccgaggccactttgacagaacaaagaaagggacttcgagtaagaaggtgatttacagccagcctagtgcccgaagtgaaggagaattcaaacagacctcgtcattcctggtgtgagcctggtcggctcaccgcctatcatctgcatttgccttactcaggtgctaccggactctggcccctgatgtctgtagtttcacaggatgccttatttgtcttctacaccccacagggccccctacttcttcggatgtgtttttaataatgtcagctatgtgccccatcctccttcatgccctccctccctttcctaccactgctgagtggcctggaacttgtttaaagtgtttattccccatttctttgagggatcaggaaggaatcctgggtatgccattgacttcccttctaagtagacagcaaaaatggcgggggtcgcaggaatctgcactcaactgcccacctggctggcagggatctttgaataggtatcttgagcttggttctgggctctttccttgtgtactgacgaccagggccagctgttctagagcgggaattagaggctagagcggctgaaatggttgtttggtgatgacactggggtccttccatctctggggcccactctcttctgtcttcccatgggaagtgccactgggatccctctgccctgtcctcctgaatacaagctgactgacattgactgtgtctgtggaaaatgggagctcttgttgtggagagcatagtaaattttcagagaacttgaagccaaaaggatttaaaaccgctgctctaaagaaaagaaaactggaggctgggcgcagtggctcacgcctataatcccagaggctgaggcaggcggatcacctgaggtcaggagttcaagatcagcctgaccaacatggagaaaccctactgaaaatacaaagttagccaggcatggtggtgcatgcctgtaatcccagctgctcaggagcctggcaacaagagcaaaactccagctcaaaaaaaaaaaagaaagaaaagaaagctggagctggtggcttaggccatcacccttcccttggctggaactactggacagacccttttgagatgtgcctgtggtgctgtggagatgtgtgtagtggtcttagctctttgttgagcttgtgtgtgtgttgtgtagtcttagctgtatgctgaaattgggcgtgtgttggagggcttcttagctctttggtgagattgtatttctatgtgtttgtatcagctgaatgttgctggaaataaaaccttggtttgtcaaggctcttttttgtgggaagtaagtaggggaaaaggtctttgagggttcctaggctcctttgtacaacaggaaaatgcctcaaagccttgcttcccagcaacctggggctggttcccagtgcctggtcctgccccttcctggttcttatctcaaggcagagcttctgaatttcaggccttcattccagagccctcttgtggccaggccttcctttgctggaggaaggtacacagggtgaagctgatgctgtacttgggggatctccttggcctgttccaccaagtgagagaaggtacttactcttgtacctcctgttcagccaggtgcattaacagacctccctacagctgtaggaactactgtcccagagctgaggcaaggggatttctcaggtcatttggagaacaagtgctttagtagtagtttaaagtagtaactgctactgtatttagtggggtggaattcagaagaaatttgaagaccagatcatgggtggtctgcatgtgaatgaacaggaatgagccggacagcctggctgtcattgctttcttcctccccatttggacccttctctgcccttacatttttgtttctccatctaccaccatccaccagtctatttattaacttagcaagaggacaagtaaagggccctcttggcttgattttgcttctttctttctgtggaggatatactaagtgcgactttgccctatcctatttggaaatccctaacagaattgagttttctattaaggatccaaaaagaaaaacaaaatgctaatgaagccatcagtcaagggtcacatgccaataaacaataaattttccagaagaaatgaaatccaactagacaaataaagtagagcttatgaaatggttcagtaaagatgagtttgttgttttttgttttgttttgttttgtttttttaaagacggagtctcgctctgtcacccaggctggagtgcagtggtatgatcttggctcactgtaacctccgcctcccgggttcaagccattctcctgcctcagtctcctgagtagctgggattgcgggtgcgtgccaccatgcctggctaatttttgtgtttttagtagagacagggtttcaccatgttggtcgggctggtctcagactcctgacctcttgatccgcctgccttggcctcccaaagtgatgggattacagatgtgagccaccgtgcctagccaaggatgagatttttaaagtatgtttcagttctgtgtcatggttggaagacagagtaggaaggatatggaaaaggtcatggggaagcagaggtgattcatggctctgtgaatttgaggtgaatggttccttattgtctaggccacttgtgaagaatatgagtcagttattgccagccttggaatttacttctctagcttacaatggaccttttgaactggaaaacaccttgtctgcattcactttaaaatgtcaaaactaatttttataataaatgtttattttcacattga

SEQ ID NO: 296345 - DNA, 4779 bp, Homo sapiens
aactttaggctaggtacgaggcctgggcgggccagggccgcactccggagactcgcggttgctacgcgcaccatggctggagaggtacttctcagccctctagctccaactgagaacccagccagtcaggaagtcgctacttcgggaacaccaaccaatcagggggccgtcacctgctgaagggctggctctcagtcccctcgctgtagtcgcggagctgtgtctgttcccaggagtccttcggcggctgttgtgtcagtggcctgatcgcgatggggacaaaggcgcaagtcgagaggaaactgttgtgcctcttcatattggcgatcctgttgtgctccctggcattgggcagtgttacagtgcactcttctgaacctgaagtcagaattcctgagaataatcctgtgaagttgtcctgtgcctactcgggcttttcttctccccgtgtggagtggaagtttgaccaaggagacaccaccagactcgtttgctataataacaagatcacagcttcctatgaggaccgggtgaccttcttgccaactggtatcaccttcaagtccgtgacacgggaagacactgggacatacacttgtatggtctctgaggaaggcggcaacagctatggggaggtcaaggtcaagctcatcgtgcttgtgcctccatccaagcctacagttaacatcccctcctctgccaccattgggaaccgggcagtgctgacatgctcagaacaagatggttccccaccttctgaatacacctggttcaaagatgggatagtgatgcctacgaatcccaaaagcacccgtgccttcagcaactcttcctatgtcctgaatcccacaacaggagagctggtctttgatcccctgtcagcctctgatactggagaatacagctgtgaggcacggaatgggtatgggacacccatgacttcaaatgctgtgcgcatggaagctgtggagcggaatgtgggggtcatcgtggcagccgtccttgtaaccctgattctcctgggaatcttggtttttggcatctggtttgcctatagccgaggccactttgacagaacaaagaaagggacttcgagtaagaaggtgatttacagccagcctagtgcccgaagtgaaggagaattcaaacagacctcgtcattcctggtgtgagcctggtcggctcaccgcctatcatctgcatttgccttactcaggtgctaccggactctggcccctgatgtctgtagtttcacaggatgccttatttgtcttctacaccccacagggccccctacttcttcggatgtgtttttaataatgtcagctatgtgccccatcctccttcatgccctccctccctttcctaccactgctgagtggcctggaacttgtttaaagtgtttattccccatttctttgagggatcaggaaggaatcctgggtatgccattgacttcccttctaagtagacagcaaaaatggcgggggtcgcaggaatctgcactcaactgcccacctggctggcagggatctttgaataggtatcttgagcttggttctgggctctttccttgtgtactgacgaccagggccagctgttctagagcgggaattagaggctagagcggctgaaatggttgtttggtgatgacactggggtccttccatctctggggcccactctcttctgtcttcccatgggaagtgccactgggatccctctgccctgtcctcctgaatacaagctgactgacattgactgtgtctgtggaaaatgggagctcttgttgtggagagcatagtaaattttcagagaacttgaagccaaaaggatttaaaaccgctgctctaaagaaaagaaaactggaggctgggcgcagtggctcacgcctataatcccagaggctgaggcaggcggatcacctgaggtcaggagttcaagatcagcctgaccaacatggagaaaccctactgaaaatacaaagttagccaggcatggtggtgcatgcctgtaatcccagctgctcaggagcctggcaacaagagcaaaactccagctcaaaaaaaaaaaagaaagaaaagaaagctggagctggtggcttaggccatcacccttcccttggctggaactactggacagacccttttgagatgtgcctgtggtgctgtggagatgtgtgtagtggtcttagctctttgttgagcttgtgtgtgtgttgtgtagtcttagctgtatgctgaaattgggcgtgtgttggagggcttcttagctctttggtgagattgtatttctatgtgtttgtatcagctgaatgttgctggaaataaaaccttggtttgtcaaggctcttttttgtgggaagtaagtaggggaaaaggtctttgagggttcctaggctcctttgtacaacaggaaaatgcctcaaagccttgcttcccagcaacctggggctggttcccagtgcctggtcctgccccttcctggttcttatctcaaggcagagcttctgaatttcaggccttcattccagagccctcttgtggccaggccttcctttgctggaggaaggtacacagggtgaagctgatgctgtacttgggggatctccttggcctgttccaccaagtgagagaaggtacttactcttgtacctcctgttcagccaggtgcattaacagacctccctacagctgtaggaactactgtcccagagctgaggcaaggggatttctcaggtcatttggagaacaagtgctttagtagtagtttaaagtagtaactgctactgtatttagtggggtggaattcagaagaaatttgaagaccagatcatgggtggtctgcatgtgaatgaacaggaatgagccggacagcctggctgtcattgctttcttcctccccatttggacccttctctgcccttacatttttgtttctccatctaccaccatccaccagtctatttattaacttagcaagaggacaagtaaagggccctcttggcttgattttgcttctttctttctgtggaggatatactaagtgcgactttgccctatcctatttggaaatccctaacagaattgagttttctattaaggatccaaaaagaaaaacaaaatgctaatgaagccatcagtcaagggtcacatgccaataaacaataaattttccagaagaaatgaaatccaactagacaaataaagtagagcttatgaaatggttcagtaaagatgagtttgttgttttttgttttgttttgttttgtttttttaaagacggagtctcgctctgtcacccaggctggagtgcagtggtatgatcttggctcactgtaacctccgcctcccgggttcaagccattctcctgcctcagtctcctgagtagctgggattgcgggtgcgtgccaccatgcctggctaatttttgtgtttttagtagagacagggtttcaccatgttggtcgggctggtctcagactcctgacctcttgatccgcctgccttggcctcccaaagtgatgggattacagatgtgagccaccgtgcctagccaaggatgagatttttaaagtatgtttcagttctgtgtcatggttggaagacagagtaggaaggatatggaaaaggtcatggggaagcagaggtgattcatggctctgtgaatttgaggtgaatggttccttattgtctaggccacttgtgaagaatatgagtcagttattgccagccttggaatttacttctctagcttacaatggaccttttgaactggaaaacaccttgtctgcattcactttaaaatgtcaaaactaatttttataataaatgtttattttcacattgagtttgtttaaatcctgaagttcttaccttaagagaattgggactcctagagtgattggacattcaaaatattcctgatagtcttgttaattaagagattaggatatctttccattaccttgataattacgttttaatttagcttttttcattggcctgtgtttaaatgcaaataaccccacaatggacatttcctatgttaaagtgacatttaggggataaaaaatgagagcagttccatggattttggtgtttcccctgagacatgaactcagcataatctgggataaaatgattgagtgttaaggatgtgtttgttgttcctgtcgtttttttattttcttcaaagtatacaacatggtttgatatgcacatacatttgtgtaatgattgccatggtcaattaacacatcaccatttttgtgtgtgtgtgtgtgtgtgtgtgtgagggagtcttgctccgttgccaggctggagtgcaatggtacaaccttggctcactgcaacctccaccatgcccagctaatttttgtatttttagtagagacggggtttcaccatgttggccaggatgatctcgatcccttgacctcatgatccgcccacctcggcctcccaaagtgctgggattacaggcgtgagtcactgcacccggccacatcacctcccatgttctatcttacgtattcagaacttgttcatcttgtaactgaaagcgtgtaccctttgaccaacactgtttttcctgtcttaacaggatctacagatcaaggacaggggaggggatagtggaggaaaacggagttagtctgtttctaaatgaggggacagtatgtttcttggggcctgaggacagcttaataaagtagacaaatgaagaaaaacaacaatttgcattaaaaaatatccaattctttagcttttccagct

SEQ ID NO: 296346 - DNA, 4993 bp, Homo sapiens
aactttaggctaggtacgaggcctgggcgggccagggccgcactccggagactcgcggttgctacgcgcaccatggctggagaggtacttctcagccctctagctccaactgagaacccagccagtcaggaagtcgctacttcgggaacaccaaccaatcagggggccgtcacctgctgaagggctggctctcagtcccctcgctgtagtcgcggagctgtgtctgttcccaggagtccttcggcggctgttgtgtcagtggcctgatcgcgatggggacaaaggcgcaagtcgagaggaaactgttgtgcctcttcatattggcgatcctgttgtgctccctggcattgggcagtgttacagtgcactcttctgaacctgaagtcagaattcctgagaataatcctgtgaagttgtcctgtgcctactcgggcttttcttctccccgtgtggagtggaagtttgaccaaggagacaccaccagactcgtttgctataataacaagatcacagcttcctatgaggaccgggtgaccttcttgccaactggtatcaccttcaagtccgtgacacgggaagacactgggacatacacttgtatggtctctgaggaaggcggcaacagctatggggaggtcaaggtcaagctcatcgtgcttgtgcctccatccaagcctacagttaacatcccctcctctgccaccattgggaaccgggcagtgctgacatgctcagaacaagatggttccccaccttctgaatacacctggttcaaagatgggatagtgatgcctacgaatcccaaaagcacccgtgccttcagcaactcttcctatgtcctgaatcccacaacaggagagctggtctttgatcccctgtcagcctctgatactggagaatacagctgtgaggcacggaatgggtatgggacacccatgacttcaaatgctgtgcgcatggaagctgtggagcggaatgtgggggtcatcgtggcagccgtccttgtaaccctgattctcctgggaatcttggtttttggcatctggtttgcctatagccgaggccactttgacagaacaaagaaagggacttcgagtaagaaggtgatttacagccagcctagtgcccgaagtgaaggagaattcaaacagacctcgtcattcctggtgtgagcctggtcggctcaccgcctatcatctgcatttgccttactcaggtgctaccggactctggcccctgatgtctgtagtttcacaggatgccttatttgtcttctacaccccacagggccccctacttcttcggatgtgtttttaataatgtcagctatgtgccccatcctccttcatgccctccctccctttcctaccactgctgagtggcctggaacttgtttaaagtgtttattccccatttctttgagggatcaggaaggaatcctgggtatgccattgacttcccttctaagtagacagcaaaaatggcgggggtcgcaggaatctgcactcaactgcccacctggctggcagggatctttgaataggtatcttgagcttggttctgggctctttccttgtgtactgacgaccagggccagctgttctagagcgggaattagaggctagagcggctgaaatggttgtttggtgatgacactggggtccttccatctctggggcccactctcttctgtcttcccatgggaagtgccactgggatccctctgccctgtcctcctgaatacaagctgactgacattgactgtgtctgtggaaaatgggagctcttgttgtggagagcatagtaaattttcagagaacttgaagccaaaaggatttaaaaccgctgctctaaagaaaagaaaactggaggctgggcgcagtggctcacgcctataatcccagaggctgaggcaggcggatcacctgaggtcaggagttcaagatcagcctgaccaacatggagaaaccctactgaaaatacaaagttagccaggcatggtggtgcatgcctgtaatcccagctgctcaggagcctggcaacaagagcaaaactccagctcaaaaaaaaaaaagaaagaaaagaaagctggagctggtggcttaggccatcacccttcccttggctggaactactggacagacccttttgagatgtgcctgtggtgctgtggagatgtgtgtagtggtcttagctctttgttgagcttgtgtgtgtgttgtgtagtcttagctgtatgctgaaattgggcgtgtgttggagggcttcttagctctttggtgagattgtatttctatgtgtttgtatcagctgaatgttgctggaaataaaaccttggtttgtcaaggctcttttttgtgggaagtaagtaggggaaaaggtctttgagggttcctaggctcctttgtacaacaggaaaatgcctcaaagccttgcttcccagcaacctggggctggttcccagtgcctggtcctgccccttcctggttcttatctcaaggcagagcttctgaatttcaggccttcattccagagccctcttgtggccaggccttcctttgctggaggaaggtacacagggtgaagctgatgctgtacttgggggatctccttggcctgttccaccaagtgagagaaggtacttactcttgtacctcctgttcagccaggtgcattaacagacctccctacagctgtaggaactactgtcccagagctgaggcaaggggatttctcaggtcatttggagaacaagtgctttagtagtagtttaaagtagtaactgctactgtatttagtggggtggaattcagaagaaatttgaagaccagatcatgggtggtctgcatgtgaatgaacaggaatgagccggacagcctggctgtcattgctttcttcctccccatttggacccttctctgcccttacatttttgtttctccatctaccaccatccaccagtctatttattaacttagcaagaggacaagtaaagggccctcttggcttgattttgcttctttctttctgtggaggatatactaagtgcgactttgccctatcctatttggaaatccctaacagaattgagttttctattaaggatccaaaaagaaaaacaaaatgctaatgaagccatcagtcaagggtcacatgccaataaacaataaattttccagaagaaatgaaatccaactagacaaataaagtagagcttatgaaatggttcagtaaagatgagtttgttgttttttgttttgttttgttttgtttttttaaagacggagtctcgctctgtcacccaggctggagtgcagtggtatgatcttggctcactgtaacctccgcctcccgggttcaagccattctcctgcctcagtctcctgagtagctgggattgcgggtgcgtgccaccatgcctggctaatttttgtgtttttagtagagacagggtttcaccatgttggtcgggctggtctcagactcctgacctcttgatccgcctgccttggcctcccaaagtgatgggattacagatgtgagccaccgtgcctagccaaggatgagatttttaaagtatgtttcagttctgtgtcatggttggaagacagagtaggaaggatatggaaaaggtcatggggaagcagaggtgattcatggctctgtgaatttgaggtgaatggttccttattgtctaggccacttgtgaagaatatgagtcagttattgccagccttggaatttacttctctagcttacaatggaccttttgaactggaaaacaccttgtctgcattcactttaaaatgtcaaaactaatttttataataaatgtttattttcacattgagtttgtttaaatcctgaagttcttaccttaagagaattgggactcctagagtgattggacattcaaaatattcctgatagtcttgttaattaagagattaggatatctttccattaccttgataattacgttttaatttagcttttttcattggcctgtgtttaaatgcaaataaccccacaatggacatttcctatgttaaagtgacatttaggggataaaaaatgagagcagttccatggattttggtgtttcccctgagacatgaactcagcataatctgggataaaatgattgagtgttaaggatgtgtttgttgttcctgtcgtttttttattttcttcaaagtatacaacatggtttgatatgcacatacatttgtgtaatgattgccatggtcaattaacacatcaccatttttgtgtgtgtgtgtgtgtgtgtgtgtgagggagtcttgctccgttgccaggctggagtgcaatggtacaaccttggctcactgcaacctccaccatgcccagctaatttttgtatttttagtagagacggggtttcaccatgttggccaggatgatctcgatcccttgacctcatgatccgcccacctcggcctcccaaagtgttgggattacaggcgtgagccactgcacccggcctaggataggtttttttaagtagtaactattgcagtagggaagagggcccaaggtgaactgaacttaacttccttaaaaaaaaaaaaaatgcaggaggccttttgaaggctgggatgtgctaagggataggcatgaagatattaaggagaattgctccatgtgactagacaatctggatttgtgaattggctcttgtccagaagagaaataagcacctatttttacgacaggagctagtagtgcaagttagagcaaggcacccacctggttgggagctggagcaagatttatttcctcaaatgtttgcatttcaaagaaactctcaggtcccagtgaaaatagctctgggtagaagatttacatctcaaagaggcagagaaagatgttttaattgcaagctttctttctaagtaattgcactaagatgaagttcaggggcctgtgtctattgctaggtttgggctgggatgcacagtaaatttttctg

SEQ ID NO: 296347 - DNA, 5059 bp, Homo sapiens
aactttaggctaggtacgaggcctgggcgggccagggccgcactccggagactcgcggttgctacgcgcaccatggctggagaggtacttctcagccctctagctccaactgagaacccagccagtcaggaagtcgctacttcgggaacaccaaccaatcagggggccgtcacctgctgaagggctggctctcagtcccctcgctgtagtcgcggagctgtgtctgttcccaggagtccttcggcggctgttgtgtcagtggcctgatcgcgatggggacaaaggcgcaagtcgagaggaaactgttgtgcctcttcatattggcgatcctgttgtgctccctggcattgggcagtgttacagtgcactcttctgaacctgaagtcagaattcctgagaataatcctgtgaagttgtcctgtgcctactcgggcttttcttctccccgtgtggagtggaagtttgaccaaggagacaccaccagactcgtttgctataataacaagatcacagcttcctatgaggaccgggtgaccttcttgccaactggtatcaccttcaagtccgtgacacgggaagacactgggacatacacttgtatggtctctgaggaaggcggcaacagctatggggaggtcaaggtcaagctcatcgtgcttgtgcctccatccaagcctacagttaacatcccctcctctgccaccattgggaaccgggcagtgctgacatgctcagaacaagatggttccccaccttctgaatacacctggttcaaagatgggatagtgatgcctacgaatcccaaaagcacccgtgccttcagcaactcttcctatgtcctgaatcccacaacaggagagctggtctttgatcccctgtcagcctctgatactggagaatacagctgtgaggcacggaatgggtatgggacacccatgacttcaaatgctgtgcgcatggaagctgtggagcggaatgtgggggtcatcgtggcagccgtccttgtaaccctgattctcctgggaatcttggtttttggcatctggtttgcctatagccgaggccactttgacagaacaaagaaagggacttcgagtaagaaggtgatttacagccagcctagtgcccgaagtgaaggagaattcaaacagacctcgtcattcctggtgtgagcctggtcggctcaccgcctatcatctgcatttgccttactcaggtgctaccggactctggcccctgatgtctgtagtttcacaggatgccttatttgtcttctacaccccacagggccccctacttcttcggatgtgtttttaataatgtcagctatgtgccccatcctccttcatgccctccctccctttcctaccactgctgagtggcctggaacttgtttaaagtgtttattccccatttctttgagggatcaggaaggaatcctgggtatgccattgacttcccttctaagtagacagcaaaaatggcgggggtcgcaggaatctgcactcaactgcccacctggctggcagggatctttgaataggtatcttgagcttggttctgggctctttccttgtgtactgacgaccagggccagctgttctagagcgggaattagaggctagagcggctgaaatggttgtttggtgatgacactggggtccttccatctctggggcccactctcttctgtcttcccatgggaagtgccactgggatccctctgccctgtcctcctgaatacaagctgactgacattgactgtgtctgtggaaaatgggagctcttgttgtggagagcatagtaaattttcagagaacttgaagccaaaaggatttaaaaccgctgctctaaagaaaagaaaactggaggctgggcgcagtggctcacgcctataatcccagaggctgaggcaggcggatcacctgaggtcaggagttcaagatcagcctgaccaacatggagaaaccctactgaaaatacaaagttagccaggcatggtggtgcatgcctgtaatcccagctgctcaggagcctggcaacaagagcaaaactccagctcaaaaaaaaaaaagaaagaaaagaaagctggagctggtggcttaggccatcacccttcccttggctggaactactggacagacccttttgagatgtgcctgtggtgctgtggagatgtgtgtagtggtcttagctctttgttgagcttgtgtgtgtgttgtgtagtcttagctgtatgctgaaattgggcgtgtgttggagggcttcttagctctttggtgagattgtatttctatgtgtttgtatcagctgaatgttgctggaaataaaaccttggtttgtcaaggctcttttttgtgggaagtaagtaggggaaaaggtctttgagggttcctaggctcctttgtacaacaggaaaatgcctcaaagccttgcttcccagcaacctggggctggttcccagtgcctggtcctgccccttcctggttcttatctcaaggcagagcttctgaatttcaggccttcattccagagccctcttgtggccaggccttcctttgctggaggaaggtacacagggtgaagctgatgctgtacttgggggatctccttggcctgttccaccaagtgagagaaggtacttactcttgtacctcctgttcagccaggtgcattaacagacctccctacagctgtaggaactactgtcccagagctgaggcaaggggatttctcaggtcatttggagaacaagtgctttagtagtagtttaaagtagtaactgctactgtatttagtggggtggaattcagaagaaatttgaagaccagatcatgggtggtctgcatgtgaatgaacaggaatgagccggacagcctggctgtcattgctttcttcctccccatttggacccttctctgcccttacatttttgtttctccatctaccaccatccaccagtctatttattaacttagcaagaggacaagtaaagggccctcttggcttgattttgcttctttctttctgtggaggatatactaagtgcgactttgccctatcctatttggaaatccctaacagaattgagttttctattaaggatccaaaaagaaaaacaaaatgctaatgaagccatcagtcaagggtcacatgccaataaacaataaattttccagaagaaatgaaatccaactagacaaataaagtagagcttatgaaatggttcagtaaagatgagtttgttgttttttgttttgttttgttttgtttttttaaagacggagtctcgctctgtcacccaggctggagtgcagtggtatgatcttggctcactgtaacctccgcctcccgggttcaagccattctcctgcctcagtctcctgagtagctgggattgcgggtgcgtgccaccatgcctggctaatttttgtgtttttagtagagacagggtttcaccatgttggtcgggctggtctcagactcctgacctcttgatccgcctgccttggcctcccaaagtgatgggattacagatgtgagccaccgtgcctagccaaggatgagatttttaaagtatgtttcagttctgtgtcatggttggaagacagagtaggaaggatatggaaaaggtcatggggaagcagaggtgattcatggctctgtgaatttgaggtgaatggttccttattgtctaggccacttgtgaagaatatgagtcagttattgccagccttggaatttacttctctagcttacaatggaccttttgaactggaaaacaccttgtctgcattcactttaaaatgtcaaaactaatttttataataaatgtttattttcacattgagtttgtttaaatcctgaagttcttaccttaagagaattgggactcctagagtgattggacattcaaaatattcctgatagtcttgttaattaagagattaggatatctttccattaccttgataattacgttttaatttagcttttttcattggcctgtgtttaaatgcaaataaccccacaatggacatttcctatgttaaagtgacatttaggggataaaaaatgagagcagttccatggattttggtgtttcccctgagacatgaactcagcataatctgggataaaatgattgagtgttaaggatgtgtttgttgttcctgtcgtttttttattttcttcaaagtatacaacatggtttgatatgcacatacatttgtgtaatgattgccatggtcaattaacacatcaccatttttgtgtgtgtgtgtgtgtgtgtgtgtgagggagtcttgctccgttgccaggctggagtgcaatggtacaaccttggctcactgcaacctccacctcctgggttcaagcaattctcttgcctcagcctcctaagtagctgggactataggcgtgtgccaccatgcccagctaatttttgtatttttagtagagacggggtttcaccatgttggccaggatgatctcgatcccttgacctcatgatccgcccacctcggcctcccaaagtgttgggattacaggcgtgagccactgcacccggcctaggataggtttttttaagtagtaactattgcagtagggaagagggcccaaggtgaactgaacttaacttccttaaaaaaaaaaaaaatgcaggaggccttttgaaggctgggatgtgctaagggataggcatgaagatattaaggagaattgctccatgtgactagacaatctggatttgtgaattggctcttgtccagaagagaaataagcacctatttttacgacaggagctagtagtgcaagttagagcaaggcacccacctggttgggagctggagcaagatttatttcctcaaatgtttgcatttcaaagaaactctcaggtcccagtgaaaatagctctgggtagaagatttacatctcaaagaggcagagaaagatgttttaattgcaagctttctttctaagtaattgcactaagatgaagttcaggggcctgtgtctattgctaggtttgggctgggatgcacagtaaatttttctg

SEQ ID NO: 296348 - DNA, 3842 bp, Homo sapiens
  misc_feature (3769)..(3769): n is a, c, g, or t
aactttaggctaggtacgaggcctgggcgggccagggccgcactccggagactcgcggttgctacgcgcaccatggctggagaggtacttctcagccctctagctccaactgagaacccagccagtcaggaagtcgctacttcgggaacaccaaccaatcagggggccgtcacctgctgaagggctggctctcagtcccctcgctgtagtcgcggagctgtgtctgttcccaggagtccttcggcggctgttgtgtcagtggcctgatcgcgatggggacaaaggcgcaagtcgagaggaaactgttgtgcctcttcatattggcgatcctgttgtgctccctggcattgggcagtgttacagtgcactcttctgaacctgaagtcagaattcctgagaataatcctgtgaagttgtcctgtgcctactcgggcttttcttctccccgtgtggagtggaagtttgaccaaggagacaccaccagactcgtttgctataataacaagatcacagcttcctatgaggaccgggtgaccttcttgccaactggtatcaccttcaagtccgtgacacgggaagacactgggacatacacttgtatggtctctgaggaaggcggcaacagctatggggaggtcaaggtcaagctcatcgtgcttgtgcctccatccaagcctacagttaacatcccctcctctgccaccattgggaaccgggcagtgctgacatgctcagaacaagatggttccccaccttctgaatacacctggttcaaagatgggatagtgatgcctacgaatcccaaaagcacccgtgccttcagcaactcttcctatgtcctgaatcccacaacaggagagctggtctttgatcccctgtcagcctctgatactggagaatacagctgtgaggcacggaatgggtatgggacacccatgacttcaaatgctgtgcgcatggaagctgtggagcggaatgtgggggtcatcgtggcagccgtccttgtaaccctgattctcctgggaatcttggtttttggcatctggtttgcctatagccgaggccactttgacagaacaaagaaagggacttcgagtaagaaggtgatttacagccagcctagtgcccgaagtgaaggagaattcaaacagacctcgtcattcctggtgtgagcctggtcggctcaccgcctatcatctgcatttgccttactcaggtgctaccggactctggcccctgatgtctgtagtttcacaggatgccttatttgtcttctacaccccacagggccccctacttcttcggatgtgtttttaataatgtcagctatgtgccccatcctccttcatgccctccctccctttcctaccactgctgagtggcctggaacttgtttaaagtgtttattccccatttctttgagggatcaggaaggaatcctgggtatgccattgacttcccttctaagtagacagcaaaaatggcgggggtcgcaggaatctgcactcaactgcccacctggctggcagggatctttgaataggtatcttgagcttggttctgggctctttccttgtgtactgacgaccagggccagctgttctagagcgggaattagaggctagagcggctgaaatggttgtttggtgatgacactggggtccttccatctctggggcccactctcttctgtcttcccatgggaagtgccactgggatccctctgccctgtcctcctgaatacaagctgactgacattgactgtgtctgtggaaaatgggagctcttgttgtggagagcatagtaaattttcagagaacttgaagccaaaaggatttaaaaccgctgctctaaagaaaagaaaactggaggctgggcgcagtggctcacgcctataatcccagaggctgaggcaggcggatcacctgaggtcaggagttcaagatcagcctgaccaacatggagaaaccctactgaaaatacaaagttagccaggcatggtggtgcatgcctgtaatcccagctgctcaggagcctggcaacaagagcaaaactccagctcaaaaaaaaaaaagaaagaaaagaaagctggagctggtggcttaggccatcacccttcccttggctggaactactggacagacccttttgagatgtgcctgtggtgctgtggagatgtgtgtagtggtcttagctctttgttgagcttgtgtgtgtgttgtgtagtcttagctgtatgctgaaattgggcgtgtgttggagggcttcttagctctttggtgagattgtatttctatgtgtttgtatcagctgaatgttgctggaaataaaaccttggtttgtcaaggctcttttttgtgggaagtaagtaggggaaaaggtctttgagggttcctaggctcctttgtacaacaggaaaatgcctcaaagccttgcttcccagcaacctggggctggttcccagtgcctggtcctgccccttcctggttcttatctcaaggcagagcttctgaatttcaggccttcattccagagccctcttgtggccaggccttcctttgctggaggaaggtacacagggtgaagctgatgctgtacttgggggatctccttggcctgttccaccaagtgagagaaggtacttactcttgtacctcctgttcagccaggtgcattaacagacctccctacagctgtaggaactactgtcccagagctgaggcaaggggatttctcaggtcatttggagaacaagtgctttagtagtagtttaaagtagtaactgctactgtatttagtggggtggaattcagaagaaatttgaagaccagatcatgggtggtctgcatgtgaatgaacaggaatgagccggacagcctggctgtcattgctttcttcctccccatttggacccttctctgcccttacatttttgtttctccatctaccaccatccaccagtctatttattaacttagcaagaggacaagtaaagggccctcttggcttgattttgcttctttctttctgtggaggatatactaagtgcgactttgccctatcctatttggaaatccctaacagaattgagttttctattaaggatccaaaaagaaaaacaaaatgctaatgaagccatcagtcaagggtcacatgccaataaacaataaattttccagaagaaatgaaatccaactagacaaataaagtagagcttatgaaatggttcagtaaagatgagtttgttgttttttgttttgttttgttttgtttttttaaagacggagtctcgctctgtcacccaggctggagtgcagtggtatgatcttggctcactgtaacctccgcctcccgggttcaagccattctcctgcctcagtctcctgagtagctgggattgcgggtgcgtgccaccatgcctggctaatttttgtgtttttagtagagacagggtttcaccatgttggtcgggctggtctcagactcctgacctcttgatccgcctgccttggcctcccaaagtgatgggattacagatgtgagccaccgtgcctagccaaggatgagatttttaaagtatgtttcagttctgtgtcatggttggaagacagagtaggaaggatatggaaaaggtcatggggaagcagaggtgattcatggctctgtgaatttgaggtgaatggttccttattgtctaggccacttgtgaagaatatgagtcagttattgccagccttggaatttacttctctagcttacaatggacctnggtagtaatttccaggccttctccctgtaactggttgcagaaataaaacctctcttcctccccatttaaaaaa

SEQ ID NO: 296349 - DNA, 3877 bp, Homo sapiens
aactttaggctaggtacgaggcctgggcgggccagggccgcactccggagactcgcggttgctacgcgcaccatggctggagacggagtttcgctcttgatgcccagcaggctggagtgcgatggcgcgatttcggctcactgcaacctcctcctcccagaggtacttctcagccctctagctccaactgagaacccagccagtcaggaagtcgctacttcgggaacaccaaccaatcagggggccgtcacctgctgaaggagtccttcggcggctgttgtgtcagtggcctgatcgcgatggggacaaaggcgcaagtcgagaggaaactgttgtgcctcttcatattggcgatcctgttgtgctccctggcattgggcagtgttacagtgcactcttctgaacctgaagtcagaattcctgagaataatcctgtgaagttgtcctgtgcctactcgggcttttcttctccccgtgtggagtggaagtttgaccaaggagacaccaccagactcgtttgctataataacaagatcacagcttcctatgaggaccgggtgaccttcttgccaactggtatcaccttcaagtccgtgacacgggaagacactgggacatacacttgtatggtctctgaggaaggcggcaacagctatggggaggtcaaggtcaagctcatcgtgcttgtgcctccatccaagcctacagttaacatcccctcctctgccaccattgggaaccgggcagtgctgacatgctcagaacaagatggttccccaccttctgaatacacctggttcaaagatgggatagtgatgcctacgaatcccaaaagcacccgtgccttcagcaactcttcctatgtcctgaatcccacaacaggagagctggtctttgatcccctgtcagcctctgatactggagaatacagctgtgaggcacggaatgggtatgggacacccatgacttcaaatgctgtgcgcatggaagctgtggagcggaatgtgggggtcatcgtggcagccgtccttgtaaccctgattctcctgggaatcttggtttttggcatctggtttgcctatagccgaggccactttgacagaacaaagaaagggacttcgagtaagaaggtgatttacagccagcctagtgcccgaagtgaaggagaattcaaacagacctcgtcattcctggtgtgagcctggtcggctcaccgcctatcatctgcatttgccttactcaggtgctaccggactctggcccctgatgtctgtagtttcacaggatgccttatttgtcttctacaccccacagggccccctacttcttcggatgtgtttttaataatgtcagctatgtgccccatcctccttcatgccctccctccctttcctaccactgctgagtggcctggaacttgtttaaagtgtttattccccatttctttgagggatcaggaaggaatcctgggtatgccattgacttcccttctaagtagacagcaaaaatggcgggggtcgcaggaatctgcactcaactgcccacctggctggcagggatctttgaataggtatcttgagcttggttctgggctctttccttgtgtactgacgaccagggccagctgttctagagcgggaattagaggctagagcggctgaaatggttgtttggtgatgacactggggtccttccatctctggggcccactctcttctgtcttcccatgggaagtgccactgggatccctctgccctgtcctcctgaatacaagctgactgacattgactgtgtctgtggaaaatgggagctcttgttgtggagagcatagtaaattttcagagaacttgaagccaaaaggatttaaaaccgctgctctaaagaaaagaaaactggaggctgggcgcagtggctcacgcctataatcccagaggctgaggcaggcggatcacctgaggtcaggagttcaagatcagcctgaccaacatggagaaaccctactgaaaatacaaagttagccaggcatggtggtgcatgcctgtaatcccagctgctcaggagcctggcaacaagagcaaaactccagctcaaaaaaaaaaaagaaagaaaagaaagctggagctggtggcttaggccatcacccttcccttggctggaactactggacagacccttttgagatgtgcctgtggtgctgtggagatgtgtgtagtggtcttagctctttgttgagcttgtgtgtgtgttgtgtagtcttagctgtatgctgaaattgggcgtgtgttggagggcttcttagctctttggtgagattgtatttctatgtgtttgtatcagctgaatgttgctggaaataaaaccttggtttgtcaaggctcttttttgtgggaagtaagtaggggaaaaggtctttgagggttcctaggctcctttgtacaacaggaaaatgcctcaaagccttgcttcccagcaacctggggctggttcccagtgcctggtcctgccccttcctggttcttatctcaaggcagagcttctgaatttcaggccttcattccagagccctcttgtggccaggccttcctttgctggaggaaggtacacagggtgaagctgatgctgtacttgggggatctccttggcctgttccaccaagtgagagaaggtacttactcttgtacctcctgttcagccaggtgcattaacagacctccctacagctgtaggaactactgtcccagagctgaggcaaggggatttctcaggtcatttggagaacaagtgctttagtagtagtttaaagtagtaactgctactgtatttagtggggtggaattcagaagaaatttgaagaccagatcatgggtggtctgcatgtgaatgaacaggaatgagccggacagcctggctgtcattgctttcttcctccccatttggacccttctctgcccttacatttttgtttctccatctaccaccatccaccagtctatttattaacttagcaagaggacaagtaaagggccctcttggcttgattttgcttctttctttctgtggaggatatactaagtgcgactttgccctatcctatttggaaatccctaacagaattgagttttctattaaggatccaaaaagaaaaacaaaatgctaatgaagccatcagtcaagggtcacatgccaataaacaataaattttccagaagaaatgaaatccaactagacaaataaagtagagcttatgaaatggttcagtaaagatgagtttgttgttttttgttttgttttgttttgtttttttaaagacggagtctcgctctgtcacccaggctggagtgcagtggtatgatcttggctcactgtaacctccgcctcccgggttcaagccattctcctgcctcagtctcctgagtagctgggattgcgggtgcgtgccaccatgcctggctaatttttgtgtttttagtagagacagggtttcaccatgttggtcgggctggtctcagactcctgacctcttgatccgcctgccttggcctcccaaagtgatgggattacagatgtgagccaccgtgcctagccaaggatgagatttttaaagtatgtttcagttctgtgtcatggttggaagacagagtaggaaggatatggaaaaggtcatggggaagcagaggtgattcatggctctgtgaatttgaggtgaatggttccttattgtctaggccacttgtgaagaatatgagtcagttattgccagccttggaatttacttctctagcttacaatggaccttttgaactggaaaacaccttgtctgcattcactttaaaatgtcaaaactaatttttataataaatgtttattttcacattga

SEQ ID NO: 296350 - DNA, 3413 bp, Homo sapiens
aactttaggctaggtacgaggcctgggcgggccagggccgcactccggagactcgcggttgctacgcgcaccatggctggagaggtacttctcagccctctagctccaactgagaacccagccagtcaggaagtcgctacttcgggaacaccaaccaatcagggggccgtcacctgctgaagggctggctctcagtcccctcgctgtagtcgcggagctgtgtctgttcccaggagtccttcggcggctgttgtgtcagtggcctgatcgcgatggggacaaaggcgcaagtcgagaggaaactgttgtgcctcttcatattggcgatcctgttgtgctccctggcattgggcagtgttacagtgcactcttctgaacctgaagtcagaattcctgagaataatcctgtgaagttgtcctgtgcctactcgggcttttcttctccccgtgtggagtggaagtttgaccaaggagacaccaccagactcgtttgctataataacaagatcacagcttcctatgaggaccgggtgaccttcttgccaactggtatcaccttcaagtccgtgacacgggaagacactgggacatacacttgtatggtctctgaggaaggcggcaacagctatggggaggtcaaggtcaagctcatcgtgcttgtgcctccatccaagcctacagttaacatcccctcctctgccaccattgggaaccgggcagtgctgacatgctcagaacaagatggttccccaccttctgaatacacctggttcaaagatgggatagtgatgcctacgaatcccaaaagcacccgtgccttcagcaactcttcctatgtcctgaatcccacaacaggagagctggtctttgatcccctgtcagcctctgatactggagaatacagctgtgaggcacggaatgggtatgggacacccatgacttcaaatgctgtgcgcatggaagctgtggagcggaatgtgggggtcatcgtggcagccgtccttgtaaccctgattctcctgggaatcttggtttttggcatctggtttgcctatagccgaggccactttgacagaacaaagaaagggacttcgagtaagaaggtgatttacagccagcctagtgcccgaagtgaaggagaattcaaacagacctcgtcattcctggtgtgagcctggtcggctcaccgcctatcatctgcatttgccttactcaggtgctaccggactctggcccctgatgtctgtagtttcacaggatgccttatttgtcttctacaccccacagggccccctacttcttcggatgtgtttttaataatgtcagctatgtgccccatcctccttcatgccctccctccctttcctaccactgctgagtggcctggaacttgtttaaagtgtttattccccatttctttgagggatcaggaaggaatcctgggtatgccattgacttcccttctaagtagacagcaaaaatggcgggggtcgcaggaatctgcactcaactgcccacctggctggcagggatctttgaataggtatcttgagcttggttctgggctctttccttgtgtactgacgaccagggccagctgttctagagcgggaattagaggctagagcggctgaaatggttgtttggtgatgacactggggtccttccatctctggggcccactctcttctgtcttcccatgggaagtgccactgggatccctctgccctgtcctcctgaatacaagctgactgacattgactgtgtctgtggaaaatgggagctcttgttgtggagagcatagtaaattttcagagaacttgaagccaaaaggatttaaaaccgctgctctaaagaaaagaaaactggaggctgggcgcagtggctcacgcctataatcccagaggctgaggcaggcggatcacctgaggtcaggagttcaagatcagcctgaccaacatggagaaaccctactgaaaatacaaagttagccaggcatggtggtgcatgcctgtaatcccagctgctcaggagcctggcaacaagagcaaaactccagctcaaaaaaaaaaaagaaagaaaagaaagctggagctggtggcttaggccatcacccttcccttggctggaactactggacagacccttttgagatgtgcctgtggtgctgtggagatgtgtgtagtggtcttagctctttgttgagcttgtgtgtgtgttgtgtagtcttagctgtatgctgaaattgggcgtgtgttggagggcttcttagctctttggtgagattgtatttctatgtgtttgtatcagctgaatgttgctggaaataaaaccttggtttgtcaaggctcttttttgtgggaagtaagtaggggaaaaggtctttgagggttcctaggctcctttgtacaacaggaaaatgcctcaaagccttgcttcccagcaacctggggctggttcccagtgcctggtcctgccccttcctggttcttatctcaaggcagagcttctgaatttcaggccttcattccagagccctcttgtggccaggccttcctttgctggaggaaggtacacagggtgaagctgatgctgtacttgggggatctccttggcctgttccaccaagtgagagaaggtacttactcttgtacctcctgttcagccaggtgcattaacagacctccctacagctgtaggaactactgtcccagagctgaggcaaggggatttctcaggtcatttggagaacaagtgctttagtagtagtttaaagtagtaactgctactgtatttagtggggtggaattcagaagaaatttgaagaccagatcatgggtggtctgcatgtgaatgaacaggaatgagccggacagcctggctgtcattgctttcttcctccccatttggacccttctctgcccttacatttttgtttctccatctaccaccatccaccagtctatttattaacttagcaagaggacaagtaaagggccctcttggcttgattttgcttctttctttctgtggaggatatactaagtgcgactttgccctatcctatttggaaatccctaacagaattgagttttctattaaggatccaaaaagaaaaacaaaatgctaatgaagccatcagtcaagggtcacatgccaataaacaataaattttccagaagaaatgaaatccaactagacaaataaagtagagcttatgaaatggttcagtaaagatgagtttgttgttttttgttttgttttgttttgtttttttaaagacggagtctcgctctgtcacccaggctggagtgcagtggtatgatcttggctcactgtaacctccgcctcccgggttcaagccattctcctgcctcagtagcctgggcaacaagagcaaaactccatctcaa

SEQ ID NO: 296351 - DNA, 3379 bp, Homo sapiens
aactttaggctaggtacgaggcctgggcgggccagggccgcactccggagactcgcggttgctacgcgcaccatggctggagaggtacttctcagccctctagctccaactgagaacccagccagtcaggaagtcgctacttcgggaacaccaaccaatcagggggccgtcacctgctgaagggctggctctcagtcccctcgctgtagtcgcggagctgtgtctgttcccaggagtccttcggcggctgttgtgtcagtggcctgatcgcgatggggacaaaggcgcaagtcgagaggaaactgttgtgcctcttcatattggcgatcctgttgtgctccctggcattgggcagtgttacagtgcactcttctgaacctgaagtcagaattcctgagaataatcctgtgaagttgtcctgtgcctactcgggcttttcttctccccgtgtggagtggaagtttgaccaaggagacaccaccagactcgtttgctataataacaagatcacagcttcctatgaggaccgggtgaccttcttgccaactggtatcaccttcaagtccgtgacacgggaagacactgggacatacacttgtatggtctctgaggaaggcggcaacagctatggggaggtcaaggtcaagctcatcgtgcttgtgcctccatccaagcctacagttaacatcccctcctctgccaccattgggaaccgggcagtgctgacatgctcagaacaagatggttccccaccttctgaatacacctggttcaaagatgggatagtgatgcctacgaatcccaaaagcacccgtgccttcagcaactcttcctatgtcctgaatcccacaacaggagagctggtctttgatcccctgtcagcctctgatactggagaatacagctgtgaggcacggaatgggtatgggacacccatgacttcaaatgctgtgcgcatggaagctgtggagcggaatgtgggggtcatcgtggcagccgtccttgtaaccctgattctcctgggaatcttggtttttggcatctggtttgcctatagccgaggccactttgacagaacaaagaaagggacttcgagtaagaaggtgatttacagccagcctagtgcccgaagtgaaggagaattcaaacagacctcgtcattcctggtgtgagcctggtcggctcaccgcctatcatctgcatttgccttactcaggtgctaccggactctggcccctgatgtctgtagtttcacaggatgccttatttgtcttctacaccccacagggccccctacttcttcggatgtgtttttaataatgtcagctatgtgccccatcctccttcatgccctccctccctttcctaccactgctgagtggcctggaacttgtttaaagtgtttattccccatttctttgagggatcaggaaggaatcctgggtatgccattgacttcccttctaagtagacagcaaaaatggcgggggtcgcaggaatctgcactcaactgcccacctggctggcagggatctttgaataggtatcttgagcttggttctgggctctttccttgtgtactgacgaccagggccagctgttctagagcgggaattagaggctagagcggctgaaatggttgtttggtgatgacactggggtccttccatctctggggcccactctcttctgtcttcccatgggaagtgccactgggatccctctgccctgtcctcctgaatacaagctgactgacattgactgtgtctgtggaaaatgggagctcttgttgtggagagcatagtaaattttcagagaacttgaagccaaaaggatttaaaaccgctgctctaaagaaaagaaaactggaggctgggcgcagtggctcacgcctataatcccagaggctgaggcaggcggatcacctgaggtcaggagttcaagatcagcctgaccaacatggagaaaccctactgaaaatacaaagttagccaggcatggtggtgcatgcctgtaatcccagctgctcaggagcctggcaacaagagcaaaactccagctcaaaaaaaaaaaagaaagaaaagaaagctggagctggtggcttaggccatcacccttcccttggctggaactactggacagacccttttgagatgtgcctgtggtgctgtggagatgtgtgtagtggtcttagctctttgttgagcttgtgtgtgtgttgtgtagtcttagctgtatgctgaaattgggcgtgtgttggagggcttcttagctctttggtgagattgtatttctatgtgtttgtatcagctgaatgttgctggaaataaaaccttggtttgtcaaggctcttttttgtgggaagtaagtaggggaaaaggtctttgagggttcctaggctcctttgtacaacaggaaaatgcctcaaagccttgcttcccagcaacctggggctggttcccagtgcctggtcctgccccttcctggttcttatctcaaggcagagcttctgaatttcaggccttcattccagagccctcttgtggccaggccttcctttgctggaggaaggtacacagggtgaagctgatgctgtacttgggggatctccttggcctgttccaccaagtgagagaaggtacttactcttgtacctcctgttcagccaggtgcattaacagacctccctacagctgtaggaactactgtcccagagctgaggcaaggggatttctcaggtcatttggagaacaagtgctttagtagtagtttaaagtagtaactgctactgtatttagtggggtggaattcagaagaaatttgaagaccagatcatgggtggtctgcatgtgaatgaacaggaatgagccggacagcctggctgtcattgctttcttcctccccatttggacccttctctgcccttacatttttgtttctccatctaccaccatccaccagtctatttattaacttagcaagaggacaagtaaagggccctcttggcttgattttgcttctttctttctgtggaggatatactaagtgcgactttgccctatcctatttggaaatccctaacagaattgagttttctattaaggatccaaaaagaaaaacaaaatgctaatgaagccatcagtcaagggtcacatgccaataaacaataaattttccagaagaaatgaaatccaactagacaaataaagtagagcttatgaaatggttcagtaaagatgagtttgttgttttttgttttgttttgttttgtttttttaaagacggagtaatcgcttgaacccgggaggcagaggttgcgtgagccgagatcacgccattgcactccagcctgggcaacaagagcaaaactccatctcaa

SEQ ID NO: 296352 - DNA, 3293 bp, Homo sapiens
aactttaggctaggtacgaggcctgggcgggccagggccgcactccggagactcgcggttgctacgcgcaccatggctggagaggtacttctcagccctctagctccaactgagaacccagccagtcaggaagtcgctacttcgggaacaccaaccaatcagggggccgtcacctgctgaagggctggctctcagtcccctcgctgtagtcgcggagctgtgtctgttcccaggagtccttcggcggctgttgtgtcagtggcctgatcgcgatggggacaaaggcgcaagtcgagaggaaactgttgtgcctcttcatattggcgatcctgttgtgctccctggcattgggcagtgttacagtgcactcttctgaacctgaagtcagaattcctgagaataatcctgtgaagttgtcctgtgcctactcgggcttttcttctccccgtgtggagtggaagtttgaccaaggagacaccaccagactcgtttgctataataacaagatcacagcttcctatgaggaccgggtgaccttcttgccaactggtatcaccttcaagtccgtgacacgggaagacactgggacatacacttgtatggtctctgaggaaggcggcaacagctatggggaggtcaaggtcaagctcatcgtgcttgtgcctccatccaagcctacagttaacatcccctcctctgccaccattgggaaccgggcagtgctgacatgctcagaacaagatggttccccaccttctgaatacacctggttcaaagatgggatagtgatgcctacgaatcccaaaagcacccgtgccttcagcaactcttcctatgtcctgaatcccacaacaggagagctggtctttgatcccctgtcagcctctgatactggagaatacagctgtgaggcacggaatgggtatgggacacccatgacttcaaatgctgtgcgcatggaagctgtggagcggaatgtgggggtcatcgtggcagccgtccttgtaaccctgattctcctgggaatcttggtttttggcatctggtttgcctatagccgaggccactttgacagaacaaagaaagggacttcgagtaagaaggtgatttacagccagcctagtgcccgaagtgaaggagaattcaaacagacctcgtcattcctggtgtgagcctggtcggctcaccgcctatcatctgcatttgccttactcaggtgctaccggactctggcccctgatgtctgtagtttcacaggatgccttatttgtcttctacaccccacagggccccctacttcttcggatgtgtttttaataatgtcagctatgtgccccatcctccttcatgccctccctccctttcctaccactgctgagtggcctggaacttgtttaaagtgtttattccccatttctttgagggatcaggaaggaatcctgggtatgccattgacttcccttctaagtagacagcaaaaatggcgggggtcgcaggaatctgcactcaactgcccacctggctggcagggatctttgaataggtatcttgagcttggttctgggctctttccttgtgtactgacgaccagggccagctgttctagagcgggaattagaggctagagcggctgaaatggttgtttggtgatgacactggggtccttccatctctggggcccactctcttctgtcttcccatgggaagtgccactgggatccctctgccctgtcctcctgaatacaagctgactgacattgactgtgtctgtggaaaatgggagctcttgttgtggagagcatagtaaattttcagagaacttgaagccaaaaggatttaaaaccgctgctctaaagaaaagaaaactggaggctgggcgcagtggctcacgcctataatcccagaggctgaggcaggcggatcacctgaggtcaggagttcaagatcagcctgaccaacatggagaaaccctactgaaaatacaaagttagccaggcatggtggtgcatgcctgtaatcccagctgctcaggagcctggcaacaagagcaaaactccagctcaaaaaaaaaaaagaaagaaaagaaagctggagctggtggcttaggccatcacccttcccttggctggaactactggacagacccttttgagatgtgcctgtggtgctgtggagatgtgtgtagtggtcttagctctttgttgagcttgtgtgtgtgttgtgtagtcttagctgtatgctgaaattgggcgtgtgttggagggcttcttagctctttggtgagattgtatttctatgtgtttgtatcagctgaatgttgctggaaataaaaccttggtttgtcaaggctcttttttgtgggaagtaagtaggggaaaaggtctttgagggttcctaggctcctttgtacaacaggaaaatgcctcaaagccttgcttcccagcaacctggggctggttcccagtgcctggtcctgccccttcctggttcttatctcaaggcagagcttctgaatttcaggccttcattccagagccctcttgtggccaggccttcctttgctggaggaaggtacacagggtgaagctgatgctgtacttgggggatctccttggcctgttccaccaagtgagagaaggtacttactcttgtacctcctgttcagccaggtgcattaacagacctccctacagctgtaggaactactgtcccagagctgaggcaaggggatttctcaggtcatttggagaacaagtgctttagtagtagtttaaagtagtaactgctactgtatttagtggggtggaattcagaagaaatttgaagaccagatcatgggtggtctgcatgtgaatgaacaggaatgagccggacagcctggctgtcattgctttcttcctccccatttggacccttctctgcccttacatttttgtttctccatctaccaccatccaccagtctatttattaacttagcaagaggacaagtaaagggccctcttggcttgattttgcttctttctttctgtggaggatatactaagtgcgactttgccctatcctatttggaaatccctaacagaattgagttttctattaaggatccaaaaagaaaaacaaaatgctaatgaagccatcagtcaagggtcacatgccaataaacaataaattttccagaagaaatgaaatccaactagacaaataaagtagagcttatgaaatggccctgtttggactctgagaataacttggaaaagcagcccaatgaaacattaggatagaaaataatca

SEQ ID NO: 296353 - DNA, 3821 bp, Homo sapiens
  misc_feature (21)..(22): n is a, c, g, or t
aaataggctaggtacgaggcnnggtggtatgttgcaggcgccgagagggcgggccagggccgcactccggagactcgcggttgctacgcgcaccatggctggagaggtacttctcagccctctagctccaactgagaacccagccagtcaggaagtcgctacttcgggaacaccaaccaatcagggggccgtcacctgctgaaggagtccttcggcggctgttgtgtcagtggcctgatcgcgatggggacaaaggcgcaagtcgagaggaaactgttgtgcctcttcatattggcgatcctgttgtgctccctggcattgggcagtgttacagtgcactcttctgaacctgaagtcagaattcctgagaataatcctgtgaagttgtcctgtgcctactcgggcttttcttctccccgtgtggagtggaagtttgaccaaggagacaccaccagactcgtttgctataataacaagatcacagcttcctatgaggaccgggtgaccttcttgccaactggtatcaccttcaagtccgtgacacgggaagacactgggacatacacttgtatggtctctgaggaaggcggcaacagctatggggaggtcaaggtcaagctcatcgtgcttgtgcctccatccaagcctacagttaacatcccctcctctgccaccattgggaaccgggcagtgctgacatgctcagaacaagatggttccccaccttctgaatacacctggttcaaagatgggatagtgatgcctacgaatcccaaaagcacccgtgccttcagcaactcttcctatgtcctgaatcccacaacaggagagctggtctttgatcccctgtcagcctctgatactggagaatacagctgtgaggcacggaatgggtatgggacacccatgacttcaaatgctgtgcgcatggaagctgtggagcggaatgtgggggtcatcgtggcagccgtccttgtaaccctgattctcctgggaatcttggtttttggcatctggtttgcctatagccgaggccactttgacagaacaaagaaagggacttcgagtaagaaggtgatttacagccagcctagtgcccgaagtgaaggagaattcaaacagacctcgtcattcctggtgtgagcctggtcggctcaccgcctatcatctgcatttgccttactcaggtgctaccggactctggcccctgatgtctgtagtttcacaggatgccttatttgtcttctacaccccacagggccccctacttcttcggatgtgtttttaataatgtcagctatgtgccccatcctccttcatgccctccctccctttcctaccactgctgagtggcctggaacttgtttaaagtgtttattccccatttctttgagggatcaggaaggaatcctgggtatgccattgacttcccttctaagtagacagcaaaaatggcgggggtcgcaggaatctgcactcaactgcccacctggctggcagggatctttgaataggtatcttgagcttggttctgggctctttccttgtgtactgacgaccagggccagctgttctagagcgggaattagaggctagagcggctgaaatggttgtttggtgatgacactggggtccttccatctctggggcccactctcttctgtcttcccatgggaagtgccactgggatccctctgccctgtcctcctgaatacaagctgactgacattgactgtgtctgtggaaaatgggagctcttgttgtggagagcatagtaaattttcagagaacttgaagccaaaaggatttaaaaccgctgctctaaagaaaagaaaactggaggctgggcgcagtggctcacgcctataatcccagaggctgaggcaggcggatcacctgaggtcaggagttcaagatcagcctgaccaacatggagaaaccctactgaaaatacaaagttagccaggcatggtggtgcatgcctgtaatcccagctgctcaggagcctggcaacaagagcaaaactccagctcaaaaaaaaaaaagaaagaaaagaaagctggagctggtggcttaggccatcacccttcccttggctggaactactggacagacccttttgagatgtgcctgtggtgctgtggagatgtgtgtagtggtcttagctctttgttgagcttgtgtgtgtgttgtgtagtcttagctgtatgctgaaattgggcgtgtgttggagggcttcttagctctttggtgagattgtatttctatgtgtttgtatcagctgaatgttgctggaaataaaaccttggtttgtcaaggctcttttttgtgggaagtaagtaggggaaaaggtctttgagggttcctaggctcctttgtacaacaggaaaatgcctcaaagccttgcttcccagcaacctggggctggttcccagtgcctggtcctgccccttcctggttcttatctcaaggcagagcttctgaatttcaggccttcattccagagccctcttgtggccaggccttcctttgctggaggaaggtacacagggtgaagctgatgctgtacttgggggatctccttggcctgttccaccaagtgagagaaggtacttactcttgtacctcctgttcagccaggtgcattaacagacctccctacagctgtaggaactactgtcccagagctgaggcaaggggatttctcaggtcatttggagaacaagtgctttagtagtagtttaaagtagtaactgctactgtatttagtggggtggaattcagaagaaatttgaagaccagatcatgggtggtctgcatgtgaatgaacaggaatgagccggacagcctggctgtcattgctttcttcctccccatttggacccttctctgcccttacatttttgtttctccatctaccaccatccaccagtctatttattaacttagcaagaggacaagtaaagggccctcttggcttgattttgcttctttctttctgtggaggatatactaagtgcgactttgccctatcctatttggaaatccctaacagaattgagttttctattaaggatccaaaaagaaaaacaaaatgctaatgaagccatcagtcaagggtcacatgccaataaacaataaattttccagaagaaatgaaatccaactagacaaataaagtagagcttatgaaatggttcagtaaagatgagtttgttgttttttgttttgttttgttttgtttttttaaagacggagtctcgctctgtcacccaggctggagtgcagtggtatgatcttggctcactgtaacctccgcctcccgggttcaagccattctcctgcctcagtctcctgagtagctgggattgcgggtgcgtgccaccatgcctggctaatttttgtgtttttagtagagacagggtttcaccatgttggtcgggctggtctcagactcctgacctcttgatccgcctgccttggcctcccaaagtgatgggattacagatgtgagccaccgtgcctagccaaggatgagatttttaaagtatgtttcagttctgtgtcatggttggaagacagagtaggaaggatatggaaaaggtcatggggaagcagaggtgattcatggctctgtgaatttgaggtgaatggttccttattgtctaggccacttgtgaagaatatgagtcagttattgccagccttggaatttacttctctagcttacaatggaccttttgaactggaaaacaccttgtctgcattcactttaaaatgtcaaaactaatttttataataaatgtttattttcacattga

SEQ ID NO: 296354 - DNA, 3924 bp, Homo sapiens
  misc_feature (156)..(156): n is a, c, g, or t
agagaccacagaaaccttaaggggctaagggttagcgatggcctcgggtgtgctgtgtatgcatatgctgccggagtagcgggctgggccgaggtacctgcgactctcggtgacaatcgtctgcagtgatgtgctgatcgccgtcagccacctggnctatggactgagtgtcacattcgtcaggtaccactctaggcctcgcacatctcgataatacctcgaaggctcagttatatgagatatgtccggctaactctcagtggtatacaccctaggcctattacagggtcgccgacacctgctgaaggagtccttcggcggctgttgtgtcagtggcctgatcgcgatggggacaaaggcgcaagtcgagaggaaactgttgtgcctcttcatattggcgatcctgttgtgctccctggcattgggcagtgttacagtgcactcttctgaacctgaagtcagaattcctgagaataatcctgtgaagttgtcctgtgcctactcgggcttttcttctccccgtgtggagtggaagtttgaccaaggagacaccaccagactcgtttgctataataacaagatcacagcttcctatgaggaccgggtgaccttcttgccaactggtatcaccttcaagtccgtgacacgggaagacactgggacatacacttgtatggtctctgaggaaggcggcaacagctatggggaggtcaaggtcaagctcatcgtgcttgtgcctccatccaagcctacagttaacatcccctcctctgccaccattgggaaccgggcagtgctgacatgctcagaacaagatggttccccaccttctgaatacacctggttcaaagatgggatagtgatgcctacgaatcccaaaagcacccgtgccttcagcaactcttcctatgtcctgaatcccacaacaggagagctggtctttgatcccctgtcagcctctgatactggagaatacagctgtgaggcacggaatgggtatgggacacccatgacttcaaatgctgtgcgcatggaagctgtggagcggaatgtgggggtcatcgtggcagccgtccttgtaaccctgattctcctgggaatcttggtttttggcatctggtttgcctatagccgaggccactttgacagaacaaagaaagggacttcgagtaagaaggtgatttacagccagcctagtgcccgaagtgaaggagaattcaaacagacctcgtcattcctggtgtgagcctggtcggctcaccgcctatcatctgcatttgccttactcaggtgctaccggactctggcccctgatgtctgtagtttcacaggatgccttatttgtcttctacaccccacagggccccctacttcttcggatgtgtttttaataatgtcagctatgtgccccatcctccttcatgccctccctccctttcctaccactgctgagtggcctggaacttgtttaaagtgtttattccccatttctttgagggatcaggaaggaatcctgggtatgccattgacttcccttctaagtagacagcaaaaatggcgggggtcgcaggaatctgcactcaactgcccacctggctggcagggatctttgaataggtatcttgagcttggttctgggctctttccttgtgtactgacgaccagggccagctgttctagagcgggaattagaggctagagcggctgaaatggttgtttggtgatgacactggggtccttccatctctggggcccactctcttctgtcttcccatgggaagtgccactgggatccctctgccctgtcctcctgaatacaagctgactgacattgactgtgtctgtggaaaatgggagctcttgttgtggagagcatagtaaattttcagagaacttgaagccaaaaggatttaaaaccgctgctctaaagaaaagaaaactggaggctgggcgcagtggctcacgcctataatcccagaggctgaggcaggcggatcacctgaggtcaggagttcaagatcagcctgaccaacatggagaaaccctactgaaaatacaaagttagccaggcatggtggtgcatgcctgtaatcccagctgctcaggagcctggcaacaagagcaaaactccagctcaaaaaaaaaaaagaaagaaaagaaagctggagctggtggcttaggccatcacccttcccttggctggaactactggacagacccttttgagatgtgcctgtggtgctgtggagatgtgtgtagtggtcttagctctttgttgagcttgtgtgtgtgttgtgtagtcttagctgtatgctgaaattgggcgtgtgttggagggcttcttagctctttggtgagattgtatttctatgtgtttgtatcagctgaatgttgctggaaataaaaccttggtttgtcaaggctcttttttgtgggaagtaagtaggggaaaaggtctttgagggttcctaggctcctttgtacaacaggaaaatgcctcaaagccttgcttcccagcaacctggggctggttcccagtgcctggtcctgccccttcctggttcttatctcaaggcagagcttctgaatttcaggccttcattccagagccctcttgtggccaggccttcctttgctggaggaaggtacacagggtgaagctgatgctgtacttgggggatctccttggcctgttccaccaagtgagagaaggtacttactcttgtacctcctgttcagccaggtgcattaacagacctccctacagctgtaggaactactgtcccagagctgaggcaaggggatttctcaggtcatttggagaacaagtgctttagtagtagtttaaagtagtaactgctactgtatttagtggggtggaattcagaagaaatttgaagaccagatcatgggtggtctgcatgtgaatgaacaggaatgagccggacagcctggctgtcattgctttcttcctccccatttggacccttctctgcccttacatttttgtttctccatctaccaccatccaccagtctatttattaacttagcaagaggacaagtaaagggccctcttggcttgattttgcttctttctttctgtggaggatatactaagtgcgactttgccctatcctatttggaaatccctaacagaattgagttttctattaaggatccaaaaagaaaaacaaaatgctaatgaagccatcagtcaagggtcacatgccaataaacaataaattttccagaagaaatgaaatccaactagacaaataaagtagagcttatgaaatggttcagtaaagatgagtttgttgttttttgttttgttttgttttgtttttttaaagacggagtctcgctctgtcacccaggctggagtgcagtggtatgatcttggctcactgtaacctccgcctcccgggttcaagccattctcctgcctcagtctcctgagtagctgggattgcgggtgcgtgccaccatgcctggctaatttttgtgtttttagtagagacagggtttcaccatgttggtcgggctggtctcagactcctgacctcttgatccgcctgccttggcctcccaaagtgatgggattacagatgtgagccaccgtgcctagccaaggatgagatttttaaagtatgtttcagttctgtgtcatggttggaagacagagtaggaaggatatggaaaaggtcatggggaagcagaggtgattcatggctctgtgaatttgaggtgaatggttccttattgtctaggccacttgtgaagaatatgagtcagttattgccagccttggaatttacttctctagcttacaatggaccttttgaactggaaaacaccttgtctgcattcactttaaaatgtcaaaactaatttttataataaatgtttattttcacattga

SEQ ID NO: 296355 - DNA, 3940 bp, Homo sapiens
aactttaggctaggtacgaggcctgggcgggccagggccgcactccggagactcgcggttgctacgcgcaccatggctggagaggcaggaccaaagtttctgcaggaccaaactgcaggtgcagttgcaccaagcaacttacattcaaacaaacacaaaaccccaagccaagccggtctccgtaaatcccacaccacgactgcctttcctacttcctccttagaggtacttctcagccctctagctccaactgagaacccagccagtcaggaagtcgctacttcgggaacaccaaccaatcagggggccgtcacctgctgaaggagtccttcggcggctgttgtgtcagtggcctgatcgcgatggggacaaaggcgcaagtcgagaggaaactgttgtgcctcttcatattggcgatcctgttgtgctccctggcattgggcagtgttacagtgcactcttctgaacctgaagtcagaattcctgagaataatcctgtgaagttgtcctgtgcctactcgggcttttcttctccccgtgtggagtggaagtttgaccaaggagacaccaccagactcgtttgctataataacaagatcacagcttcctatgaggaccgggtgaccttcttgccaactggtatcaccttcaagtccgtgacacgggaagacactgggacatacacttgtatggtctctgaggaaggcggcaacagctatggggaggtcaaggtcaagctcatcgtgcttgtgcctccatccaagcctacagttaacatcccctcctctgccaccattgggaaccgggcagtgctgacatgctcagaacaagatggttccccaccttctgaatacacctggttcaaagatgggatagtgatgcctacgaatcccaaaagcacccgtgccttcagcaactcttcctatgtcctgaatcccacaacaggagagctggtctttgatcccctgtcagcctctgatactggagaatacagctgtgaggcacggaatgggtatgggacacccatgacttcaaatgctgtgcgcatggaagctgtggagcggaatgtgggggtcatcgtggcagccgtccttgtaaccctgattctcctgggaatcttggtttttggcatctggtttgcctatagccgaggccactttgacagaacaaagaaagggacttcgagtaagaaggtgatttacagccagcctagtgcccgaagtgaaggagaattcaaacagacctcgtcattcctggtgtgagcctggtcggctcaccgcctatcatctgcatttgccttactcaggtgctaccggactctggcccctgatgtctgtagtttcacaggatgccttatttgtcttctacaccccacagggccccctacttcttcggatgtgtttttaataatgtcagctatgtgccccatcctccttcatgccctccctccctttcctaccactgctgagtggcctggaacttgtttaaagtgtttattccccatttctttgagggatcaggaaggaatcctgggtatgccattgacttcccttctaagtagacagcaaaaatggcgggggtcgcaggaatctgcactcaactgcccacctggctggcagggatctttgaataggtatcttgagcttggttctgggctctttccttgtgtactgacgaccagggccagctgttctagagcgggaattagaggctagagcggctgaaatggttgtttggtgatgacactggggtccttccatctctggggcccactctcttctgtcttcccatgggaagtgccactgggatccctctgccctgtcctcctgaatacaagctgactgacattgactgtgtctgtggaaaatgggagctcttgttgtggagagcatagtaaattttcagagaacttgaagccaaaaggatttaaaaccgctgctctaaagaaaagaaaactggaggctgggcgcagtggctcacgcctataatcccagaggctgaggcaggcggatcacctgaggtcaggagttcaagatcagcctgaccaacatggagaaaccctactgaaaatacaaagttagccaggcatggtggtgcatgcctgtaatcccagctgctcaggagcctggcaacaagagcaaaactccagctcaaaaaaaaaaaagaaagaaaagaaagctggagctggtggcttaggccatcacccttcccttggctggaactactggacagacccttttgagatgtgcctgtggtgctgtggagatgtgtgtagtggtcttagctctttgttgagcttgtgtgtgtgttgtgtagtcttagctgtatgctgaaattgggcgtgtgttggagggcttcttagctctttggtgagattgtatttctatgtgtttgtatcagctgaatgttgctggaaataaaaccttggtttgtcaaggctcttttttgtgggaagtaagtaggggaaaaggtctttgagggttcctaggctcctttgtacaacaggaaaatgcctcaaagccttgcttcccagcaacctggggctggttcccagtgcctggtcctgccccttcctggttcttatctcaaggcagagcttctgaatttcaggccttcattccagagccctcttgtggccaggccttcctttgctggaggaaggtacacagggtgaagctgatgctgtacttgggggatctccttggcctgttccaccaagtgagagaaggtacttactcttgtacctcctgttcagccaggtgcattaacagacctccctacagctgtaggaactactgtcccagagctgaggcaaggggatttctcaggtcatttggagaacaagtgctttagtagtagtttaaagtagtaactgctactgtatttagtggggtggaattcagaagaaatttgaagaccagatcatgggtggtctgcatgtgaatgaacaggaatgagccggacagcctggctgtcattgctttcttcctccccatttggacccttctctgcccttacatttttgtttctccatctaccaccatccaccagtctatttattaacttagcaagaggacaagtaaagggccctcttggcttgattttgcttctttctttctgtggaggatatactaagtgcgactttgccctatcctatttggaaatccctaacagaattgagttttctattaaggatccaaaaagaaaaacaaaatgctaatgaagccatcagtcaagggtcacatgccaataaacaataaattttccagaagaaatgaaatccaactagacaaataaagtagagcttatgaaatggttcagtaaagatgagtttgttgttttttgttttgttttgttttgtttttttaaagacggagtctcgctctgtcacccaggctggagtgcagtggtatgatcttggctcactgtaacctccgcctcccgggttcaagccattctcctgcctcagtctcctgagtagctgggattgcgggtgcgtgccaccatgcctggctaatttttgtgtttttagtagagacagggtttcaccatgttggtcgggctggtctcagactcctgacctcttgatccgcctgccttggcctcccaaagtgatgggattacagatgtgagccaccgtgcctagccaaggatgagatttttaaagtatgtttcagttctgtgtcatggttggaagacagagtaggaaggatatggaaaaggtcatggggaagcagaggtgattcatggctctgtgaatttgaggtgaatggttccttattgtctaggccacttgtgaagaatatgagtcagttattgccagccttggaatttacttctctagcttacaatggaccttttgaactggaaaacaccttgtctgcattcactttaaaatgtcaaaactaatttttataataaatgtttattttcacattga

SEQ ID NO: 296356 - DNA, 2492 bp, Homo sapiens
aactttaggctaggtacgaggcctgggcgggccagggccgcactccggagactcgcggttgctacgcgcaccatggctggagaggtacttctcagccctctagctccaactgagaacccagccagtcaggaagtcgctacttcgggaacaccaaccaatcagggggccgtcacctgctgaagggctggctctcagtcccctcgctgtagtcgcggagctgtgtctgttcccaggagtccttcggcggctgttgtgtcagtggcctgatcgcgatggggacaaaggcgcaagtcgagaggaaactgttgtgcctcttcatattggcgatcctgttgtgctccctggcattgggcagtgttacagtgcactcttctgaacctgaagtcagaattcctgagaataatcctgtgaagttgtcctgtgcctactcgggcttttcttctccccgtgtggagtggaagtttgaccaaggagacaccaccagactcgtttgctataataacaagatcacagcttcctatgaggaccgggtgaccttcttgccaactggtatcaccttcaagtccgtgacacgggaagacactgggacatacacttgtatggtctctgaggaaggcggcaacagctatggggaggtcaaggtcaagctcatcgtgcttgtgcctccatccaagcctacagttaacatcccctcctctgccaccattgggaaccgggcagtgctgacatgctcagaacaagatggttccccaccttctgaatacacctggttcaaagatgggatagtgatgcctacgaatcccaaaagcacccgtgccttcagcaactcttcctatgtcctgaatcccacaacaggagagctggtctttgatcccctgtcagcctctgatactggagaatacagctgtgaggcacggaatgggtatgggacacccatgacttcaaatgctgtgcgcatggaagctgtggagcggaatgtgggggtcatcgtggcagccgtccttgtaaccctgattctcctgggaatcttggtttttggcatctggtttgcctatagccgaggccactttgacagaacaaagaaagggacttcgagtaagaaggtgatttacagccagcctagtgcccgaagtgaaggagaattcaaacagacctcgtcattcctggtgtgagcctggtcggctcaccgcctatcatctgcatttgccttactcaggtgctaccggactctggcccctgatgtctgtagtttcacaggatgccttatttgtcttctacaccccacagggccccctacttcttcggatgtgtttttaataatgtcagctatgtgccccatcctccttcatgccctccctccctttcctaccactgctgagtggcctggaacttgtttaaagtgtttattccccatttctttgagggatcaggaaggaatcctgggtatgccattgacttcccttctaagtagacagcaaaaatggcgggggtcgcaggaatctgcactcaactgcccacctggctggcagggatctttgaataggtatcttgagcttggttctgggctctttccttgtgtactgacgaccagggccagctgttctagagcgggaattagaggctagagcggctgaaatggttgtttggtgatgacactggggtccttccatctctggggcccactctcttctgtcttcccatgggaagtgccactgggatccctctgccctgtcctcctgaatacaagctgactgacattgactgtgtctgtggaaaatgggagctcttgttgtggagagcatagtaaattttcagagaacttgaagccaaaaggatttaaaaccgctgctctaaagaaaagaaaactggaggctgggcgcagtggctcacgcctataatcccagaggctgaggcaggcggatcacctgaggtcaggagttcaagatcagcctgaccaacatggagaaaccctactgaaaatacaaagttagccaggcatggtggtgcatgcctgtaatcccagctgctcaggagcctggcaacaagagcaaaactccagctcaaaaaaaaaaaagaaagaaaagaaagctggagctggtggcttaggccatcacccttcccttggctggaactactggacagacccttttgagatgtgcctgtggtgctgtggagatgtgtgtagtggtcttagctctttgttgagcttgtgtgtgtgttgtgtagtcttagctgtatgctgaaattgggcgtgtgttggagggcttcttagctctttggtgagattgtatttctatgtgtttgtatcagctgaatgttgctggaaataaaaccttggtttgtcaaggctcttttttgtgggaagtaagtaggggaaaaggtctttgagggttcctaggctcctttggatttctatgtgtttgtatcagctgaatgttgctggaaataaaaccttggtttgtcaaggctcttttttgtcggaagtatgtagt

SEQ ID NO: 296357 - DNA, 3501 bp, Homo sapiens
cccatctcgtgtatttgctgctgttcttccttcggctcatttgaccctgtctgcagctgtgaagttgtcctgtgcctactcgggcttttcttctccccgtgtggagtggaagtttgaccaaggagacaccaccagactcgtttgctataataacaagatcacagcttcctatgaggaccgggtgaccttcttgccaactggtatcaccttcaagtccgtgacacgggaagacactgggacatacacttgtatggtctctgaggaaggcggcaacagctatggggaggtcaaggtcaagctcatcgtgcttgtgcctccatccaagcctacagttaacatcccctcctctgccaccattgggaaccgggcagtgctgacatgctcagaacaagatggttccccaccttctgaatacacctggttcaaagatgggatagtgatgcctacgaatcccaaaagcacccgtgccttcagcaactcttcctatgtcctgaatcccacaacaggagagctggtctttgatcccctgtcagcctctgatactggagaatacagctgtgaggcacggaatgggtatgggacacccatgacttcaaatgctgtgcgcatggaagctgtggagcggaatgtgggggtcatcgtggcagccgtccttgtaaccctgattctcctgggaatcttggtttttggcatctggtttgcctatagccgaggccactttgacagaacaaagaaagggacttcgagtaagaaggtgatttacagccagcctagtgcccgaagtgaaggagaattcaaacagacctcgtcattcctggtgtgagcctggtcggctcaccgcctatcatctgcatttgccttactcaggtgctaccggactctggcccctgatgtctgtagtttcacaggatgccttatttgtcttctacaccccacagggccccctacttcttcggatgtgtttttaataatgtcagctatgtgccccatcctccttcatgccctccctccctttcctaccactgctgagtggcctggaacttgtttaaagtgtttattccccatttctttgagggatcaggaaggaatcctgggtatgccattgacttcccttctaagtagacagcaaaaatggcgggggtcgcaggaatctgcactcaactgcccacctggctggcagggatctttgaataggtatcttgagcttggttctgggctctttccttgtgtactgacgaccagggccagctgttctagagcgggaattagaggctagagcggctgaaatggttgtttggtgatgacactggggtccttccatctctggggcccactctcttctgtcttcccatgggaagtgccactgggatccctctgccctgtcctcctgaatacaagctgactgacattgactgtgtctgtggaaaatgggagctcttgttgtggagagcatagtaaattttcagagaacttgaagccaaaaggatttaaaaccgctgctctaaagaaaagaaaactggaggctgggcgcagtggctcacgcctataatcccagaggctgaggcaggcggatcacctgaggtcaggagttcaagatcagcctgaccaacatggagaaaccctactgaaaatacaaagttagccaggcatggtggtgcatgcctgtaatcccagctgctcaggagcctggcaacaagagcaaaactccagctcaaaaaaaaaaaagaaagaaaagaaagctggagctggtggcttaggccatcacccttcccttggctggaactactggacagacccttttgagatgtgcctgtggtgctgtggagatgtgtgtagtggtcttagctctttgttgagcttgtgtgtgtgttgtgtagtcttagctgtatgctgaaattgggcgtgtgttggagggcttcttagctctttggtgagattgtatttctatgtgtttgtatcagctgaatgttgctggaaataaaaccttggtttgtcaaggctcttttttgtgggaagtaagtaggggaaaaggtctttgagggttcctaggctcctttgtacaacaggaaaatgcctcaaagccttgcttcccagcaacctggggctggttcccagtgcctggtcctgccccttcctggttcttatctcaaggcagagcttctgaatttcaggccttcattccagagccctcttgtggccaggccttcctttgctggaggaaggtacacagggtgaagctgatgctgtacttgggggatctccttggcctgttccaccaagtgagagaaggtacttactcttgtacctcctgttcagccaggtgcattaacagacctccctacagctgtaggaactactgtcccagagctgaggcaaggggatttctcaggtcatttggagaacaagtgctttagtagtagtttaaagtagtaactgctactgtatttagtggggtggaattcagaagaaatttgaagaccagatcatgggtggtctgcatgtgaatgaacaggaatgagccggacagcctggctgtcattgctttcttcctccccatttggacccttctctgcccttacatttttgtttctccatctaccaccatccaccagtctatttattaacttagcaagaggacaagtaaagggccctcttggcttgattttgcttctttctttctgtggaggatatactaagtgcgactttgccctatcctatttggaaatccctaacagaattgagttttctattaaggatccaaaaagaaaaacaaaatgctaatgaagccatcagtcaagggtcacatgccaataaacaataaattttccagaagaaatgaaatccaactagacaaataaagtagagcttatgaaatggttcagtaaagatgagtttgttgttttttgttttgttttgttttgtttttttaaagacggagtctcgctctgtcacccaggctggagtgcagtggtatgatcttggctcactgtaacctccgcctcccgggttcaagccattctcctgcctcagtctcctgagtagctgggattgcgggtgcgtgccaccatgcctggctaatttttgtgtttttagtagagacagggtttcaccatgttggtcgggctggtctcagactcctgacctcttgatccgcctgccttggcctcccaaagtgatgggattacagatgtgagccaccgtgcctagccaaggatgagatttttaaagtatgtttcagttctgtgtcatggttggaagacagagtaggaaggatatggaaaaggtcatggggaagcagaggtgattcatggctctgtgaatttgaggtgaatggttccttattgtctaggccacttgtgaagaatatgagtcagttattgccagccttggaatttacttctctagcttacaatggaccttttgaactggaaaacaccttgtctgcattcactttaaaatgtcaaaactaatttttataataaatgtttattttcacattga

SEQ ID NO: 296358 - DNA, 2648 bp, Homo sapiens
  misc_feature (2648)..(2648): n is a, c, g, or t
aactttaggctaggtacgaggcctgggcgggccagggccgcactccggagactcgcggttgctacgcgcaccatggctggagaggtacttctcagccctctagctccaactgagaacccagccagtcaggaagtcgctacttcgggaacaccaaccaatcagggggccgtcacctgctgaagggctggctctcagtcccctcgctgtagtcgcggagctgtgtctgttcccaggagtccttcggcggctgttgtgtcagtggcctgatcgcgatggggacaaaggcgcaagtcgagaggaaactgttgtgcctcttcatattggcgatcctgttgtgctccctggcattgggcagtgttacagtgcactcttctgaacctgaagtcagaattcctgagaataatcctgtgaagttgtcctgtgcctactcgggcttttcttctccccgtgtggagtggaagtttgaccaaggagacaccaccagactcgtttgctataataacaagatcacagcttcctatgaggaccgggtgaccttcttgccaactggtatcaccttcaagtccgtgacacgggaagacactgggacatacacttgtatggtctctgaggaaggcggcaacagctatggggaggtcaaggtcaagctcatcgtgcttgtgcctccatccaagcctacagttaacatcccctcctctgccaccattgggaaccgggcagtgctgacatgctcagaacaagatggttccccaccttctgaatacacctggttcaaagatgggatagtgatgcctacgaatcccaaaagcacccgtgccttcagcaactcttcctatgtcctgaatcccacaacaggagagctggtctttgatcccctgtcagcctctgatactggagaatacagctgtgaggcacggaatgggtatgggacacccatgacttcaaatgctgtgcgcatggaagctgtggagcggaatgtgggggtcatcgtggcagccgtccttgtaaccctgattctcctgggaatcttggtttttggcatctggtttgcctatagccgaggccactttgacagaacaaagaaagggacttcgagtaagaaggtgatttacagccagcctagtgcccgaagtgaaggagaattcaaacagacctcgtcattcctggtgtgagcctggtcggctcaccgcctatcatctgcatttgccttactcaggtgctaccggactctggcccctgatgtctgtagtttcacaggatgccttatttgtcttctacaccccacagggccccctacttcttcggatgtgtttttaataatgtcagctatgtgccccatcctccttcatgccctccctccctttcctaccactgctgagtggcctggaacttgtttaaagtgtttattccccatttctttgagggatcaggaaggaatcctgggtatgccattgacttcccttctaagtagacagcaaaaatggcgggggtcgcaggaatctgcactcaactgcccacctggctggcagggatctttgaataggtatcttgagcttggttctgggctctttccttgtgtactgacgaccagggccagctgttctagagcgggaattagaggctagagcggctgaaatggttgtttggtgatgacactggggtccttccatctctggggcccactctcttctgtcttcccatgggaagtgccactgggatccctctgccctgtcctcctgaatacaagctgactgacattgactgtgtctgtggaaaatgggagctcttgttgtggagagcatagtaaattttcagagaacttgaagccaaaaggatttaaaaccgctgctctaaagaaaagaaaactggaggctgggcgcagtggctcacgcctataatcccagaggctgaggcaggcggatcacctgaggtcaggagttcaagatcagcctgaccaacatggagaaaccctactgaaaatacaaagttagccaggcatggtggtgcatgcctgtaatcccagctgctcaggagcctggcaacaagagcaaaactccagctcaaaaaaaaaaaagaaagaaaagaaagctggagctggtggcttaggccatcacccttcccttggctggaactactggacagacccttttgagatgtgcctgtggtgctgtggagatgtgtgtagtggtcttagctctttgttgagcttgtgtgtgtgttgtgtagtcttagctgtatgctgaaattgggcgtgtgttggagggcttcttagctctttggtgagattgtatttctatgtgtttgtatcagctgaatgttgctggaaataaaaccttggtaaaaaaaaaaaaaaaaaaaaaaaaaaagggcggggagaacaaaaccaccggaggaggaccacatacatcacaccaagtctgttggaaggaagagaccaagaaagaaacacaaaacgaggcgggggccgaacaaacggtggggggaaacggtcgtgtctcggaaaaccctgctggggggcacagccaaccacacaaagagcgacgaaaaataagttggcgacaacctggcgtcaacgtccgttatatgagagtaataagaatagcaacgatgaaacacaaggcaaagagcacagacaactcacaggcagn

SEQ ID NO: 296359 - DNA, 3691 bp, Homo sapiens
gctagaccattgcgtatgtgtctcggtccccataagtccttcaacgtggttgctatgagctcgttgcctatggaatcatccatgggtcgatgacatagctgcttgtcgttcatcgaccatttatgtgactctctggatgagttgacgatccgtttttgtgactcactgcagaatggagctatctgtagagtcgatggcactgcgtatctgatcactgaggatctccaatccgcatgctcaatattcctgtgaagttgtcctgtgcctactcgggcttttcttctccccgtgtggagtggaagtttgaccaaggagacaccaccagactcgtttgctataataacaagatcacagcttcctatgaggaccgggtgaccttcttgccaactggtatcaccttcaagtccgtgacacgggaagacactgggacatacacttgtatggtctctgaggaaggcggcaacagctatggggaggtcaaggtcaagctcatcgtgcttgtgcctccatccaagcctacagttaacatcccctcctctgccaccattgggaaccgggcagtgctgacatgctcagaacaagatggttccccaccttctgaatacacctggttcaaagatgggatagtgatgcctacgaatcccaaaagcacccgtgccttcagcaactcttcctatgtcctgaatcccacaacaggagagctggtctttgatcccctgtcagcctctgatactggagaatacagctgtgaggcacggaatgggtatgggacacccatgacttcaaatgctgtgcgcatggaagctgtggagcggaatgtgggggtcatcgtggcagccgtccttgtaaccctgattctcctgggaatcttggtttttggcatctggtttgcctatagccgaggccactttgacagaacaaagaaagggacttcgagtaagaaggtgatttacagccagcctagtgcccgaagtgaaggagaattcaaacagacctcgtcattcctggtgtgagcctggtcggctcaccgcctatcatctgcatttgccttactcaggtgctaccggactctggcccctgatgtctgtagtttcacaggatgccttatttgtcttctacaccccacagggccccctacttcttcggatgtgtttttaataatgtcagctatgtgccccatcctccttcatgccctccctccctttcctaccactgctgagtggcctggaacttgtttaaagtgtttattccccatttctttgagggatcaggaaggaatcctgggtatgccattgacttcccttctaagtagacagcaaaaatggcgggggtcgcaggaatctgcactcaactgcccacctggctggcagggatctttgaataggtatcttgagcttggttctgggctctttccttgtgtactgacgaccagggccagctgttctagagcgggaattagaggctagagcggctgaaatggttgtttggtgatgacactggggtccttccatctctggggcccactctcttctgtcttcccatgggaagtgccactgggatccctctgccctgtcctcctgaatacaagctgactgacattgactgtgtctgtggaaaatgggagctcttgttgtggagagcatagtaaattttcagagaacttgaagccaaaaggatttaaaaccgctgctctaaagaaaagaaaactggaggctgggcgcagtggctcacgcctataatcccagaggctgaggcaggcggatcacctgaggtcaggagttcaagatcagcctgaccaacatggagaaaccctactgaaaatacaaagttagccaggcatggtggtgcatgcctgtaatcccagctgctcaggagcctggcaacaagagcaaaactccagctcaaaaaaaaaaaagaaagaaaagaaagctggagctggtggcttaggccatcacccttcccttggctggaactactggacagacccttttgagatgtgcctgtggtgctgtggagatgtgtgtagtggtcttagctctttgttgagcttgtgtgtgtgttgtgtagtcttagctgtatgctgaaattgggcgtgtgttggagggcttcttagctctttggtgagattgtatttctatgtgtttgtatcagctgaatgttgctggaaataaaaccttggtttgtcaaggctcttttttgtgggaagtaagtaggggaaaaggtctttgagggttcctaggctcctttgtacaacaggaaaatgcctcaaagccttgcttcccagcaacctggggctggttcccagtgcctggtcctgccccttcctggttcttatctcaaggcagagcttctgaatttcaggccttcattccagagccctcttgtggccaggccttcctttgctggaggaaggtacacagggtgaagctgatgctgtacttgggggatctccttggcctgttccaccaagtgagagaaggtacttactcttgtacctcctgttcagccaggtgcattaacagacctccctacagctgtaggaactactgtcccagagctgaggcaaggggatttctcaggtcatttggagaacaagtgctttagtagtagtttaaagtagtaactgctactgtatttagtggggtggaattcagaagaaatttgaagaccagatcatgggtggtctgcatgtgaatgaacaggaatgagccggacagcctggctgtcattgctttcttcctccccatttggacccttctctgcccttacatttttgtttctccatctaccaccatccaccagtctatttattaacttagcaagaggacaagtaaagggccctcttggcttgattttgcttctttctttctgtggaggatatactaagtgcgactttgccctatcctatttggaaatccctaacagaattgagttttctattaaggatccaaaaagaaaaacaaaatgctaatgaagccatcagtcaagggtcacatgccaataaacaataaattttccagaagaaatgaaatccaactagacaaataaagtagagcttatgaaatggttcagtaaagatgagtttgttgttttttgttttgttttgttttgtttttttaaagacggagtctcgctctgtcacccaggctggagtgcagtggtatgatcttggctcactgtaacctccgcctcccgggttcaagccattctcctgcctcagtctcctgagtagctgggattgcgggtgcgtgccaccatgcctggctaatttttgtgtttttagtagagacagggtttcaccatgttggtcgggctggtctcagactcctgacctcttgatccgcctgccttggcctcccaaagtgatgggattacagatgtgagccaccgtgcctagccaaggatgagatttttaaagtatgtttcagttctgtgtcatggttggaagacagagtaggaaggatatggaaaaggtcatggggaagcagaggtgattcatggctctgtgaatttgaggtgaatggttccttattgtctaggccacttgtgaagaatatgagtcagttattgccagccttggaatttacttctctagcttacaatggaccttttgaactggaaaacaccttgtctgcattcactttaaaatgtcaaaactaatttttataataaatgtttattttcacattga

SEQ ID NO: 296360 - DNA, 3251 bp, Homo sapiens
ctctagattggacaggcattccaccttgagtatgccagcttggctagctcatctgtgcttgtgcctccatccaagcctacagttaacatcccctcctctgccaccattgggaaccgggcagtgctgacatgctcagaacaagatggttccccaccttctgaatacacctggttcaaagatgggatagtgatgcctacgaatcccaaaagcacccgtgccttcagcaactcttcctatgtcctgaatcccacaacaggagagctggtctttgatcccctgtcagcctctgatactggagaatacagctgtgaggcacggaatgggtatgggacacccatgacttcaaatgctgtgcgcatggaagctgtggagcggaatgtgggggtcatcgtggcagccgtccttgtaaccctgattctcctgggaatcttggtttttggcatctggtttgcctatagccgaggccactttgacagaacaaagaaagggacttcgagtaagaaggtgatttacagccagcctagtgcccgaagtgaaggagaattcaaacagacctcgtcattcctggtgtgagcctggtcggctcaccgcctatcatctgcatttgccttactcaggtgctaccggactctggcccctgatgtctgtagtttcacaggatgccttatttgtcttctacaccccacagggccccctacttcttcggatgtgtttttaataatgtcagctatgtgccccatcctccttcatgccctccctccctttcctaccactgctgagtggcctggaacttgtttaaagtgtttattccccatttctttgagggatcaggaaggaatcctgggtatgccattgacttcccttctaagtagacagcaaaaatggcgggggtcgcaggaatctgcactcaactgcccacctggctggcagggatctttgaataggtatcttgagcttggttctgggctctttccttgtgtactgacgaccagggccagctgttctagagcgggaattagaggctagagcggctgaaatggttgtttggtgatgacactggggtccttccatctctggggcccactctcttctgtcttcccatgggaagtgccactgggatccctctgccctgtcctcctgaatacaagctgactgacattgactgtgtctgtggaaaatgggagctcttgttgtggagagcatagtaaattttcagagaacttgaagccaaaaggatttaaaaccgctgctctaaagaaaagaaaactggaggctgggcgcagtggctcacgcctataatcccagaggctgaggcaggcggatcacctgaggtcaggagttcaagatcagcctgaccaacatggagaaaccctactgaaaatacaaagttagccaggcatggtggtgcatgcctgtaatcccagctgctcaggagcctggcaacaagagcaaaactccagctcaaaaaaaaaaaagaaagaaaagaaagctggagctggtggcttaggccatcacccttcccttggctggaactactggacagacccttttgagatgtgcctgtggtgctgtggagatgtgtgtagtggtcttagctctttgttgagcttgtgtgtgtgttgtgtagtcttagctgtatgctgaaattgggcgtgtgttggagggcttcttagctctttggtgagattgtatttctatgtgtttgtatcagctgaatgttgctggaaataaaaccttggtttgtcaaggctcttttttgtgggaagtaagtaggggaaaaggtctttgagggttcctaggctcctttgtacaacaggaaaatgcctcaaagccttgcttcccagcaacctggggctggttcccagtgcctggtcctgccccttcctggttcttatctcaaggcagagcttctgaatttcaggccttcattccagagccctcttgtggccaggccttcctttgctggaggaaggtacacagggtgaagctgatgctgtacttgggggatctccttggcctgttccaccaagtgagagaaggtacttactcttgtacctcctgttcagccaggtgcattaacagacctccctacagctgtaggaactactgtcccagagctgaggcaaggggatttctcaggtcatttggagaacaagtgctttagtagtagtttaaagtagtaactgctactgtatttagtggggtggaattcagaagaaatttgaagaccagatcatgggtggtctgcatgtgaatgaacaggaatgagccggacagcctggctgtcattgctttcttcctccccatttggacccttctctgcccttacatttttgtttctccatctaccaccatccaccagtctatttattaacttagcaagaggacaagtaaagggccctcttggcttgattttgcttctttctttctgtggaggatatactaagtgcgactttgccctatcctatttggaaatccctaacagaattgagttttctattaaggatccaaaaagaaaaacaaaatgctaatgaagccatcagtcaagggtcacatgccaataaacaataaattttccagaagaaatgaaatccaactagacaaataaagtagagcttatgaaatggttcagtaaagatgagtttgttgttttttgttttgttttgttttgtttttttaaagacggagtctcgctctgtcacccaggctggagtgcagtggtatgatcttggctcactgtaacctccgcctcccgggttcaagccattctcctgcctcagtctcctgagtagctgggattgcgggtgcgtgccaccatgcctggctaatttttgtgtttttagtagagacagggtttcaccatgttggtcgggctggtctcagactcctgacctcttgatccgcctgccttggcctcccaaagtgatgggattacagatgtgagccaccgtgcctagccaaggatgagatttttaaagtatgtttcagttctgtgtcatggttggaagacagagtaggaaggatatggaaaaggtcatggggaagcagaggtgattcatggctctgtgaatttgaggtgaatggttccttattgtctaggccacttgtgaagaatatgagtcagttattgccagccttggaatttacttctctagcttacaatggaccttttgaactggaaaacaccttgtctgcattcactttaaaatgtcaaaactaatttttataataaatgtttattttcacattga

SEQ ID NO: 296361 - DNA, 2927 bp, Homo sapiens
  misc_feature (38)..(40): n is a, c, g, or t
tgaaggtactctagaggatcgtatgcggtgcgcatggnnnctgtggagcggaatgtgggggtcatcgtggcagccgtccttgtaaccctgattctcctgggaatcttggtttttggcatctggtttgcctatagccgaggccactttgacagaacaaagaaagggacttcgagtaagaaggtgatttacagccagcctagtgcccgaagtgaaggagaattcaaacagacctcgtcattcctggtgtgagcctggtcggctcaccgcctatcatctgcatttgccttactcaggtgctaccggactctggcccctgatgtctgtagtttcacaggatgccttatttgtcttctacaccccacagggccccctacttcttcggatgtgtttttaataatgtcagctatgtgccccatcctccttcatgccctccctccctttcctaccactgctgagtggcctggaacttgtttaaagtgtttattccccatttctttgagggatcaggaaggaatcctgggtatgccattgacttcccttctaagtagacagcaaaaatggcgggggtcgcaggaatctgcactcaactgcccacctggctggcagggatctttgaataggtatcttgagcttggttctgggctctttccttgtgtactgacgaccagggccagctgttctagagcgggaattagaggctagagcggctgaaatggttgtttggtgatgacactggggtccttccatctctggggcccactctcttctgtcttcccatgggaagtgccactgggatccctctgccctgtcctcctgaatacaagctgactgacattgactgtgtctgtggaaaatgggagctcttgttgtggagagcatagtaaattttcagagaacttgaagccaaaaggatttaaaaccgctgctctaaagaaaagaaaactggaggctgggcgcagtggctcacgcctataatcccagaggctgaggcaggcggatcacctgaggtcaggagttcaagatcagcctgaccaacatggagaaaccctactgaaaatacaaagttagccaggcatggtggtgcatgcctgtaatcccagctgctcaggagcctggcaacaagagcaaaactccagctcaaaaaaaaaaaagaaagaaaagaaagctggagctggtggcttaggccatcacccttcccttggctggaactactggacagacccttttgagatgtgcctgtggtgctgtggagatgtgtgtagtggtcttagctctttgttgagcttgtgtgtgtgttgtgtagtcttagctgtatgctgaaattgggcgtgtgttggagggcttcttagctctttggtgagattgtatttctatgtgtttgtatcagctgaatgttgctggaaataaaaccttggtttgtcaaggctcttttttgtgggaagtaagtaggggaaaaggtctttgagggttcctaggctcctttgtacaacaggaaaatgcctcaaagccttgcttcccagcaacctggggctggttcccagtgcctggtcctgccccttcctggttcttatctcaaggcagagcttctgaatttcaggccttcattccagagccctcttgtggccaggccttcctttgctggaggaaggtacacagggtgaagctgatgctgtacttgggggatctccttggcctgttccaccaagtgagagaaggtacttactcttgtacctcctgttcagccaggtgcattaacagacctccctacagctgtaggaactactgtcccagagctgaggcaaggggatttctcaggtcatttggagaacaagtgctttagtagtagtttaaagtagtaactgctactgtatttagtggggtggaattcagaagaaatttgaagaccagatcatgggtggtctgcatgtgaatgaacaggaatgagccggacagcctggctgtcattgctttcttcctccccatttggacccttctctgcccttacatttttgtttctccatctaccaccatccaccagtctatttattaacttagcaagaggacaagtaaagggccctcttggcttgattttgcttctttctttctgtggaggatatactaagtgcgactttgccctatcctatttggaaatccctaacagaattgagttttctattaaggatccaaaaagaaaaacaaaatgctaatgaagccatcagtcaagggtcacatgccaataaacaataaattttccagaagaaatgaaatccaactagacaaataaagtagagcttatgaaatggttcagtaaagatgagtttgttgttttttgttttgttttgttttgtttttttaaagacggagtctcgctctgtcacccaggctggagtgcagtggtatgatcttggctcactgtaacctccgcctcccgggttcaagccattctcctgcctcagtctcctgagtagctgggattgcgggtgcgtgccaccatgcctggctaatttttgtgtttttagtagagacagggtttcaccatgttggtcgggctggtctcagactcctgacctcttgatccgcctgccttggcctcccaaagtgatgggattacagatgtgagccaccgtgcctagccaaggatgagatttttaaagtatgtttcagttctgtgtcatggttggaagacagagtaggaaggatatggaaaaggtcatggggaagcagaggtgattcatggctctgtgaatttgaggtgaatggttccttattgtctaggccacttgtgaagaatatgagtcagttattgccagccttggaatttacttctctagcttacaatggaccttttgaactggaaaacaccttgtctgcattcactttaaaatgtcaaaactaatttttataataaatgtttattttcacattga

SEQ ID NO: 296362 - DNA, 2786 bp, Homo sapiens
aactttaggctaggtacgaggcctgggcgggccagggccgcactccggagactcgcggttgctacgcgcaccatggctggagaggtacttctcagccctctagctccaactgagaacccagccagtcaggaagtcgctacttcgggaacaccaaccaatcagggggccgtcacctgctgaagggctggctctcagtcccctcgctgtagtcgcggagctgtgtctgttcccaggagtccttcggcggctgttgtgtcagtggcctgatcgcgatggggacaaaggcgcaagtcgagaggaaactgttgtgcctcttcatattggcgatcctgttgtgctccctggcattgggcagtgttacagtgcactcttctgaacctgaagtcagaattcctgagaataatcctgtgaagttgtcctgtgcctactcgggcttttcttctccccgtgtggagtggaagtttgaccaaggagacaccaccagactcgtttgctataataacaagatcacagcttcctatgaggaccgggtgaccttcttgccaactggtatcaccttcaagtccgtgacacgggaagacactgggacatacacttgtatggtctctgaggaaggcggcaacagctatggggaggtcaaggtcaagctcatcgtgcttgtgcctccatccaagcctacagttaacatcccctcctctgccaccattgggaaccgggcagtgctgacatgctcagaacaagatggttccccaccttctgaatacacctggttcaaagatgggatagtgatgcctacgaatcccaaaagcacccgtgccttcagcaactcttcctatgtcctgaatcccacaacaggagagctggtctttgatcccctgtcagcctctgatactggagaatacagctgtgaggcacggaatgggtatgggacacccatgacttcaaatgctgtgcgcatggaagctgtggagcggaatgtgggggtcatcgtggcagccgtccttgtaaccctgattctcctgggaatcttggtttttggcatctggtttgcctatagccgaggccactttgacagaacaaagaaagggacttcgagtaagaaggtgatttacagccagcctagtgcccgaagtgaaggagaattcaaacagacctcgtcattcctggtgtgagcctggtcggctcaccgcctatcatctgcatttgccttactcaggtgctaccggactctggcccctgatgtctgtagtttcacaggatgccttatttgtcttctacaccccacagggccccctacttcttcggatgtgtttttaataatgtcagctatgtgccccatcctccttcatgccctccctccctttcctaccactgctgagtggcctggaacttgtttaaagtgtttattccccatttctttgagggatcaggaaggaatcctgggtatgccattgacttcccttctaagtagacagcaaaaatggcgggggtcgcaggaatctgcactcaactgcccacctggctggcagggatctttgaataggtatcttgagcttggttctgggctctttccttgtgtactgacgaccagggccagctgttctagagcgggaattagaggctagagcgctgtaggaactactgtcccagagctgaggcaaggggatttctcaggtcatttggagaacaagtgctttagtagtagtttaaagtagtaactgctactgtatttagtggggtggaattcagaagaaatttgaagaccagatcatgggtggtctgcatgtgaatgaacaggaatgagccggacagcctggctgtcattgctttcttcctccccatttggacccttctctgcccttacatttttgtttctccatctaccaccatccaccagtctatttattaacttagcaagaggacaagtaaagggccctcttggcttgattttgcttctttctttctgtggaggatatactaagtgcgactttgccctatcctatttggaaatccctaacagaattgagttttctattaaggatccaaaaagaaaaacaaaatgctaatgaagccatcagtcaagggtcacatgccaataaacaataaattttccagaagaaatgaaatccaactagacaaataaagtagagcttatgaaatggttcagtaaagatgagtttgttgttttttgttttgttttgttttgtttttttaaagacggagtctcgctctgtcacccaggctggagtgcagtggtatgatcttggctcactgtaacctccgcctcccgggttcaagccattctcctgcctcagtctcctgagtagctgggattgcgggtgcgtgccaccatgcctggctaatttttgtgtttttagtagagacagggtttcaccatgttggtcgggctggtctcagactcctgacctcttgatccgcctgccttggcctcccaaagtgatgggattacagatgtgagccaccgtgcctagccaaggatgagatttttaaagtatgtttcagttctgtgtcatggttggaagacagagtaggaaggatatggaaaaggtcatggggaagcagaggtgattcatggctctgtgaatttgaggtgaatggttccttattgtctaggccacttgtgaagaatatgagtcagttattgccagccttggaatttacttctctagcttacaatggaccttttgaactggaaaacaccttgtctgcattcactttaaaatgtcaaaactaatttttataataaatgtttattttcacattga

SEQ ID NO: 296363 - DNA, 2196 bp, Homo sapiens
aactttaggctaggtacgaggcctgggcgggccagggccgcactccggagactcgcggttgctacgcgcaccatggctggagaggtacttctcagccctctagctccaactgagaacccagccagtcaggaagtcgctacttcgggaacaccaaccaatcagggggccgtcacctgctgaagggctggctctcagtcccctcgctgtagtcgcggagctgtgtctgttcccaggagtccttcggcggctgttgtgtcagtggcctgatcgcgatggggacaaaggcgcaagtcgagaggaaactgttgtgcctcttcatattggcgatcctgttgtgctccctggcattgggcagtgttacagtgcactcttctgaacctgaagtcagaattcctgagaataatcctgtgaagttgtcctgtgcctactcgggcttttcttctccccgtgtggagtggaagtttgaccaaggagacaccaccagactcgtttgctataataacaagatcacagcttcctatgaggaccgggtgaccttcttgccaactggtatcaccttcaagtccgtgacacgggaagacactgggacatacacttgtatggtctctgaggaaggcggcaacagctatggggaggtcaaggtcaagctcatcgtgcttgtgcctccatccaagcctacagttaacatcccctcctctgccaccattgggaaccgggcagtgctgacatgctcagaacaagatggttccccaccttctgaatacacctggttcaaagatgggatagtgatgcctacgaatcccaaaagcacccgtgccttcagcaactcttcctatgtcctgaatcccacaacaggagagctggtctttgatcccctgtcagcctctgatactggagaatacagctgtgaggcacggaatgggtatgggacacccatgacttcaaatgctgtgcgcatggaagctgtggagcggaatgtgggggtcatcgtggcagccgtccttgtaaccctgattctcctgggaatcttggtttttggcatctggtttgcctatagccgaggccactttgacagaacaaagaaagggacttcgagtaagaaggtgatttacagccagcctagtgcccgaagtgaaggagaattcaaacagacctcgtcattcctggtgtgagcctggtcggctcaccgcctatcatctgcatttgccttactcaggtgctaccggactctggcccctgatgtctgtagtttcacaggatgccttatttgtcttctacaccccacagggccccctacttcttcggatgtgtttttaataatgtcagctatgtgccccatcctccttcatgccctccctccctttcctaccactgctgagtggcctggaacttgtttaaagtgtttattccccatttctttgagggatcaggaaggaatcctgggtatgccattgacttcccttctaagtagacagcaaaaatggcgggggtcgcaggaatctgcactcaactgcccacctggctggcagggatctttgaataggtatcttgagcttggttctgggctctttccttgtgtactgacgaccagggccagctgttctagagcgggaattagaggctagagcggctgaaatggttgtttggtgatgacactggggtccttccatctctggggcccactctcttctgtcttcccatgggaagtgccactgggatccctctgccctgtcctcctgaatacaagctgactgacattgactgtgtctgtggaaaatgggagctcttgttgtggagagcatagtaaattttcagagaacttgaagccaaaaggatttaaaaccgccgcctgccttggcctcccaaagtgatgggattacagatgtgagccaccgtgcctagccaaggatgagatttttaaagtatgtttcagttctgtgtcatggttggaagacagagtaggaaggatatggaaaaggtcatggggaagcagaggtgattcatggctctgtgaatttgaggtgaatggttccttattgtctaggccacttgtgaagaatatgagtcagttattgccagccttggaatttacttctctagcttacaatggaccttttgaactggaaaacaccttgtctgcattcactttaaaatgtcaaaactaatttttataataaatgtttattttcacattga

SEQ ID NO: 296364 - DNA, 2314 bp, Homo sapiens
aactttaggctaggtacgaggcctgggcgggccagggccgcactccggagactcgcggttgctacgcgcaccatggctggagaggtacttctcagccctctagctccaactgagaacccagccagtcaggaagtcgctacttcgggaacaccaaccaatcagggggccgtcacctgctgaagggctggctctcagtcccctcgctgtagtcgcggagctgtgtctgttcccaggagtccttcggcggctgttgtgtcagtggcctgatcgcgatggggacaaaggcgcaagtcgagaggaaactgttgtgcctcttcatattggcgatcctgttgtgctccctggcattgggcagtgttacagtgcactcttctgaacctgaagtcagaattcctgagaataatcctgtgaagttgtcctgtgcctactcgggcttttcttctccccgtgtggagtggaagtttgaccaaggagacaccaccagactcgtttgctataataacaagatcacagcttcctatgaggaccgggtgaccttcttgccaactggtatcaccttcaagtccgtgacacgggaagacactgggacatacacttgtatggtctctgaggaaggcggcaacagctatggggaggtcaaggtcaagctcatcgtgcttgtgcctccatccaagcctacagttaacatcccctcctctgccaccattgggaaccgggcagtgctgacatgctcagaacaagatggttccccaccttctgaatacacctggttcaaagatgggatagtgatgcctacgaatcccaaaagcacccgtgccttcagcaactcttcctatgtcctgaatcccacaacaggagagctggtctttgatcccctgtcagcctctgatactggagaatacagctgtgaggcacggaatgggtatgggacacccatgacttcaaatgctgtgcgcatggaagctgtggagcggaatgtgggggtcatcgtggcagccgtccttgtaaccctgattctcctgggaatcttggtttttggcatctggtttgcctatagccgaggccactttgacagaacaaagaaagggacttcgagtaagaaggtgatttacagccagcctagtgcccgaagtgaaggagaattcaaacagacctcgtcattcctggtgtgagcctggtcggctcaccgcctatcatctgcatttgccttactcaggtgctaccggactctggcccctgatgtctgtagtttcacaggatgccttatttgtcttctacaccccacagggccccctacttcttcggatgtgtttttaataatgtcagctatgtgccccatcctccttcatgccctccctccctttcctaccactgctgagtggcctggaacttgtttaaagtgtttattccccatttctttgagggatcaggaaggaatcctgggtatgccattgacttcccttctaagtagacagcaaaaatggcgggggtcgcaggaatctgcactcaactgcccacctggctggcagggatctttgaataggtatcttgagcttggttctgggctctttccttgtgtactgacgaccagggccagctgttctagagcgggaattagaggctagagcggctgaaatggttgtttggtgatgacactggggtccttccatctctggggcccactctcttctgtcttcccatgggaagtgccactgggatccctctgccctgtcctcctgaatacaagctgactgacattgactgtgtctgtggaaaatgggagctcttgttgtggagagcatagtaaattttcagagaacttgaagccaaaaggatttaaaaccgctgctctaaagaaaagaaaactggaggctgggcgcagtggctcacgcctataatcccagaggctgaggcaggcggatcacctgaggtcgggctggtctcagactcctgacctcttgatccgcctgccttggcctcccaaagtgatgggattacagatgtgagccaccgtgcctagccaaggatgagatttttaaagtatgtttcagttctgtgtcatggttggaagacagagtaggaaggatatggaaaaggtcatggggaagcagaggtgattcatggctctgtgaatttgaggtgaatggttccttattgtctaggccacttgtgaagaatatgagtcagttattgccagccttggaatttacttctctagcttacaatggaccttttgaactggaaaacaccttgtctgcattcactttaaaatgtcaaaactaatttttataataaatgtttattttcacattga

SEQ ID NO: 296365 - DNA, 2243 bp, Homo sapiens
aactttaggctaggtacgaggcctgggcgggccagggccgcactccggagactcgcggttgctacgcgcaccatggctggagaggtacttctcagccctctagctccaactgagaacccagccagtcaggaagtcgctacttcgggaacaccaaccaatcagggggccgtcacctgctgaagggctggctctcagtcccctcgctgtagtcgcggagctgtgtctgttcccaggagtccttcggcggctgttgtgtcagtggcctgatcgcgatggggacaaaggcgcaagtcgagaggaaactgttgtgcctcttcatattggcgatcctgttgtgctccctggcattgggcagtgttacagtgcactcttctgaacctgaagtcagaattcctgagaataatcctgtgaagttgtcctgtgcctactcgggcttttcttctccccgtgtggagtggaagtttgaccaaggagacaccaccagactcgtttgctataataacaagatcacagcttcctatgaggaccgggtgaccttcttgccaactggtatcaccttcaagtccgtgacacgggaagacactgggacatacacttgtatggtctctgaggaaggcggcaacagctatggggaggtcaaggtcaagctcatcgtgcttgtgcctccatccaagcctacagttaacatcccctcctctgccaccattgggaaccgggcagtgctgacatgctcagaacaagatggttccccaccttctgaatacacctggttcaaagatgggatagtgatgcctacgaatcccaaaagcacccgtgccttcagcaactcttcctatgtcctgaatcccacaacaggagagctggtctttgatcccctgtcagcctctgatactggagaatacagctgtgaggcacggaatgggtatgggacacccatgacttcaaatgctgtgcgcatggaagctgtggagcggaatgtgggggtcatcgtggcagccgtccttgtaaccctgattctcctgggaatcttggtttttggcatctggtttgcctatagccgaggccactttgacagaacaaagaaagggacttcgagtaagaaggtgatttacagccagcctagtgcccgaagtgaaggagaattcaaacagacctcgtcattcctggtgtgagcctggtcggctcaccgcctatcatctgcatttgccttactcaggtgctaccggactctggcccctgatgtctgtagtttcacaggatgccttatttgtcttctacaccccacagggccccctacttcttcggatgtgtttttaataatgtcagctatgtgccccatcctccttcatgccctccctccctttcctaccactgctgagtggcctggaacttgtttaaagtgtttattccccatttctttgagggatcaggaaggaatcctgggtatgccattgacttcccttctaagtagacagcaaaaatggcgggggtcgcaggaatctgcactcaactgcccacctggctggcagggatctttgaataggtatcttgagcttggttctgggctctttccttgtgtactgacgaccagggccagctgttctagagcgggaattagaggctagagcggctgaaatggttgtttggtgatgacactggggtccttccatctctggggcccactctcttctgtcttcccatgggaagtgccactgggatccctctgccctgtcctcctgaatacaagctgactgacattgactgtgtctgtggaaaatgggagctcttgttgtggagagcatagtaaattttcagagaacttgaagccaaaaggatttaaaaccgctgctctaaagaaaagaaaactggaggctgggcgcagtggctcacgcccgcctgccttggcctcccaaagtgatgggattacagatgtgagccaccgtgcctagccaaggatgagatttttaaagtatgtttcagttctgtgtcatggttggaagacagagtaggaaggatatggaaaaggtcatggggaagcagaggtgattcatggctctgtgaatttgaggtgaatggttccttattgtctaggccacttgtgaagaatatgagtcagttattgccagccttggaatttacttctctagcttacaatggaccttttgaactggaaaacaccttgtctgcattcactttaaaatgtcaaaactaatttttataataaatgtttattttcacattga

SEQ ID NO: 296366 - DNA, 2381 bp, Homo sapiens
aactttaggctaggtacgaggcctgggcgggccagggccgcactccggagactcgcggttgctacgcgcaccatggctggagaggtacttctcagccctctagctccaactgagaacccagccagtcaggaagtcgctacttcgggaacaccaaccaatcagggggccgtcacctgctgaagggctggctctcagtcccctcgctgtagtcgcggagctgtgtctgttcccaggagtccttcggcggctgttgtgtcagtggcctgatcgcgatggggacaaaggcgcaagtcgagaggaaactgttgtgcctcttcatattggcgatcctgttgtgctccctggcattgggcagtgttacagtgcactcttctgaacctgaagtcagaattcctgagaataatcctgtgaagttgtcctgtgcctactcgggcttttcttctccccgtgtggagtggaagtttgaccaaggagacaccaccagactcgtttgctataataacaagatcacagcttcctatgaggaccgggtgaccttcttgccaactggtatcaccttcaagtccgtgacacgggaagacactgggacatacacttgtatggtctctgaggaaggcggcaacagctatggggaggtcaaggtcaagctcatcgtgcttgtgcctccatccaagcctacagttaacatcccctcctctgccaccattgggaaccgggcagtgctgacatgctcagaacaagatggttccccaccttctgaatacacctggttcaaagatgggatagtgatgcctacgaatcccaaaagcacccgtgccttcagcaactcttcctatgtcctgaatcccacaacaggagagctggtctttgatcccctgtcagcctctgatactggagaatacagctgtgaggcacggaatgggtatgggacacccatgacttcaaatgctgtgcgcatggaagctgtggagcggaatgtgggggtcatcgtggcagccgtccttgtaaccctgattctcctgggaatcttggtttttggcatctggtttgcctatagccgaggccactttgacagaacaaagaaagggacttcgagtaagaaggtgatttacagccagcctagtgcccgaagtgaaggagaattcaaacagacctcgtcattcctggtgtgagcctggtcggctcaccgcctatcatctgcatttgccttactcaggtgctaccggactctggcccctgatgtctgtagtttcacaggatgccttatttgtcttctacaccccacagggccccctacttcttcggatgtgtttttaataatgtcagctatgtgccccatcctccttcatgccctccctccctttcctaccactgctgagtggcctggaacttgtttaaagtgtttattccccatttctttgagggatcaggaaggaatcctgggtatgccattgacttcccttctaagtagacagcaaaaatggcgggggtcgcaggaatctgcactcaactgcccacctggctggcagggatctttgaataggtatcttgagcttggttctgggctctttccttgtgtactgacgaccagggccagctgttctagagcgggaattagaggctagagcggctgaaatggttgtttggtgatgacactggggtccttccatctctggggcccactctcttctgtcttcccatgggaagtgccactgggatccctctgccctgtcctcctgaatacaagctgactgacattgactgtgtctgtggaaaatgggagctcttgttgtggagagcatagtaaattttcagagaacttgaagccaaaaggatttaaaaccgctgctctaaagaaaagaaaactggaggctgggcgcagtggctcacgcctataatcccagaggctgaggcaggcggatcacctgaggtcaggagttcaagatcagcctgaccaacatggagaaaccctactgaaaatacaaagttagccaggcatggtggtgcatgcctgtaatcccagctgctcaggagcctggcaacaagagcaaaatgatgggattacagatgtgagccaccgtgcctagccaaggatgagatttttaaagtatgtttcagttctgtgtcatggttggaagacagagtaggaaggatatggaaaaggtcatggggaagcagaggtgattcatggctctgtgaatttgaggtgaatggttccttattgtctaggccacttgtgaagaatatgagtcagttattgccagccttggaatttacttctctagcttacaatggaccttttgaactggaaaacaccttgtctgcattcactttaaaatgtcaaaactaatttttataataaatgtttattttcacattga

SEQ ID NO: 296367 - DNA, 2148 bp, Homo sapiens
aactttaggctaggtacgaggcctgggcgggccagggccgcactccggagactcgcggttgctacgcgcaccatggctggagaggtacttctcagccctctagctccaactgagaacccagccagtcaggaagtcgctacttcgggaacaccaaccaatcagggggccgtcacctgctgaagggctggctctcagtcccctcgctgtagtcgcggagctgtgtctgttcccaggagtccttcggcggctgttgtgtcagtggcctgatcgcgatggggacaaaggcgcaagtcgagaggaaactgttgtgcctcttcatattggcgatcctgttgtgctccctggcattgggcagtgttacagtgcactcttctgaacctgaagtcagaattcctgagaataatcctgtgaagttgtcctgtgcctactcgggcttttcttctccccgtgtggagtggaagtttgaccaaggagacaccaccagactcgtttgctataataacaagatcacagcttcctatgaggaccgggtgaccttcttgccaactggtatcaccttcaagtccgtgacacgggaagacactgggacatacacttgtatggtctctgaggaaggcggcaacagctatggggaggtcaaggtcaagctcatcgtgcttgtgcctccatccaagcctacagttaacatcccctcctctgccaccattgggaaccgggcagtgctgacatgctcagaacaagatggttccccaccttctgaatacacctggttcaaagatgggatagtgatgcctacgaatcccaaaagcacccgtgccttcagcaactcttcctatgtcctgaatcccacaacaggagagctggtctttgatcccctgtcagcctctgatactggagaatacagctgtgaggcacggaatgggtatgggacacccatgacttcaaatgctgtgcgcatggaagctgtggagcggaatgtgggggtcatcgtggcagccgtccttgtaaccctgattctcctgggaatcttggtttttggcatctggtttgcctatagccgaggccactttgacagaacaaagaaagggacttcgagtaagaaggtgatttacagccagcctagtgcccgaagtgaaggagaattcaaacagacctcgtcattcctggtgtgagcctggtcggctcaccgcctatcatctgcatttgccttactcaggtgctaccggactctggcccctgatgtctgtagtttcacaggatgccttatttgtcttctacaccccacagggccccctacttcttcggatgtgtttttaataatgtcagctatgtgccccatcctccttcatgccctccctccctttcctaccactgctgagtggcctggaacttgtttaaagtgtttattccccatttctttgagggatcaggaaggaatcctgggtatgccattgacttcccttctaagtagacagcaaaaatggcgggggtcgcaggaatctgcactcaactgcccacctggctggcagggatctttgaataggtatcttgagcttggttctgggctctttccttgtgtactgacgaccagggccagctgttctagagcgggaattagaggctagagcggctgaaatggttgtttggtgatgacactggggtccttccatctctggggcccactctcttctgtcttcccatgggaagtgccactgggatccctctgccctgtcctcctgaatacaagctgactgacattgactgtgtctgtggaaaatgggagctcttgttgtggagagcatagtaaattttcagagaacttgaagccaaaaggatttaaaaccgcgtgcctagccaaggatgagatttttaaagtatgtttcagttctgtgtcatggttggaagacagagtaggaaggatatggaaaaggtcatggggaagcagaggtgattcatggctctgtgaatttgaggtgaatggttccttattgtctaggccacttgtgaagaatatgagtcagttattgccagccttggaatttacttctctagcttacaatggaccttttgaactggaaaacaccttgtctgcattcactttaaaatgtcaaaactaatttttataataaatgtttattttcacattga

SEQ ID NO: 296368 - DNA, 2230 bp, Homo sapiens
  misc_feature (40)..(40): n is a, c, g, or t
acaagctgactgacattgactgtgtctgtggaaaatggangctcttgttgtggagagcatagtaaattttcagagaacttgaagcgaaaaggatttaaaaccgctgccctgtcctcctgaatacaagctgactgacattgactgtgtctgtggaaaatgggagctcttgttgtggagagcatagtaaattttcagagaacttgaagccaaaaggatttaaaaccgctgctctaaagaaaagaaaactggaggctgggcgcagtggctcacgcctataatcccagaggctgaggcaggcggatcacctgaggtcaggagttcaagatcagcctgaccaacatggagaaaccctactgaaaatacaaagttagccaggcatggtggtgcatgcctgtaatcccagctgctcaggagcctggcaacaagagcaaaactccagctcaaaaaaaaaaaagaaagaaaagaaagctggagctggtggcttaggccatcacccttcccttggctggaactactggacagacccttttgagatgtgcctgtggtgctgtggagatgtgtgtagtggtcttagctctttgttgagcttgtgtgtgtgttgtgtagtcttagctgtatgctgaaattgggcgtgtgttggagggcttcttagctctttggtgagattgtatttctatgtgtttgtatcagctgaatgttgctggaaataaaaccttggtttgtcaaggctcttttttgtgggaagtaagtaggggaaaaggtctttgagggttcctaggctcctttgtacaacaggaaaatgcctcaaagccttgcttcccagcaacctggggctggttcccagtgcctggtcctgccccttcctggttcttatctcaaggcagagcttctgaatttcaggccttcattccagagccctcttgtggccaggccttcctttgctggaggaaggtacacagggtgaagctgatgctgtacttgggggatctccttggcctgttccaccaagtgagagaaggtacttactcttgtacctcctgttcagccaggtgcattaacagacctccctacagctgtaggaactactgtcccagagctgaggcaaggggatttctcaggtcatttggagaacaagtgctttagtagtagtttaaagtagtaactgctactgtatttagtggggtggaattcagaagaaatttgaagaccagatcatgggtggtctgcatgtgaatgaacaggaatgagccggacagcctggctgtcattgctttcttcctccccatttggacccttctctgcccttacatttttgtttctccatctaccaccatccaccagtctatttattaacttagcaagaggacaagtaaagggccctcttggcttgattttgcttctttctttctgtggaggatatactaagtgcgactttgccctatcctatttggaaatccctaacagaattgagttttctattaaggatccaaaaagaaaaacaaaatgctaatgaagccatcagtcaagggtcacatgccaataaacaataaattttccagaagaaatgaaatccaactagacaaataaagtagagcttatgaaatggttcagtaaagatgagtttgttgttttttgttttgttttgttttgtttttttaaagacggagtctcgctctgtcacccaggctggagtgcagtggtatgatcttggctcactgtaacctccgcctcccgggttcaagccattctcctgcctcagtctcctgagtagctgggattgcgggtgcgtgccaccatgcctggctaatttttgtgtttttagtagagacagggtttcaccatgttggtcgggctggtctcagactcctgacctcttgatccgcctgccttggcctcccaaagtgatgggattacagatgtgagccaccgtgcctagccaaggatgagatttttaaagtatgtttcagttctgtgtcatggttggaagacagagtaggaaggatatggaaaaggtcatggggaagcagaggtgattcatggctctgtgaatttgaggtgaatggttccttattgtctaggccacttgtgaagaatatgagtcagttattgccagccttggaatttacttctctagcttacaatggaccttttgaactggaaaacaccttgtctgcattcactttaaaatgtcaaaactaatttttataataaatgtttattttcacattga

SEQ ID NO: 296369 - DNA, 1869 bp, Homo sapiens
aactttaggctaggtacgaggcctgggcgggccagggccgcactccggagactcgcggttgctacgcgcaccatggctggagaggtacttctcagccctctagctccaactgagaacccagccagtcaggaagtcgctacttcgggaacaccaaccaatcagggggccgtcacctgctgaagggctggctctcagtcccctcgctgtagtcgcggagctgtgtctgttcccaggagtccttcggcggctgttgtgtcagtggcctgatcgcgatggggacaaaggcgcaagtcgagaggaaactgttgtgcctcttcatattggcgatcctgttgtgctccctggcattgggcagtgttacagtgcactcttctgaacctgaagtcagaattcctgagaataatcctgtgaagttgtcctgtgcctactcgggcttttcttctccccgtgtggagtggaagtttgaccaaggagacaccaccagactcgtttgctataataacaagatcacagcttcctatgaggaccgggtgaccttcttgccaactggtatcaccttcaagtccgtgacacgggaagacactgggacatacacttgtatggtctctgaggaaggcggcaacagctatggggaggtcaaggtcaagctcatcgtgcttgtgcctccatccaagcctacagttaacatcccctcctctgccaccattgggaaccgggcagtgctgacatgctcagaacaagatggttccccaccttctgaatacacctggttcaaagatgggatagtgatgcctacgaatcccaaaagcacccgtgccttcagcaactcttcctatgtcctgaatcccacaacaggagagctggtctttgatcccctgtcagcctctgatactggagaatacagctgtgaggcacggaatgggtatgggacacccatgacttcaaatgctgtgcgcatggaagctgtggagcggaatgtgggggtcatcgtggcagccgtccttgtaaccctgattctcctgggaatcttggtttttggcatctggtttgcctatagccgaggccactttgacagaacaaagaaagggacttcgagtaagaaggtgatttacagccagcctagtgcccgaagtgaaggagaattcaaacagacctcgtcattcctggtgtgagcctggtcggctcaccgcctatcatctgcatttgccttactcaggtgctaccggactctggcccctgatgtctgtagtttcacaggatgccttatttgtcttctacaccccacagggccccctacttcttcggatgtgtttttaataatgtcagctatgtgccccatcctccttcatgccctccctccctttcctaccactgctgagtggcctggaacttgtttaaagtgtttattccccatttctttgagggatcaggaaggaatcctgggtatgccattgacttcccttctaagtagacagcaaaaatggcgggggtcgcaggaatctgcactcaactgcccacccgcctgccttggcctcccaaagtgatgggattacagatgtgagccaccgtgcctagccaaggatgagatttttaaagtatgtttcagttctgtgtcatggttggaagacagagtaggaaggatatggaaaaggtcatggggaagcagaggtgattcatggctctgtgaatttgaggtgaatggttccttattgtctaggccacttgtgaagaatatgagtcagttattgccagccttggaatttacttctctagcttacaatggaccttttgaactggaaaacaccttgtctgcattcactttaaaatgtcaaaactaatttttataataaatgtttattttcacattga

SEQ ID NO: 296370 - DNA, 538 bp, Homo sapiens
ggcggccgtgactcctaggccccctcttcctgaaggctgtcgcgccccttcctcagcgcccacggtctcgcttcctgaactccgttcactcctagcctccggacgggcccggctcttcgatgtgcgctctcgcgaggaggcggcagctgggaccatcccaggggcgctcaacatcccggtgtccgagttggagagtgctctgcagatggagccagctgccttccaggctttatattctgctgagaagccaaagctggaagatgagcatctcgttttcttctgtcagatgggcaagcggggcctccaggccacgcagctggcccggagtcttggatacactggggctcgcaactacgctggagcctatagagaatggttggagaaagagagttaggcaggaggcagcttactgattgccaccccctggccccttaatggccaccttaactaagggtgtgaacgggctgacttggtgaattgggcaactccttatagtgttgtgcacacaaaagcatcaaataaagaacatttaatcaaa

SEQ ID NO: 296371 - DNA, 2460 bp, Homo sapiens
  misc_feature (319)..(319): n is a, c, g, or t
  misc_feature (322)..(322): n is a, c, g, or t
gcctgtggtgctgtggagatgtgtgtagtggtcttagctctttgttgagcttgtgtgtgtgttgtgtagtcttagctgtatgctgaaattgggcgtgtgttggagggcttcttagctctttggtgagattgtatttctatgtgtttgtatcagctgaatgttgctggaaataaaaccttggtttgtcaaggctcttatgctaatgaagccatcagtcaagggtcacatgccaataaacaataaattttccagaagaaatgaaatccaactagacaaataaagtagagcttatgaaatggttcagtaaagatgagtttgntgntttttgttttgttttgttttgtttttttaaagacggagtctcgctctgtcacccaggctggagtgcagtggtatgatcttggctcactgtaacctccgcctcccgggttcaagtgattcttctgtctcagcctcccaagtagctgggactacgggcgcccgccactacgactggctaatttttgtatttttagtagagacgggggttttaccatattggtcaggagttcaagatcagcctgaccaacatggagaaaccctactgaaaatacaaagttagccaggcatggtggtgcatgcctgtaatcccagctgctcaggagcctggcaacaagagcaaaactccagctcaaaaaaaaaaaagaaagaaaagaaagctggagctggtggcttaggccatcacccttcccttggctggaactactggacagacccttttgagatgtgcctgtggtgctgtggagatgtgtgtagtggtcttagctctttgttgagcttgtgtgtgtgttgtgtagtcttagctgtatgctgaaattgggcgtgtgttggagggcttcttagctctttggtgagattgtatttctatgtgtttgtatcagctgaatgttgctggaaataaaaccttggtttgtcaaggctcttttttgtgggaagtaagtaggggaaaaggtctttgagggttcctaggctcctttgtacaacaggaaaatgcctcaaagccttgcttcccagcaacctggggctggttcccagtgcctggtcctgccccttcctggttcttatctcaaggcagagcttctgaatttcaggccttcattccagagccctcttgtggccaggccttcctttgctggaggaaggtacacagggtgaagctgatgctgtacttgggggatctccttggcctgttccaccaagtgagagaaggtacttactcttgtacctcctgttcagccaggtgcattaacagacctccctacagctgtaggaactactgtcccagagctgaggcaaggggatttctcaggtcatttggagaacaagtgctttagtagtagtttaaagtagtaactgctactgtatttagtggggtggaattcagaagaaatttgaagaccagatcatgggtggtctgcatgtgaatgaacaggaatgagccggacagcctggctgtcattgctttcttcctccccatttggacccttctctgcccttacatttttgtttctccatctaccaccatccaccagtctatttattaacttagcaagaggacaagtaaagggccctcttggcttgattttgcttctttctttctgtggaggatatactaagtgcgactttgccctatcctatttggaaatccctaacagaattgagttttctattaaggatccaaaaagaaaaacaaaatgctaatgaagccatcagtcaagggtcacatgccaataaacaataaattttccagaagaaatgaaatccaactagacaaataaagtagagcttatgaaatggttcagtaaagatgagtttgttgttttttgttttgttttgttttgtttttttaaagacggagtctcgctctgtcacccaggctggagtgcagtggtatgatcttggctcactgtaacctccgcctcccgggttcaagccattctcctgcctcagtctcctgagtagctgggattgcgggtgcgtgccaccatgcctggctaatttttgtgtttttagtagagacagggtttcaccatgttggtcgggctggtctcagactcctgacctcttgatccgcctgccttggcctcccaaagtgatgggattacagatgtgagccaccgtgcctagccaaggatgagatttttaaagtatgtttcagttctgtgtcatggttggaagacagagtaggaaggatatggaaaaggtcatggggaagcagaggtgattcatggctctgtgaatttgaggtgaatggttccttattgtctaggccacttgtgaagaatatgagtcagttattgccagccttggaatttacttctctagcttacaatggaccttttgaactggaaaacaccttgtctgcattcactttaaaatgtcaaaactaatttttataataaatgtttattttcacattga

SEQ ID NO: 296372 - DNA, 584 bp, Homo sapiens
ccggtctcagctctgggagggaacgggagatgttgcaggcgccgagagggcgggccagggccgcactccggagactcgcggttgctacgcgcaccatggctggagcgcccacggtctcgcttcctgaactccgttcactcctagcctccggacgggcccggctcttcgatgtgcgctctcgcgaggaggcggcagctgggaccatcccaggggcgctcaacatcccggtgtccgagttggagagtgctctgcagatggagccagctgccttccaggctttatattctgctgagaagccaaagctggaagatgagcatctcgttttcttctgtcagatgggcaagcggggcctccaggccacgcagctggcccggagtcttggatacactggggctcgcaactacgctggagcctatagagaatggttggagaaagagagttaggcaggaggcagcttactgattgccaccccctggccccttaatggccaccttaactaagggtgtgaacgggctgacttggtgaattgggcaactccttatagtgttgtgcacacatcgcatcggtgccgagctcgatgtacc

SEQ ID NO: 296373 - DNA, 584 bp, Homo sapiens
ccggtctcagctctgggagggaacgggagatgttgcaggcgccgagagggcgggccagggccgcactccggagactcgcggttgctacgcgcaccatggctggagcgcccacggtctcgcttcctgaactccgttcactcctagcctccggacgggcccggctcttcgatgtgcgctctcgcgaggaggcggcagctgggaccatcccaggggcgctcaacatcccggtgtccgagttggagagtgctctgcagatggagccagctgccttccaggctttatattctgctgagaagccaaagctggaagatgagcatctcgttttcttctgtcagatgggcaagcggggcctccaggccacgcagctggcccggagtcttggatacactggggctcgcaactacgctggagcctatagagaatggttggagaaagagagttaggcaggaggcagcttactgattgccaccccctggccccttaatggccaccttaactaagggtgtgaacgggctgacttggtgaattgggcaactccttatagtgttgtgcacacatcgcatacggggactcctctatgagtc

SEQ ID NO: 296374 - DNA, 1674 bp, Homo sapiens
aactttaggctaggtacgaggcctgggcgggccagggccgcactccggagactcgcggttgctacgcgcaccatggctggagaggtacttctcagccctctagctccaactgagaacccagccagtcaggaagtcgctacttcgggaacaccaaccaatcagggggccgtcacctgctgaagggctggctctcagtcccctcgctgtagtcgcggagctgtgtctgttcccaggagtccttcggcggctgttgtgtcagtggcctgatcgcgatggggacaaaggcgcaagtcgagaggaaactgttgtgcctcttcatattggcgatcctgttgtgctccctggcattgggcagtgttacagtgcactcttctgaacctgaagtcagaattcctgagaataatcctgtgaagttgtcctgtgcctactcgggcttttcttctccccgtgtggagtggaagtttgaccaaggagacaccaccagactcgtttgctataataacaagatcacagcttcctatgaggaccgggtgaccttcttgccaactggtatcaccttcaagtccgtgacacgggaagacactgggacatacacttgtatggtctctgaggaaggcggcaacagctatggggaggtcaaggtcaagctcatcgtgcttgtgcctccatccaagcctacagttaacatcccctcctctgccaccattgggaaccgggcagtgctgacatgctcagaacaagatggttccccaccttctgaatacacctggttcaaagatgggatagtgatgcctacgaatcccaaaagcacccgtgccttcagcaactcttcctatgtcctgaatcccacaacaggagagctggtctttgatcccctgtcagcctctgatactggagaatacagctgtgaggcacggaatgggtatgggacacccatgacttcaaatgctgtgcgcatggaagctgtggagcggaatgtgggggtcatcgtggcagccgtccttgtaaccctgattctcctgggaatcttggtttttggcatctggtttgcctatagccgaggccactttgacagaacaaagaaagggacttcgagtaagaaggtgatttacagccagcctagtgcccgaagtgaaggagaattcaaacagacctcgtcattcctggtgtgagcctggtcggctcaccgcctatcatctgcatttgccttactcaggtgctaccggactctggcccctgatgtctgtagtttcacaggatgccttatttgtcttctacaccccacagggccccctacttcttcggatgtgtttttaataatgtcagctatgtgccccatcctccttcatgccctccctccctttcctaccactgctgagtggcctggaacttgtttaaagttatgtttcagttctgtgtcatggttggaagacagagtaggaaggatatggaaaaggtcatggggaagcagaggtgattcatggctctgtgaatttgaggtgaatggttccttattgtctaggccacttgtgaagaatatgagtcagttattgccagccttggaatttacttctctagcttacaatggaccttttgaactggaaaacaccttgtctgcattcactttaaaatgtcaaaactaatttttataataaatgtttattttcacattga

SEQ ID NO: 296375 - DNA, 451 bp, Homo sapiens
  misc_feature (9)..(9): n is a, c, g, or t
  misc_feature (17)..(17): n is a, c, g, or t
gctgtggtngatctctnaggatccccgatgcgatgtgcgctctcgcgaggaggcggcagctgggaccatcccaggggcgctcaacatcccggtgtccgagttggagagtgctctgcagatggagccagctgccttccaggctttatattctgctgagaagccaaagctggaagatgagcatctcgttttcttctgtcagatgggcaagcggggcctccaggccacgcagctggcccggagtcttggatacactggggctcgcaactacgctggagcctatagagaatggttggagaaagagagttaggcaggaggcagcttactgattgccaccccctggccccttaatggccaccttaactaagggtgtgaacgggctgacttggtgaattgggcaactccttatagtgttgtgcacacaaaagcatcaaataaagaacatttaatcaaa

SEQ ID NO: 296376 - DNA, 2181 bp, Homo sapiens
aactttaggctaggtacgaggcctgggcgggccagggccgcactccggagactcgcggttgctacgcgcaccatggctggagaggtacttctcagccctctagctccaactgagaacccagccagtcaggaagtcgctacttcgggaacaccaaccaatcagggggccgtcacctgctgaagggctggctctcagtcccctcgctgtagtcgcggagctgtgtctgttcccaggagtccttcggcggctgttgtgtcagtggcctgatcgcgatggggacaaaggcgcaagtcgagaggaaactgttgtgcctcttcatattggcgatcctgttgtctgtgaagttgtcctgtgcctactcgggcttttcttctccccgtcttcctatgaggaccgggtgaccttcttgccaactggtatcaccttcaagtccgtgacacgggaagacactgggacatacacttgtatggtctctgaggaaggcggcaacagctatggggaggtcaaggtcaagctcatcgtgcttgtgcctccatccaagcctacagttaacatcccctcctctgccaccattgggaaccgggcagtgctgacatgctcagaacaagatggttccccaccttctgaatacacctggttcaaagatgggatagtgatgcctacgaatcccaaaagcacccgtgccttcagcaactcttcctatgtcctgaatcccacaacaggagagctggtctttgatcccctgtcagcctctgatactggagaatacagctgtgaggcacggaatgggtatgggacacccatgacttcaaatgctgtgcgcatggaagctgtggagcggaatgtgggggtcatcgtggcagccgtccttgtaaccctgattctcctgggaatcttggtttttggcatctggtttgcctatagccgaggccactttgacagaacaaagaaagggacttcgagtaagaaggtgatttacagccagcctagtgcccgaagtgaaggagaattcaaacagacctcgtcattcctggtgtgagcctggtcggctcaccgcctatcatctgcatttgccttactcaggtgctaccggactctggcccctgatgtctgtagtttcacaggatgccttatttgtcttctacaccccacagggccccctacttcttcggatgtgtttttaataatgtcagctatgtgccccatcctccttcatgccctccctccctttcctaccactgctgagtggcctggaacttgtttaaagtgtttattccccatttctttgagggatcaggaaggaatcctgggtatgccattgacttcccttctaagtagacagcaaaaatggcgggggtcgcaggaatctgcactcaactgcccacctggctggcagggatctttgaataggtatcttgagcttggttctgggctctttccttgtgtactgacgaccagggccagctgttctagagcgggaattagaggctagagcggctgaaatggttgtttggtgatgacactggggtccttccatctctggggcccactctcttctgtcttcccatgggaagtgccactgggatccctctgccctgtcctcctgaatacaagctgactgacattgactgtgtctgtggaaaatgggagctcttgttgtggagagcatagtaaattttcagagaacttgaagccaaaaggatttaaaaccgctgctctaaagaaaagaaaactggaggctgggcgcagtggctcacgcctataatcccagaggctgaggcaggcggatcacctgaggtcgggctggtctcagactcctgacctcttgatccgcctgccttggcctcccaaagtgatgggattacagatgtgagccaccgtgcctagccaaggatgagatttttaaagtatgtttcagttctgtgtcatggttggaagacagagtaggaaggatatggaaaaggtcatggggaagcagaggtgattcatggctctgtgaatttgaggtgaatggttccttattgtctaggccacttgtgaagaatatgagtcagttattgccagccttggaatttacttctctagcttacaatggaccttttgaactggaaaacaccttgtctgcattcactttaaaatgtcaaaactaatttttataataaatgtttattttcacattga

SEQ ID NO: 296377 - DNA, 1163 bp, Homo sapiens
aactttaggctaggtacgaggcctgggcgggccagggccgcactccggagactcgcggttgctacgcgcaccatggctggagaggtacttctcagccctctagctccaactgagaacccagccagtcaggaagtcgctacttcgggaacaccaaccaatcagggggccgtcacctgctgaagggctggctctcagtcccctcgctgtagtcgcggagctgtgtctgttcccaggagtccttcggcggctgttgtgtcagtggcctgatcgcgatggggacaaaggcgcaagtcgagaggaaactgttgtgcctcttcatattggcgatcctgttgtgctccctggcattgggcagtgttacagtgcactcttctgaacctgaagtcagaattcctgagaataatcctgtgaagttgtcctgtgcctactcgggcttttcttctccccgtgtggagtggaagtttgaccaaggagacaccaccagactcgtttgctataataacaagatcacagcttcctatgaggaccgggtgaccttcttgccaactggtatcaccttcaagtccgtgacacgggaagacactgggacatacacttgtatggtctctgaggaaggcggcaacagctatggggaggtcaaggtcaagctcatcgtgcttgtgcctccatccaagcctacagttaacatcccctcctctgccaccattgggaaccgggcagtgctgacatgctcagaacaagatggttccccaccttctgaatacacctggttcaaagatgggatagtgatgcctacgaatcccaaaagcacccgtgccttcagcaactcttcctatgtcctgaatcccacaacaggagagctggtctttgatcccctgtcagcctctgatactggagaatacagctgtgaggcacggaatgggtatgggacacccatgacttcaaatgctgtgcgcatggaagctgtggagcggaatgtgggggtcatcgtggcagccgtccttgtaaccctgattctcctgggaatcttggtttttggcatctggtttgcctatagccgaggccactttgacagaacaaagaaagggacttcgagtaagaaggtgatttacagccagcctagtgcccgaagtgaagtgagtatgcctcccctgggcaggggt

SEQ ID NO: 296378 - DNA, 1457 bp, Homo sapiens
ccgaattcggcacgagcctggccacaagagggctatggaatgaaggcctgaaattcagaagctctgccttgagataagaaccaggaaggggcaggaccaggcactgggaaccagccccaggttgctgggaagcaaggctttgaggcattttcctgttgtacaaagttgctggaggaaggtacacagggtgaagctgatgctgtacttgggggatctccttggcctgttccaccaagtgagagaaggtacttactcttgtacctcctgttcagccaggtgcattaacagacctccctacagctgtaggaactactgtcccagagctgaggcaaggggatttctcaggtcatttggagaacaagtgctttagtagtagtttaaagtagtaactgctactgtatttagtggggtggaattcagaagaaatttgaagaccagatcatgggtggtctgcatgtgaatgaacaggaatgagccggacagcctggctgtcattgctttcttcctccccatttggacccttctctgcccttacatttttgtttctccatctaccaccatccaccagtctatttattaacttagcaagaggacaagtaaagggccctcttggcttgattttgcttctttctttctgtggaggatatactaagtgcgactttgccctatcctatttggaaatccctaacagaattgagttttctattaaggatccaaaaagaaaaacaaaatgctaatgaagccatcagtcaagggtcacatgccaataaacaataaattttccagaagaaatgaaatccaactagacaaataaagtagagcttatgaaatggttcagtaaagatgagtttgttgttttttgttttgttttgttttgtttttttaaagacggagtctcgctctgtcacccaggctggagtgcagtggtatgatcttggctcactgtaacctccgcctcccgggttcaagccattctcctgcctcagtctcctgagtagctgggattgcgggtgcgtgccaccatgcctggctaatttttgtgtttttagtagagacagggtttcaccatgttggtcgggctggtctcagactcctgacctcttgatccgcctgccttggcctcccaaagtgatgggattacagatgtgagccaccgtgcctagccaaggatgagatttttaaagtatgtttcagttctgtgtcatggttggaagacagagtaggaaggatatggaaaaggtcatggggaagcagaggtgattcatggctctgtgaatttgaggtgaatggttccttattgtctaggccacttgtgaagaatatgagtcagttattgccagccttggaatttacttctctagcttacaatggaccttttgaactggaaaacaccttgtctgcattcactttaaaatgtcaaaactaatttttataataaatgtttattttcacattga

SEQ ID NO: 296379 - DNA, 1546 bp, Homo sapiens
aactttaggctaggtacgaggcctgggcgggccagggccgcactccggagactcgcggttgctacgcgcaccatggctggagaggtacttctcagccctctagctccaactgagaacccagccagtcaggaagtcgctacttcgggaacaccaaccaatcagggggccgtcacctgctgaagggctggctctcagtcccctcgctgtagtcgcggagctgtgtctgttcccaggagtccttcggcggctgttgtgtcagtggcctgatcgcgatggggacaaaggcgcaagtcgagaggaaactgttgtgcctcttcatattggcgatcctgttgtgctccctggcattgggcagtgttacagtgcactcttctgaacctgaagtcagaattcctgagaataatcctgtgaagttgtcctgtgcctactcgggcttttcttctccccgtgtggagtggaagtttgaccaaggagacaccaccagactcgtttgctataataacaagatcacagcttcctatgaggaccgggtgaccttcttgccaactggtatcaccttcaagtccgtgacacgggaagacactgggacatacacttgtatggtctctgaggaaggcggcaacagctatggggaggtcaaggtcaagctcatcgtgcttgtgcctccatccaagcctacagttaacatcccctcctctgccaccattgggaaccgggcagtgctgacatgctcagaacaagatggttccccaccttctgaatacacctggttcaaagatgggatagtgatgcctacgaatcccaaaagcacccgtgccttcagcaactcttcctatgtcctgaatcccacaacaggagagctggtctttgatcccctgtcagcctctgatactggagaatacagctgtgaggcacggaatgggtatgggacacccatgacttcaaatgctgtgcgcatggaagctgtggagcggaatgtgggggtcatcgtggcagccgtccttgtaaccctgattctcctgggaatcttggtttttggcatctggtttgcctatagccgaggccactttgacagaacaaagaatctgcccccagaggctctcctttgtactgcccccatcccagggcctggcatgggtgtcatctgagtactgaccctgatactgtgctcatgtgtgtgggtgttgtcccctggggaacactgatcacccatctaacaccaagagctgggggcctgcccctccatcttcccaagccatgctgtcttctgtcctgctgacactcatgatcccatttcttctctttcaggaacaaagaaagggtgagtgaggtgctgtcctggggttctccaagtttgagagcatggatgcatgtggtttgaagctgaagtgggcctaggggaatgggttgaaggcagaagcaaccagtttggagggaaggcatttggatatccagccctttctctgtggccttggccctgggtctgtcctgttaccccacccatacctgtctgctgcgcacatctgtgcttctgtagcattctcgc

SEQ ID NO: 296380 - DNA, 1167 bp, Homo sapiens
aactttaggctaggtacgaggcctgggcgggccagggccgcactccggagactcgcggttgctacgcgcaccatggctggagaggtacttctcagccctctagctccaactgagaacccagccagtcaggaagtcgctacttcgggaacaccaaccaatcagggggccgtcacctgctgaagggctggctctcagtcccctcgctgtagtcgcggagctgtgtctgttcccaggagtccttcggcggctgttgtgtcagtggcctgatcgcgatggggacaaaggcgcaagtcgagaggaaactgttgtgcctcttcatattggcgatcctgttgtgctccctggcattgggcagtgttacagtgcactcttctgaacctgaagtcagaattcctgagaataatcctgtgaagttgtcctgtgcctactcgggcttttcttctccccgtgtggagtggaagtttgaccaaggagacaccaccagactcgtttgctataataacaagatcacagcttcctatgaggaccgggtgaccttcttgccaactggtatcaccttcaagtccgtgacacgggaagacactgggacatacacttgtatggtctctgaggaaggcggcaacagctatggggaggtcaaggtcaagctcatcgtgcttgtgcctccatccaagcctacagttaacatcccctcctctgccaccattgggaaccgggcagtgctgacatgctcagaacaagatggttccccaccttctgaatacacctggttcaaagatgggatagtgatgcctacgaatcccaaaagcacccgtgccttcagcaactcttcctatgtcctgaatcccacaacaggagagctggtctttgatcccctgtcagcctctgatactggagaatacagctgtgaggcacggaatgggtatgggacacccatgacttcaaatgctgtgcgcatggaagctgtggagcggaatgtgggggtcatcgtggcagccgtccttgtaaccctgattctcctgggaatcttggtttttggcatctggtttgcctatagccgaggccactttgacagaacaaagaaaagaaagggacttcgagtaagaaggtgaccacacagccaggacaagcgacccgaagtgaagaacgacagtcagcaagaccgca

SEQ ID NO: 296381 - DNA, 589 bp, Homo sapiens
  misc_feature (51)..(51): n is a, c, g, or t
  misc_feature (56)..(56): n is a, c, g, or t
  misc_feature (59)..(59): n is a, c, g, or t
  misc_feature (61)..(61): n is a, c, g, or t
  misc_feature (65)..(65): n is a, c, g, or t
  misc_feature (77)..(77): n is a, c, g, or t
tctccaaagggtctgtcccgtagttccagcccagggaagggtgatggcctnagccnccngntccngccttcttttcnttccttttttttttgagctggagttttgctcttgttgccaggctcctgagtagctgggattgcgggtgcgtgccaccatgcctggctaatttttgtgtttttagtagagacagggtttcaccatgttggtcgggctggtctcagactcctgacctcttgatccgcctgccttggcctcccaaagtgatgggattacagatgtgagccaccgtgcctagccaaggatgagatttttaaagtatgtttcagttctgtgtcatggttggaagacagagtaggaaggatatggaaaaggtcatggggaagcagaggtgattcatggctctgtgaatttgaggtgaatggttccttattgtctaggccacttgtgaagaatatgagtcagttattgccagccttggaatttacttctctagcttacaatggaccttttgaactggaaaacaccttgtctgcattcactttaaaatgtcaaaactaatttttataataaatgtttattttcacattga

SEQ ID NO: 296382 - DNA, 1061 bp, Homo sapiens
  misc_feature (21)..(22): n is a, c, g, or t
aaataggctaggtacgaggcnnggtggtatgttgcaggcgccgagagggcgggccagggccgcactccggagactcgcggttgctacgcgcaccatggctggagcgcccacggtctcgcttcctgaactccgttcactcctagcctccggacgggcccggctcttcgatgtgcgctctcgcgaggaggcggcagctgggaccatcccaggggcgctcaacatcccgggtatagggtggagaggggacgcccaggtggtggaatagagaccgttcaggaggttctttgccaatgggacctcatttaggatggaatggggaaggcactgattatgggggtcctgcattcccgggagccagccctcagcttccgtaggaaggactgatggggggcggatcttggcatcggaactggcccatccagtttgagaagacagcaggcggagaggagaggggcagaccagcttctcttgacctccccaaatctggacgcctgagggggcatcccgccccgcctcctcacagcttagggagtggcttgcattcaaaagttgtcggtttctgttccttgaaattggggtgggggtaggggatggttatcatatgttgtttgggggcccccaggacccagcccttccaggcccagcttccgaacctgagtgccaaattgctggctttcccttctaccctctccactcctccagtgtccgagttggagagtgctctgcagatggagccagctgccttccaggctttatattctgctgagaagccaaagctggaagatgagcatctcgttttcttctgtcagatgggcaagcggggcctccaggccacgcagctggcccggagtcttggatacactggggctcgcaactacgctggagcctatagagaatggttggagaaagagagttaggcaggaggcagcttactgattgccaccccctggccccttaatggccaccttaactaagggtgtgaacgggctgacttggtgaattgggcaactccttatagtgttgtgcacacaaaagcatcaaataaagaacatttaatcaaa

SEQ ID NO: 296383 - DNA, 540 bp, Homo sapiens
  misc_feature (21)..(22): n is a, c, g, or t
aaataggctaggtacgaggcnnggtggtatgttgcaggcgccgagagggcgggccagggccgcactccggagactcgcggttgctacgcgcaccatggctggagtgtccgagttggagagtgctctgcagatggagccagctgccttccaggctttatattctgctgagaagccaaagctggaagatgagcatctcgttttcttctgtcagatgggcaagcggggcctccaggccacgcagctggcccggagtcttggatacactggggctcgcaactacgctggagcctatagagaatggttggagaaagagagttaggcaggaggcagcttactgattgccaccccctggccccttaatggccaccttaactaagggtgtgaacgggctgacttggtgaattgggcaactccttatagtgttgtgcacacaaaagcatcaaataaagaacatttaatcaaaaaaaaagagtagaaaaagagaaaaaactttggggggggcgttgggcccttggaaaaagtttttaagaccattggtgg

SEQ ID NO: 296384 - DNA, 807 bp, Homo sapiens
aactttaggctaggtacgaggcctgggcgggccagggccgcactccggagactcgcggttgctacgcgcaccatggctggagaggtacttctcagccctctagctccaactgagaacccagccagtcaggaagtcgctacttcgggaacaccaaccaatcagggggccgtcacctgctgaagggctggctctcagtcccctcgctgtagtcgcggagctgtgtctgttcccaggagtccttcggcggctgttgtgtcagtggcctgatcgcgatggggacaaaggcgcaagtcgagaggaaactgttgtgcctcttcatattggcgatcctgttgtctccctggcattgggcagtgttacagatgcccaaataaaaaatgagctattggaatctgaaatgaagaaccttaaaaagtgtgtgagtgaattggaagaagaaaagcagcagttagtcaaggaaaaaactaaggtggaatcagaaatacgaaaggaatatttggagaaaatacaaggtgctcagaaagaacccggaaataaaagccatgcaaaggaacttcaggaactgttaaaagaaaaacaacaagaagtaaagcagctacagaaggactgcatcaggtatcaagagaaaattagtgctctggagagaactgttaaagctctagaattgttcaaactgaatctcaaaaagattggaaataaccaaagaaaatctgggctcaagcagttgaacaccgcaaaaaggcacaagcagaattagctagcttcaaagtcctgctagatgacactcaaagtgaagcagcaagggtc

SEQ ID NO: 296385 - DNA, 1147 bp, Homo sapiens
  misc_feature (21)..(22): n is a, c, g, or t
aaataggctaggtacgaggcnnggtggtatgttgcaggcgccgagagggcgggccagggccgcactccggagactcgcggttgctacgcgcaccatggctggagcgcccacggtctcgcttcctgaactccgttcactcctagcctccggacgggcccggctcttcgatgtgcgctctcgcgaggaggcggcagctgggaccatcccaggggcgctcaacatcccgggtatagggtggagaggggacgcccaggtggtggaatagagaccgttcaggaggttctttgccaatgggacctcatttaggatggaatggggaaggcactgattatgggggtcctgcattcccgggagccagccctcagcttccgtaggaaggactgatggggggcggatcttggcatcggaactggcccatccagtttgagaagacagcaggcggagaggagaggggcagaccagcttctcttgacctccccaaatctggacgcctgagggggcatcccgccccgcctcctcacagcttagggagtggcttgcattcaaaagttgtcggtttctgttccttgaaattggggtgggggtaggggatggttatcatatgttgtttgggggcccccaggacccagcccttccaggcccagcttccgaacctgagtgccaaattgctggctttcccttctaccctctccactcctccagtgtccgagttggagagtgctctgcagatggagccagctgccttccaggctttatattctgctgagaagccaaagctggaagatgagcatctcgttttcttctgtcagatgggcaagcggggcctccaggccacgcagctggcccggagtcttggatacactgggtacggggaggtgtggctgctagctgggaggtgatggggactgcctgtcattcctgtcagtctctcacgcttctttgtctccacagggctcgcaactacgctggagcctatagagaatggttggagaaagagagttaggcaggaggcagcttactgattgccaccccctggccccttaatggccaccttaactaagggtgtgaacgggctgacttggtgaattgggcaactccttatagtgttgtgcacacaaaagcatcaaataaagaacatttaatcaaa

SEQ ID NO: 296386 - DNA, 1133 bp, Homo sapiens
  misc_feature (21)..(22): n is a, c, g, or t
aaataggctaggtacgaggcnnggtggtatgttgcaggcgccgagagggcgggccagggccgcactccggagactcgcggttgctacgcgcaccatggctggagcgcccacggtctcgcttcctgaactccgttcactcctagcctccggacgggcccggctcttcgatgtgcgctctcgcgaggaggcggcagctgggaccatcccaggggcgctcaacatcccgggtatagggtggagaggggacgcccaggtggtggaatagagaccgttcaggaggttctttgccaatgggacctcatttaggatggaatggggaaggcactgattatgggggtcctgcattcccgggagccagccctcagcttccgtaggaaggactgatggggggcggatcttggcatcggaactggcccatccagtttgagaagacagcaggcggagaggagaggggcagaccagcttctcttgacctccccaaatctggacgcctgagggggcatcccgccccgcctcctcacagcttagggagtggcttgcattcaaaagttgtcggtttctgttccttgaaattggggtgggggtaggggatggttatcatatgttgtttgggggcccccaggacccagcccttccaggcccagcttccgaacctgagtgccaaattgctggctttcccttctaccctctccactcctccagtgtccgagttggagagtgctctgcagatggagccagctgccttccaggctttatattctgctgagaagccaaagctggaagatgagcatctcgttttcttctgtcagatgggcaagcggggcctccaggccacgcagctggcccggagtcttggatacactgggtacggggaggtgtggctgctagctgggaggtgatggggactgcctgtcattcctgtcagtctctcacgcttctttgtctccacagggctcgcaactacgctggagcctatagagaatggttggagaaagagagttaggcaggaggcagcttactgattgccaccccctggccccttaatggccaccttaactaagggtgtgaacgggctgacgtcgctgaagctcggcactcacctcatacatgtcagctcacatcgatccggacca

SEQ ID NO: 296387 - DNA, 2556 bp, Homo sapiens
tctgcttagtcatggtgacctgcgcgcgctccgcgcctcccccacgcgcagcgatggaggcgccggggctcgggcggtggaggcggagccggagcgcggccatggcggggtccctgagtgccagaggtggtggtgttgcttatcttctggaaccccatgcagccagatcccaggcctagcggggctggggcctgctgccgattcctgcccctgcagtcacagtgccctgagggggcaggggacgcggtgatgtacgcctccactgagtgcaaggcggaggtgacgccctcccagcatggcaaccgcaccttcagctacaccctggaggatcataccaagcaggcctttggcatcatgaacgagctgcggctcagccagcagctgtgtgacgtcacactgcaggtcaagtaccaggatgcaccggccgcccagttcatggcccacaaggtggtgctggcctcatccagccctgtcttcaaggccatgttcaccaacgggctgcgggagcagggcatggaggtggtgtccattgagggtatccaccccaaggtcatggagcgcctcattgaattcgcctacacggcctccatctccatgggcgagaagtgtgtcctccacgtcatgaacggtgctgtcatgtaccagatcgacagcgttgtccgtgcctgcagtgacttcctggtgcagcagctggaccccagcaatgccatcggcatcgccaacttcgctgagcagattggctgtgtggagttgcaccagcgtgcccgggagtacatctacatgcatttggggaggtggccaagcaagaggagttcttcaacctgtcccactgccaactggtgaccctcatcagccgggacgacctgaacgtgcgctgcgagtccgaggtcttccacgcctgcatcaactgggtcaagtacgactgcgaacagcgacggttctacgtccaggcgctgctgcgggccgtgcgctgccactcgttgacgccgaacttcctgcagatgcagctgcagaagtgcgagatcctgcagtccgactcccgctgcaaggactacctggtcaagatcttcgaggagctcaccctgcacaagcccacgcaggtgatgccctgccgggcgcccaaggtgggccgcctgatctacaccgcgggcggctacttccgacagtcgctcagctacctggaggcttacaaccccagtgacggcacctggctccggttggcggacctgcaggtgccgcggagcggcctggccggctgcgtggtgggcgggctgttgtacgccgtgggcggcaggaacaactcgcccgacggcaacaccgactccagcgccctggactgttacaaccccatgaccaatcagtggtcgccctgcgcccccatgagcgtgccccgtaaccgcatcggggtgggggtcatcgatggccacatctatgccgtcggcggctcccacggctgcatccaccacaacagtgtggagaggtatgagccagagcgggatgagtggcacttggtggccccaatgctgacacgaaggatcggggtgggcgtggctgtcctcaatcgtctcctttatgccgtggggggctttgacgggacaaaccgccttaattcagctgagtgttactacccagagaggaacgagtggcgaatgatcacagcaatgaacaccatccgaagcggggcaggcgtctgcgtcctgcacaactgtatctatgctgctgggggctatgatggtcaggaccagctgaacagcgtggagcgctacgatgtggaaacagagacgtggactttcgtagcccccatgaagcaccggcgaagtgccctggggatcactgtccaccaggggagaatctacgtccttggaggctatgatggtcacacgttcctggacagtgtggagtgttacgacccagatacagacacctggagcgaggtgacccgaatgacatcgggccggagtggggtgggcgtggctgtcaccatggagccctgccggaagcagattgaccagcagaactgtacctgttgaggcacttttgtttcttgggcaaaaatacagtccaatggggagtatcattgtttttgtacaaaaaccgggactaaaagaaaagacagcactgcaaataacccatcttccgggaagggaggccaggatgcctcagtgttaaaatgacatctcaaaagaagtccaaagcgggaatcatgtgcccctcagcggagccccgggagtgtccaagacagcctggctgggaaagggggtgtggaaagagcaggcttccaggagagaggcccccaaaccctctggccgggtaataggcctgggtcccactcacccatgccggcagctgtcaccatgtgatttattcttggatacctgggagggggccaatgggggcctcagggggaggccccctctggaaatgtggttcccagggatgggcctgtacatagaagccaccggatggcacttccccaccggatggacagttattttgttgataagtaaccctgtaattttccaaggaaaataaagaacagactaactagtgtctttc

SEQ ID NO: 296388 - DNA, 2563 bp, Homo sapiens
cttttcgggcgtcccgaggccgctccccaaccgacaaccaagaccccgcaggccacgcagccctggagccgaggccccccgacggcggaggcgcccgcgggtcccctacagccaaggtccctgagtgccagaggtggtggtgttgcttatcttctggaaccccatgcagccagatcccaggcctagcggggctggggcctgctgccgattcctgcccctgcagtcacagtgccctgagggggcaggggacgcggtgatgtacgcctccactgagtgcaaggcggaggtgacgccctcccagcatggcaaccgcaccttcagctacaccctggaggatcataccaagcaggcctttggcatcatgaacgagctgcggctcagccagcagctgtgtgacgtcacactgcaggtcaagtaccaggatgcaccggccgcccagttcatggcccacaaggtggtgctggcctcatccagccctgtcttcaaggccatgttcaccaacgggctgcgggagcagggcatggaggtggtgtccattgagggtatccaccccaaggtcatggagcgcctcattgaattcgcctacacggcctccatctccatgggcgagaagtgtgtcctccacgtcatgaacggtgctgtcatgtaccagatcgacagcgttgtccgtgcctgcagtgacttcctggtgcagcagctggaccccagcaatgccatcggcatcgccaacttcgctgagcagattggctgtgtggagttgcaccagcgtgcccgggagtacatctacatgcatttggggaggtggccaagcaagaggagttcttcaacctgtcccactgccaactggtgaccctcatcagccgggacgacctgaacgtgcgctgcgagtccgaggtcttccacgcctgcatcaactgggtcaagtacgactgcgaacagcgacggttctacgtccaggcgctgctgcgggccgtgcgctgccactcgttgacgccgaacttcctgcagatgcagctgcagaagtgcgagatcctgcagtccgactcccgctgcaaggactacctggtcaagatcttcgaggagctcaccctgcacaagcccacgcaggtgatgccctgccgggcgcccaaggtgggccgcctgatctacaccgcgggcggctacttccgacagtcgctcagctacctggaggcttacaaccccagtgacggcacctggctccggttggcggacctgcaggtgccgcggagcggcctggccggctgcgtggtgggcgggctgttgtacgccgtgggcggcaggaacaactcgcccgacggcaacaccgactccagcgccctggactgttacaaccccatgaccaatcagtggtcgccctgcgcccccatgagcgtgccccgtaaccgcatcggggtgggggtcatcgatggccacatctatgccgtcggcggctcccacggctgcatccaccacaacagtgtggagaggtatgagccagagcgggatgagtggcacttggtggccccaatgctgacacgaaggatcggggtgggcgtggctgtcctcaatcgtctcctttatgccgtggggggctttgacgggacaaaccgccttaattcagctgagtgttactacccagagaggaacgagtggcgaatgatcacagcaatgaacaccatccgaagcggggcaggcgtctgcgtcctgcacaactgtatctatgctgctgggggctatgatggtcaggaccagctgaacagcgtggagcgctacgatgtggaaacagagacgtggactttcgtagcccccatgaagcaccggcgaagtgccctggggatcactgtccaccaggggagaatctacgtccttggaggctatgatggtcacacgttcctggacagtgtggagtgttacgacccagatacagacacctggagcgaggtgacccgaatgacatcgggccggagtggggtgggcgtggctgtcaccatggagccctgccggaagcagattgaccagcagaactgtacctgttgaggcacttttgtttcttgggcaaaaatacagtccaatggggagtatcattgtttttgtacaaaaaccgggactaaaagaaaagacagcactgcaaataacccatcttccgggaagggaggccaggatgcctcagtgttaaaatgacatctcaaaagaagtccaaagcgggaatcatgtgcccctcagcggagccccgggagtgtccaagacagcctggctgggaaagggggtgtggaaagagcaggcttccaggagagaggcccccaaaccctctggccgggtaataggcctgggtcccactcacccatgccggcagctgtcaccatgtgatttattcttggatacctgggagggggccaatgggggcctcagggggaggccccctctggaaatgtggttcccagggatgggcctgtacatagaagccaccggatggcacttccccaccggatggacagttattttgttgataagtaaccctgtaattttccaaggaaaataaagaacagactaactagtgtctttc

SEQ ID NO: 296389 - DNA, 2652 bp, Homo sapiens
ggcgccacggcccagggcgcctccgagttccccgccaggactcggagggccaggagggcgcgacctgggtggatatttttgttggacggcgcaactcttggggtggcccgggagcggcggaaaccgagcgagagaaccaggaggcgctgcgcagaaggaggcccgggggctccgaggcgttgaggggctcgatctgcgttctggggtccctgagtgccagaggtggtggtgttgcttatcttctggaaccccatgcagccagatcccaggcctagcggggctggggcctgctgccgattcctgcccctgcagtcacagtgccctgagggggcaggggacgcggtgatgtacgcctccactgagtgcaaggcggaggtgacgccctcccagcatggcaaccgcaccttcagctacaccctggaggatcataccaagcaggcctttggcatcatgaacgagctgcggctcagccagcagctgtgtgacgtcacactgcaggtcaagtaccaggatgcaccggccgcccagttcatggcccacaaggtggtgctggcctcatccagccctgtcttcaaggccatgttcaccaacgggctgcgggagcagggcatggaggtggtgtccattgagggtatccaccccaaggtcatggagcgcctcattgaattcgcctacacggcctccatctccatgggcgagaagtgtgtcctccacgtcatgaacggtgctgtcatgtaccagatcgacagcgttgtccgtgcctgcagtgacttcctggtgcagcagctggaccccagcaatgccatcggcatcgccaacttcgctgagcagattggctgtgtggagttgcaccagcgtgcccgggagtacatctacatgcatttggggaggtggccaagcaagaggagttcttcaacctgtcccactgccaactggtgaccctcatcagccgggacgacctgaacgtgcgctgcgagtccgaggtcttccacgcctgcatcaactgggtcaagtacgactgcgaacagcgacggttctacgtccaggcgctgctgcgggccgtgcgctgccactcgttgacgccgaacttcctgcagatgcagctgcagaagtgcgagatcctgcagtccgactcccgctgcaaggactacctggtcaagatcttcgaggagctcaccctgcacaagcccacgcaggtgatgccctgccgggcgcccaaggtgggccgcctgatctacaccgcgggcggctacttccgacagtcgctcagctacctggaggcttacaaccccagtgacggcacctggctccggttggcggacctgcaggtgccgcggagcggcctggccggctgcgtggtgggcgggctgttgtacgccgtgggcggcaggaacaactcgcccgacggcaacaccgactccagcgccctggactgttacaaccccatgaccaatcagtggtcgccctgcgcccccatgagcgtgccccgtaaccgcatcggggtgggggtcatcgatggccacatctatgccgtcggcggctcccacggctgcatccaccacaacagtgtggagaggtatgagccagagcgggatgagtggcacttggtggccccaatgctgacacgaaggatcggggtgggcgtggctgtcctcaatcgtctcctttatgccgtggggggctttgacgggacaaaccgccttaattcagctgagtgttactacccagagaggaacgagtggcgaatgatcacagcaatgaacaccatccgaagcggggcaggcgtctgcgtcctgcacaactgtatctatgctgctgggggctatgatggtcaggaccagctgaacagcgtggagcgctacgatgtggaaacagagacgtggactttcgtagcccccatgaagcaccggcgaagtgccctggggatcactgtccaccaggggagaatctacgtccttggaggctatgatggtcacacgttcctggacagtgtggagtgttacgacccagatacagacacctggagcgaggtgacccgaatgacatcgggccggagtggggtgggcgtggctgtcaccatggagccctgccggaagcagattgaccagcagaactgtacctgttgaggcacttttgtttcttgggcaaaaatacagtccaatggggagtatcattgtttttgtacaaaaaccgggactaaaagaaaagacagcactgcaaataacccatcttccgggaagggaggccaggatgcctcagtgttaaaatgacatctcaaaagaagtccaaagcgggaatcatgtgcccctcagcggagccccgggagtgtccaagacagcctggctgggaaagggggtgtggaaagagcaggcttccaggagagaggcccccaaaccctctggccgggtaataggcctgggtcccactcacccatgccggcagctgtcaccatgtgatttattcttggatacctgggagggggccaatgggggcctcagggggaggccccctctggaaatgtggttcccagggatgggcctgtacatagaagccaccggatggcacttccccaccggatggacagttattttgttgataagtaaccctgtaattttccaaggaaaataaagaacagactaactagtgtctttc

SEQ ID NO: 296390 - DNA, 2379 bp, Homo sapiens
tctgcttagtcatggtgacctgcgcgcgctccgcgcctcccccacgcgcagcgatggaggcgccggggctcgggcggtggaggcggagccggagcgcggccatggcggggtccctgagtgccagaggtggtggtgttgcttatcttctggaaccccatgcagccagatcccaggcctagcggggctggggcctgctgccgattcctgcccctgcagtcacagtgccctgagggggcaggggacgcggtgatgtacgcctccactgagtgcaaggcggaggtgacgccctcccagcatggcaaccgcaccttcagctacaccctggaggatcataccaagcaggcctttggcatcatgaacgagctgcggctcagccagcagctgtgtgacgtcacactgcaggtcaagtaccaggatgcaccggccgcccagttcatggcccacaaggtggtgctggcctcatccagccctgtcttcaaggccatgttcaccaacgggctgcgggagcagggcatggaggtggtgtccattgagggtatccaccccaaggtcatggagcgcctcattgaattcgcctacacggcctccatctccatgggcgagaagtgtgtcctccacgtcatgaacggtgctgtcatgtaccagatcgacagcgttgtccgtgcctgcagtgacttcctggtgcagcagctggaccccagcaatgccatcggcatcgccaacttcgctgagcagattggctgtgtggagttgcaccagcgtgcccgggagtacatctacatgcatttggggaggtggccaagcaagaggagttcttcaacctgtcccactgccaactggtgaccctcatcagccgggacgacctgaacgtgcgctgcgagtccgaggtcttccacgcctgcatcaactgggtcaagtacgactgcgaacagcgacggttctacgtccaggcgctgctgcgggccgtgcgctgccactcgttgacgccgaacttcctgcagatgcagctgcagaagtgcgagatcctgcagtccgactcccgctgcaaggactacctggtcaagatcttcgaggagctcaccctgcacaagcccacgcaggtgatgccctgccgggcgcccaaggtgggccgcctgatctacaccgcgggcggctacttccgacagtcgctcagctacctggaggcttacaaccccagtgacggcacctggctccggttggcggacctgcaggtgccgcggagcggcctggccggctgcgtggtgggcgggctgttgtacgccgtgggcggcaggaacaactcgcccgacggcaacaccgactccagcgccctggactgttacaaccccatgaccaatcagtggtcgccctgcgcccccatgagcgtgccccgtaaccgcatcggggtgggggtcatcgatggccacatctatgccgtcggcggctcccacggctgcatccaccacaacagtgtggagaggtatgagccagagcgggatgagtggcacttggtggccccaatgctgacacgaaggatcggggtgggcgtggctgtcctcaatcgtctcctttatgccgtggggggctttgacgggacaaaccgccttaattcagctgagtgttactacccagagaggaacgagtggcgaatgatcacagcaatgaacaccatccgaagcggggcaggaggctatgatggtcacacgttcctggacagtgtggagtgttacgacccagatacagacacctggagcgaggtgacccgaatgacatcgggccggagtggggtgggcgtggctgtcaccatggagccctgccggaagcagattgaccagcagaactgtacctgttgaggcacttttgtttcttgggcaaaaatacagtccaatggggagtatcattgtttttgtacaaaaaccgggactaaaagaaaagacagcactgcaaataacccatcttccgggaagggaggccaggatgcctcagtgttaaaatgacatctcaaaagaagtccaaagcgggaatcatgtgcccctcagcggagccccgggagtgtccaagacagcctggctgggaaagggggtgtggaaagagcaggcttccaggagagaggcccccaaaccctctggccgggtaataggcctgggtcccactcacccatgccggcagctgtcaccatgtgatttattcttggatacctgggagggggccaatgggggcctcagggggaggccccctctggaaatgtggttcccagggatgggcctgtacatagaagccaccggatggcacttccccaccggatggacagttattttgttgataagtaaccctgtaattttccaaggaaaataaagaacagactaactagtgtctttc

SEQ ID NO: 296391 - DNA, 2508 bp, Homo sapiens
tctgcttagtcatggtgacctgcgcgcgctccgcgcctcccccacgcgcagcgatggaggcgccggggctcgggcggtggaggcggagccggagcgcggccatggcggggtccctgagtgccagaggtggtggtgttgcttatcttctggaaccccatgcagccagatcccaggcctagcggggctggggcctgctgccgattcctgcccctgcagtcacagtgccctgagggggcaggggacgcggtgatgtacgcctccactgagtgcaaggcggaggtgacgccctcccagcatggcaaccgcaccttcagctacaccctggaggatcataccaagcaggcctttggcatcatgaacgagctgcggctcagccagcagctgtgtgacgtcacactgcaggtcaagtaccaggatgcaccggccgcccagttcatggcccacaaggtggtgctggcctcatccagccctgtcttcaaggccatgttcaccaacgggctgcgggagcagggcatggaggtggtgtccattgagggtatccaccccaaggtcatggagcgcctcattgaattcgcctacacggcctccatctccatgggcgagaagtgtgtcctccacgtcatgaacggtgctgtcatgtaccagatcgacagcgttgtccgtgcctgcagtgacttcctggtgcagcagctggaccccagcaatgccatcggcatcgccaacttcgctgagcagattggctgtgtggagttgcaccagcgtgcccgggagtacatctacatgcatttggggaggtggccaagcaagaggagttcttcaacctgtcccactgccaactggtgaccctcatcagccgggacgacctgaacgtgcgctgcgagtccgaggtcttccacgcctgcatcaactgggtcaagtacgactgcgaacagcgacggttctacgtccaggcgctgctgcgggccgtgcgctgccactcgttgacgccgaacttcctgcagatgcagctgcagaagtgcgagatcctgcagtccgactcccgctgcaaggactacctggtcaagatcttcgaggagctcaccctgcacaagcccacgcaggtgatgccctgccgggcgcccaaggtgggccgcctgatctacaccgcgggcggctacttccgacagtcgctcagctacctggaggcttacaaccccagtgacggcacctggctccggttggcggacctgcaggtgccgcggagcggcctggccggctgcgacggcaacaccgactccagcgccctggactgttacaaccccatgaccaatcagtggtcgccctgcgcccccatgagcgtgccccgtaaccgcatcggggtgggggtcatcgatggccacatctatgccgtcggcggctcccacggctgcatccaccacaacagtgtggagaggtatgagccagagcgggatgagtggcacttggtggccccaatgctgacacgaaggatcggggtgggcgtggctgtcctcaatcgtctcctttatgccgtggggggctttgacgggacaaaccgccttaattcagctgagtgttactacccagagaggaacgagtggcgaatgatcacagcaatgaacaccatccgaagcggggcaggcgtctgcgtcctgcacaactgtatctatgctgctgggggctatgatggtcaggaccagctgaacagcgtggagcgctacgatgtggaaacagagacgtggactttcgtagcccccatgaagcaccggcgaagtgccctggggatcactgtccaccaggggagaatctacgtccttggaggctatgatggtcacacgttcctggacagtgtggagtgttacgacccagatacagacacctggagcgaggtgacccgaatgacatcgggccggagtggggtgggcgtggctgtcaccatggagccctgccggaagcagattgaccagcagaactgtacctgttgaggcacttttgtttcttgggcaaaaatacagtccaatggggagtatcattgtttttgtacaaaaaccgggactaaaagaaaagacagcactgcaaataacccatcttccgggaagggaggccaggatgcctcagtgttaaaatgacatctcaaaagaagtccaaagcgggaatcatgtgcccctcagcggagccccgggagtgtccaagacagcctggctgggaaagggggtgtggaaagagcaggcttccaggagagaggcccccaaaccctctggccgggtaataggcctgggtcccactcacccatgccggcagctgtcaccatgtgatttattcttggatacctgggagggggccaatgggggcctcagggggaggccccctctggaaatgtggttcccagggatgggcctgtacatagaagccaccggatggcacttccccaccggatggacagttattttgttgataagtaaccctgtaattttccaaggaaaataaagaacagactaactagtgtctttc

SEQ ID NO: 296392 - DNA, 2350 bp, Homo sapiens
tctgcttagtcatggtgacctgcgcgcgctccgcgcctcccccacgcgcagcgatggaggcgccggggctcgggcggtggaggcggagccggagcgcggccatggcggggtccctgagtgccagaggtggtggtgttgcttatcttctggaaccccatgcagccagatcccaggcctagcggggctggggcctgctgccgattcctgcccctgcagtcacagtgccctgagggggcaggggacgcggtgatgtacgcctccactgagtgcaaggcggaggtgacgccctcccagcatggcaaccgcaccttcagctacaccctggaggatcataccaagcaggcctttggcatcatgaacgagctgcggctcagccagcagctgtgtgacgtcacactgcaggtcaagtaccaggatgcaccggccgcccagttcatggcccacaaggtggtgctggcctcatccagccctgtcttcaaggccatgttcaccaacgggctgcgggagcagggcatggaggtggtgtccattgagggtatccaccccaaggtcatggagcgcctcattgaattcgcctacacggcctccatctccatgggcgagaagtgtgtcctccacgtcatgaacggtgctgtcatgtaccagatcgacagcgttgtccgtgcctgcagtgacttcctggtgcagcagctggaccccagcaatgccatcggcatcgccaacttcgctgagcagattggctgtgtggagttgcaccagcgtgcccgggagtacatctacatgcatttggggaggtggccaagcaagaggagttcttcaacctgtcccactgccaactggtgaccctcatcagccgggacgacctgaacgtgcgctgcgagtccgaggtcttccacgcctgcatcaactgggtcaagtacgactgcgaacagcgacggttctacgtccaggcgctgctgcgggccgtgcgctgccactcgttgacgccgaacttcctgcagatgcagctgcagaagtgcgagatcctgcagtccgactcccgctgcaaggactacctggtcaagatcttcgaggagctcaccctgcacaagcccacgcaggtgatgccctgccgggcgcccaaggtgggccgcctgatctacaccgcgggcggctacttccgacagtcgctcagctacctggaggcttacaaccccagtgacggcacctggctccggttggcggacctgcaggtgccgcggagcggcctggccggctgcgtggtgggcgggctgttgtacgccgtgggcggcaggaacaactcgcccgacggcaacaccgactccagcgccctggactgttacaaccccatgaccaatcagtggtcgccctgcgcccccatgagcgtgccccgtaaccgcatcggggtgggggtcatcgatggccacatctatgccgtcggcggctcccacggctgcatccaccacaacagtgtggagaggcgtctgcgtcctgcacaactgtatctatgctgctgggggctatgatggtcaggaccagctgaacagcgtggagcgctacgatgtggaaacagagacgtggactttcgtagcccccatgaagcaccggcgaagtgccctggggatcactgtccaccaggggagaatctacgtccttggaggctatgatggtcacacgttcctggacagtgtggagtgttacgacccagatacagacacctggagcgaggtgacccgaatgacatcgggccggagtggggtgggcgtggctgtcaccatggagccctgccggaagcagattgaccagcagaactgtacctgttgaggcacttttgtttcttgggcaaaaatacagtccaatggggagtatcattgtttttgtacaaaaaccgggactaaaagaaaagacagcactgcaaataacccatcttccgggaagggaggccaggatgcctcagtgttaaaatgacatctcaaaagaagtccaaagcgggaatcatgtgcccctcagcggagccccgggagtgtccaagacagcctggctgggaaagggggtgtggaaagagcaggcttccaggagagaggcccccaaaccctctggccgggtaataggcctgggtcccactcacccatgccggcagctgtcaccatgtgatttattcttggatacctgggagggggccaatgggggcctcagggggaggccccctctggaaatgtggttcccagggatgggcctgtacatagaagccaccggatggcacttccccaccggatggacagttattttgttgataagtaaccctgtaattttccaaggaaaataaagaacagactaactagtgtctttc

SEQ ID NO: 296393 - DNA, 2598 bp, Homo sapiens
cttttcgggcgtcccgaggccgctccccaaccgacaaccaagaccccgcaggccacgcagccctggagccgaggccccccgacggcggaggcgcccgcgggtcccctacagccaaggtccctgagtgccagaggtggtggtgttgcttatcttctggaaccccatgcagccagatcccaggcctagcggggctggggcctgctgccgattcctgcccctgcagtcacagtgccctgagggggcaggggacgcggtgatgtacgcctccactgagtgcaaggcggaggtgacgccctcccagcatggcaaccgcaccttcagctacaccctggaggatcataccaagcaggcctttgaggcattccaatttggacaccgggagcggcctttggccggggccttccaaggaccccaggagcaaggctgtgtgacgtcacactgcaggtcaagtaccaggatgcaccggccgcccagttcatggcccacaaggtggtgctggcctcatccagccctgtcttcaaggccatgttcaccaacgggctgcgggagcagggcatggaggtggtgtccattgagggtatccaccccaaggtcatggagcgcctcattgaattcgcctacacggcctccatctccatgggcgagaagtgtgtcctccacgtcatgaacggtgctgtcatgtaccagatcgacagcgttgtccgtgcctgcagtgacttcctggtgcagcagctggaccccagcaatgccatcggcatcgccaacttcgctgagcagattggctgtgtggagttgcaccagcgtgcccgggagtacatctacatgcatttggggaggtggccaagcaagaggagttcttcaacctgtcccactgccaactggtgaccctcatcagccgggacgacctgaacgtgcgctgcgagtccgaggtcttccacgcctgcatcaactgggtcaagtacgactgcgaacagcgacggttctacgtccaggcgctgctgcgggccgtgcgctgccactcgttgacgccgaacttcctgcagatgcagctgcagaagtgcgagatcctgcagtccgactcccgctgcaaggactacctggtcaagatcttcgaggagctcaccctgcacaagcccacgcaggtgatgccctgccgggcgcccaaggtgggccgcctgatctacaccgcgggcggctacttccgacagtcgctcagctacctggaggcttacaaccccagtgacggcacctggctccggttggcggacctgcaggtgccgcggagcggcctggccggctgcgtggtgggcgggctgttgtacgccgtgggcggcaggaacaactcgcccgacggcaacaccgactccagcgccctggactgttacaaccccatgaccaatcagtggtcgccctgcgcccccatgagcgtgccccgtaaccgcatcggggtgggggtcatcgatggccacatctatgccgtcggcggctcccacggctgcatccaccacaacagtgtggagaggtatgagccagagcgggatgagtggcacttggtggccccaatgctgacacgaaggatcggggtgggcgtggctgtcctcaatcgtctcctttatgccgtggggggctttgacgggacaaaccgccttaattcagctgagtgttactacccagagaggaacgagtggcgaatgatcacagcaatgaacaccatccgaagcggggcaggcgtctgcgtcctgcacaactgtatctatgctgctgggggctatgatggtcaggaccagctgaacagcgtggagcgctacgatgtggaaacagagacgtggactttcgtagcccccatgaagcaccggcgaagtgccctggggatcactgtccaccaggggagaatctacgtccttggaggctatgatggtcacacgttcctggacagtgtggagtgttacgacccagatacagacacctggagcgaggtgacccgaatgacatcgggccggagtggggtgggcgtggctgtcaccatggagccctgccggaagcagattgaccagcagaactgtacctgttgaggcacttttgtttcttgggcaaaaatacagtccaatggggagtatcattgtttttgtacaaaaaccgggactaaaagaaaagacagcactgcaaataacccatcttccgggaagggaggccaggatgcctcagtgttaaaatgacatctcaaaagaagtccaaagcgggaatcatgtgcccctcagcggagccccgggagtgtccaagacagcctggctgggaaagggggtgtggaaagagcaggcttccaggagagaggcccccaaaccctctggccgggtaataggcctgggtcccactcacccatgccggcagctgtcaccatgtgatttattcttggatacctgggagggggccaatgggggcctcagggggaggccccctctggaaatgtggttcccagggatgggcctgtacatagaagccaccggatggcacttccccaccggatggacagttattttgttgataagtaaccctgtaattttccaaggaaaataaagaacagactaactagtgtctttc

SEQ ID NO: 296394 - DNA, 937 bp, Homo sapiens
ggaggtgatggctggggttcccaaagccagacccccagagtcaccttctctgcatggtgccctttaggcgtctgcgtcctgcacaactgtatctatgctgctgggggctatgatggtcaggaccagctgaacagcgtggagcgctacgatgtggaaacagagacgtggactttcgtagcccccatgaagcaccggcgaagtgccctggggatcactgtccaccaggggagaatctacgtccttggaggctatgatggtcacacgttcctggacagtgtggagtgttacgacccagatacagacacctggagcgaggtgacccgaatgacatcgggccggagtggggtgggcgtggctgtcaccatggagccctgccggaagcagattgaccagcagaactgtacctgttgaggcacttttgtttcttgggcaaaaatacagtccaatggggagtatcattgtttttgtacaaaaaccgggactaaaagaaaagacagcactgcaaataacccatcttccgggaagggaggccaggatgcctcagtgttaaaatgacatctcaaaagaagtccaaagcgggaatcatgtgcccctcagcggagccccgggagtgtccaagacagcctggctgggaaagggggtgtggaaagagcaggcttccaggagagaggcccccaaaccctctggccgggtaataggcctgggtcccactcacccatgccggcagctgtcaccatgtgatttattcttggatacctgggagggggccaatgggggcctcagggggaggccccctctggaaatgtggttcccagggatgggcctgtacatagaagccaccggatggcacttccccaccggatggacagttattttgttgataagtaaccctgtaattttccaaggaaaataaagaacagactaactagtgtctttc

SEQ ID NO: 296395 - DNA, 990 bp, Homo sapiens
tctgcttagtcatggtgacctgcgcgcgctccgcgcctcccccacgcgcagcgatggaggcgccggggctcgggcggtggaggcggagccggagcgcggccatggcggggtccctgagtgccagaggtggtggtgttgcttatcttctggaaccccatgcagccagatcccaggcctagcggggctggggcctgctgccgattcctgcccctgcagtcacagtgccctgagggggcaggggacgcggtgatgtacgcctccactgagtgcaaggcggaggtgacgccctcccagcatggcaaccgcaccttcagctacaccctggaggatcataccaagcaggcctttggcatcatgaacgagctgcggctcagccagcagctgtgtgacgtcacactgcaggtcaagtaccaggatgcaccggccgcccagttcatggcccacaaggtggtgctggcctcatccagccctgtcttcaaggccatgttcaccaacgggctgcgggagcagggcatggaggtggtgtccattgagggtatccaccccaaggtcatggagcgcctcattgaattcgcctacacggcctccatctccatgggcgagaagtgtgtcctccacgtcatgaacggtgctgtcatgtaccagatcgacagcgttgtccgtgcctgcagtgacttcctggtgcagcagctggaccccagcaatgccatcggcatcgccaacttcgctgagcagattggctgtgtggagttgcaccagcgtgcccgggagtacatctacatgcatttggggaggtggccaagcaagaggagttcttcaacctgtcccactgccaactggtgaccctcatcagccgggacgacctgaacgtgcgctgcgagtccgaggtcttccacgcctgcatcaactgggtcaagtacgactgtgagagcgttggccaacgctgctcacagcatgcttcccctagccaaccaaaaagaggtacaagag

SEQ ID NO: 296396 - DNA, 912 bp, Homo sapiens
tagtaagagactaaggttttgctatgttgcccaggctggcttcgaactcctggcctcaagcaatcctcctgcctcagccctgcaaagtgctaggattataggcgtgagccaccacgcccggcctgcttttgcatctcacagctgcatctctctctttctgtcccctgctcttggatgtggtgtgacaggtggtgaccatcccttctgttcttcccgcaggaggctatgatggtcacacgttcctggacagtgtggagtgttacgacccagatacagacacctggagcgaggtgacccgaatgacatcgggccggagtggggtgggcgtggctgtcaccatggagccctgccggaagcagattgaccagcagaactgtacctgttgaggcacttttgtttcttgggcaaaaatacagtccaatggggagtatcattgtttttgtacaaaaaccgggactaaaagaaaagacagcactgcaaataacccatcttccgggaagggaggccaggatgcctcagtgttaaaatgacatctcaaaagaagtccaaagcgggaatcatgtgcccctcagcggagccccgggagtgtccaagacagcctggctgggaaagggggtgtggaaagagcaggcttccaggagagaggcccccaaaccctctggccgggtaataggcctgggtcccactcacccatgccggcagctgtcaccatgtgatttattcttggatacctgggagggggccaatgggggcctcagggggaggccccctctggaaatgtggttcccagggatgggcctgtacatagaagccaccggatggcacttccccaccggatggacagttattttgttgataagtaaccctgtaattttccaaggaaaataaagaacagactaactagtgtctttc

SEQ ID NO: 296397 - DNA, 194 bp, Homo sapiens
cgacggcaacaccgactccagcgccctggactgttacaaccccatgaccaatcagtggtcgccctgcgcccccatgagcgtgccccgtaaccgcatcggggtgggggtcatcgatggccacatctatgccgtcggcggctcccacggctgcatccaccacaacagtgtggagaggtgagtggcagggcctgggg

SEQ ID NO: 296398 - DNA, 445 bp, Homo sapiens
ctagctgcaaataaatactaaattcttgttagtatgtagagggaagattagaactttctgttatttagttggaaatgcatcataaaaataaagtgaggcaggagcagtggctcacgcctgttatcacagcactttgggaggccaaggcacttgagcacagtagttcgaggccaacttgggcaacataatcagacctggtctccaaaaaaatttttttttaaattagccaggtaggcagggcgcggtggctcatgcctggaatcccagcactttgggaggctgaggcaggtggatcacctgaggtcgggagtttgagaccagcctaaccaacacggcaaaaccccgtctctattaaaaatacaaaattagctgggcattggtggcacgtgcctgtagtcccagctactcgggaggctgaggcaggagaatcgcttgaacccaggag

SEQ ID NO: 296399 - DNA, 211 bp, Homo sapiens
cccggggaatctgcctttttatatgatgcgtttttattaaacaggacccaccgggctcttttagtttcctcccaccttggtaggttgattgccgatgtgcagggttagtgtcgatcgtttctttaaattttcaccgcgagtgtttagcaagtcagaacccatacatagtccactgatcactcgactagactatcatacatgacagctcgac

SEQ ID NO: 296400 - DNA, 6636 bp, Homo sapiens
cccggggaatctgcctttttatatgatgcgtttttattaaacaggacccaccgggctcttttagtttcctcccaccttggtaggttgattgccgatgtgcagggttagtgtcgatcgtttctttaaattttcacaggcatatgatagatttgtcccacataaatgtggccctgatcgtggagtgagtcctaacaagagagcctgaccttaggctgtacacacactgtggaatttcttcaagggagctgccggccggcgcagaacccccaggagcacaggtctctccgggccgctgtcctgcgtaactgttctccagagcgccagccagccacgggcctgattccagaggagccgaactgacaggacacagcaggctggagttggtgttagattgcttcacattctgttgtcaccaccaagaactccaagtttttcgttttgttttgttttcaaagtgcttacaatgcatgtagacattgttctttgtggtctgactctatgatcgatcacagtgacttagattcaggaaagaacattaacgtcacaagttctaagtagttttcacagcaaagaatatttgataatggttgcacttatcttcagtgcaggttagaagagtcttctcaaccaagcttaactcgagttgtcttctcagccctcaaaaggctcttgtacaaaatgtagattaaaatttgggtgattgttgattgacctttgcataccctggaaagccagggtgtgagtggggtggttgggagtggtgccagttgaacagcagattctgcttcttgtcactgtttcaaaagcgtcaactctgtgttcctagtttcgatgaactccccattcatttttaacacacttcccagataaggcaatgtgctggacaggcacacggcatggccctcggctagagcagggtctgtgatggcctcacctggcagccctctggcctagttcccaccacacatgaggtggtggaatggcctgaaggtggaacagacctgtttttttcctttttaaatgcagtaaggtggcctgtttatcactggctctgtgatacatgacattctttgggaatttggtggccactgcttcagtcacctctgtttttctgaaggctgttccagcagggctgccctgttcatcagcggatgttcactctggcctgccgttccccgtggcatgcggggtgagggtggctttcttccagccccaaatgagacgagtctgtgtcatcattgaaactgcttttcgtaattgcgggtaggttcctgtaggtgagacatattctccataaagctactgtagtagaattcattctgggcaaacactgaaaaaagtgccttacagtatttctgctcatgaaagagtttcactattttggatatattctaaagtggacctgagctatttgagcaaataatgatagggcatactcagacattttagctaccttttatacctacgatttcatgtcacatttactaatagaattaagggaaatagaagcccgttctttcttactgcccctggagggagcatggcgctagggctctcagcctcctagaaggaagggactaaggagacgggcacagacttgcgtcatctcgtttccacagttgacgttttatattactttctcaaattaagttaccaaaacaaactgaagagctgaagcaggtcttccagaccctgcgatcctttctgtagcagtgattctaaagtggcgtttgctgtgtgcttgagagtaacactgcacgctgcaggggctgttgcagcagtcagtcccaggaagccacagcgcttgtaggatctgctaggaccctgcagctgtgctgccgccacctctgctccagagtgtcccagccaaccctcggaagatgggattgccagtcagccctgcctcaccatgcctgcaggaggctgtccagggagcaggtctgtgtgcccatcagcaggttcccatggctgtcactgcccactcatttccacagttagatacggatgtgttgatgtatttcgtctagtttatttggctcagtccacagctgcgttggagtggtgactttggtagcccttgagctctaattaagagagatccaaaccactcagtacccactgggcagtgggaaggcctaccgacttactttatcattgagggcttactgatacaatgaaatgagtttcatgactttttttttttttaaacactttttgaaatagagtgtgctgtgtttaaaaccaaaaatatgcatgttgtctctgaaaagtaggcattgaaacagacttttttgtagtcagtgttaataaaacggatcctgtttgggccttcattgttaaggtggacttcatggccactggaaggtctgttttggtgttacctgagtgtgacacaggccctggggtgtgcgtgtttctctaactgtctacacgtgcacataggcagactttctcatagaatgttcttgaaaggtgattgggcaaagtcatgcaggcccgccttaaagcgctgattagaacagtccaacacagtccgacctcactcaatacccacaaccatcgaaaatggattcttagtaccagacaatcccagtaatgaaggtttagtttccttgaaggaaactacagaaaaggaaagaagcagaatgagaaaggaatggtacttaggtgtttggtatgctgctcacgtgaagtcagcccacaccagccaaaccctcgtggaagatctgctgcaaccattatctttgttcttgagttcatcatgcatttaaaatgagatgcaagagcatttagcataccatgtaaatatggaccttttaaaattaaaatactattggaagtgctttcaactcagccacatcttagctattagttctttgtgttgtcttatcaaagtttaatggatacagttccacagttgttgatgtgtttgtgtgtatattcgatttttataaagatggtagtaagtcaatacatttatcctgatctgtgtattatttgttcacaaattcaagaagcttaaaggtcgtaaatatcagtatctcataaggtaaaccaatagctgattatgtggagccaagttacttcttttctttttgcattatcttgttttggttttgtgctgtaatagaagttcacttagctactttagataaccttgcattaccactggtctggccacgtttgttaaatccttatactgatattcttctaaagagtaaatctcatcatttttccagacaaattttgaggggtttctctgttttgtggacaggcagcagcctccgtaggcacccgcaccctgccttgctggaggagatgggatggggcgggaggtggcttcaccataactatttttaatatgggtcattcttagcatgatttgtaaaggtctcaggcaaacagttgttgaagcttgcttctgtggcatttctgaattgtggcagagcttagatcctgcacccaggggtctttttttcaaacagcatcttgctcagttctgtgaacagaaggctttgttactgaaggaggtggaagaggagtttagggtgaaaaggaggaagggatggacagacccaggtgaggagaggcctggggattggggaagctgtcatctcagtgttaataatcaacttgcttctaacacactggcttatcaggggaggtcatccagtccggtcggtggagttgagagcccttgggccagggtgtttggcggcacaggggcatccgctggatggcctggaggagtgggggaggggaacgtcttcactgggtggtgatcagctgggacagttcaggtagggcaggtgagggacccccgaggccctggagccttgtcctgggatgggtttgaagaactcatcactcatcacttgttttcttttggcttttgttgtttttgttttgttctgtttgttttgttttgtatttctttgttattttattgggaaggtaagcggaatgtgctcatagaccatcagacgcttgtcgaaggcaggtcctagtcatgtaattgcacaggacaaggaggtcagcgtgtgtgatggcagcatgctgtgccggcacatcgtggagtcctagaaactctctagtccctgcggctgttcccctcctctgctctctccctggagaggactgccagctcttaagaaacattcctggtgcggtgtctgcagtgccctttgtgggtgacttcaggcttcccgctttcgtggtgctcttcctgggattcgtttttttattaccctccctccctacttgtaggcctcagctatggcttgacgtaatcgcttttagacccaggttggcttcccttcattaagctatgatcctccaccccattttttttttttttaatttggagtgggagggaggggggtgggcgagagaaagctcgaaaggtattattggtttttcaaaaaattagaggtgacgattctaccagggagttgactgataggagtgtgtgcagggcaggaaaggttcggaggcacccgactaccaccactcggaaagccgctagtccagatcgactagggagaggcttagatactttagtgtatttaaagagcatttcagttaactttttcagctatttttaaagtttgtgaatggagtgttattttggacattcttaaatatgaattctccaaaggcatttagccttgacttaatattaaatcctaaggattttatgtaaggtttttttgcaacctatttaattttttttaaatgcctaacttctgaggtgcataagcccgtggtttgtgtactggaactaaagcggaactcactgattcatattggatccccaggtataccttctgctggtagcatatggctggaaaaggccgtttgcctcacacattgtaacctgccttggctagaaaatgcttttaatgtctcaactctctcttttctgtgtcatgttttggtaggaaatctttaagattggcggacggaacaggtattttagtgagacacttctgagtacttgctttttcctttgacttctaaccaactaaaagagaaggaggtcttcatgttgatattttgcttggttttattttactgattttaaaaggtatatagaaaaatgtaggcctttaaaaagaaacagcatgtagttttttattttaatatgttccatagagtggataggcagacaggtactattgtaatgtattctgtatttaataatttaatatactctagaaagtagacctcatgcattcttttagcatgattttcttttaaactgcttttcattttaagggcacccgtggcggaagctggttttgcaaggactgtgtaagctgtatgcgttctagctgtatgcgttctgtagtcttttcttaggtgggtaacattttcaataacgcgcgcacagcacacaggggtgccctgagccgaaggagcaaaaaaagccaccgctcgtttctataatccagctttgcttttcacaggcgtgggatccaggatggtgtcctctgtgaggacttgaactctggggctttaattccactgtttaattttcaggtaccacagcagcaaagcacagagtgtgacctttttcatgtctgagctgattctgtttgctccacgtgcctgcttcttgctactgttcatttagtaatgggatcacctcaccatgccatgctctgggctctccctctctgtccatttctgttttgctttcctggctaaacccatctaccattcttaacactggtagctcctgtcccattccaagactcactctctcagaccttcccatctccctggctttccatgctcctctccctccacctcctggcttcaactgggtgagggccgtattcctgccactctgctccgcctcagccttgagaactccacgtgggctgggtgggaaggtgctgacgattttcacactgtgtttaccactccatcacctctccatcacctctcaacctttgcttcgacaggtcttcactcacgatttattcctccaggtctttgattggagagagtaactttttaattctgttgttttgcagtttggctctgtaggagtgagtggcgattcaaagatgccggcgtcccgcagtgtgcggttcgtgcccttaaccacccgcttctttgtttcccgcccctctgctttcgcaggagctcttgtgcttgagttcagtgttagtggtagcgtggctcactccacttggaggtggcggccgtctgaccgtgtgttactgctttgccgacggggcctcccggccctgatgcgtgtacactctgcgggctgcaccgggtggctctggttgggggcgaagctgtgttgactgggagagcgttggaaattgagacatggagagatgacgggagtgcgtttctctgggtttgatctccatcctgttttctcccagacacaccacacctaccttgggggaatgccgttgcctgttccacccctttgttcacttcgcgttaactgctgtggtaactttttcaggatctgtgtgaagaatggtaatgacgtagttgaaaggaaaatgtactgttgtgtgtttcatttgtgtgatttcgtaccaaaaaaatgtgtttgaactatattgtatgtaatttggaagtcgtgttaataaaaccctgcagtttcca

SEQ ID NO: 296401 - DNA, 6598 bp, Homo sapiens
cccggggaatctgcctttttatatgatgcgtttttattaaacaggacccaccgggctcttttagtttcctcccaccttggtaggttgattgccgatgtgcagggttagtgtcgatcgtttctttaaattttcacaggcatatgatagatttgtcccacataaatgtggccctgatcgtggagtgagtcctaacaagagagcctgaccttaggctgtacacacactgtggaatttcttcaagggagctgccggccggcgcagaacccccaggagcacaggtctctccgggccgctgtcctgcgtaactgttctccagagcgccagccagccacgggcctgattccagaggagccgaactgacaggacacagcaggctggagttggtgttagattgcttcacattctgttgtcaccaccaagaactccaagtttttcgttttgttttgttttcaaagtgcttacaatgcatgtagacattgttctttgtggtctgactctatgatcgatcacagtgacttagattcaggaaagaacattaacgtcacaagttctaagtagttttcacagcaaagaatatttgataatggttgcacttatcttcagtgcaggttagaagagtcttctcaaccaagcttaactcgagttgtcttctcagccctcaaaaggctcttgtacaaaatgtagattaaaatttgggtgattgttgattgacctttgcataccctggaaagccagggtgtgagtggggtggttgggagtggtgccagttgaacagcagattctgcttcttgtcactgtttcaaaagcgtcaactctgtgttcctagtttcgatgaactccccattcatttttaacacacttcccagataaggcaatgtgctggacaggcacacggcatggccctcggctagagcagggtctgtgatggcctcacctggcagccctctggcctagttcccaccacacatgaggtggtggaatggcctgaaggtggaacagacctgtttttttcctttttaaatgcagtaaggtggcctgtttatcactggctctgtgatacatgacattctttgggaatttggtggccactgcttcagtcacctctgtttttctgaaggctgttccagcagggctgccctgttcatcagcggatgttcactctggcctgccgttccccgtggcatgcggggtgagggtggctttcttccagccccaaatgagacgagtctgtgtcatcattgaaactgcttttcgtaattgcgggtaggttcctgtaggtgagacatattctccataaagctactgtagtagaattcattctgggcaaacactgaaaaaagtgccttacagtatttctgctcatgaaagagtttcactattttggatatattctaaagtggacctgagctatttgagcaaataatgatagggcatactcagacattttagctaccttttatacctacgatttcatgtcacatttactaatagaattaagggaaatagaagcccgttctttcttactgcccctggagggagcatggcgctagggctctcagcctcctagaaggaagggactaaggagacgggcacagacttgcgtcatctcgtttccacagttgacgttttatattactttctcaaattaagttaccaaaacaaactgaagagctgaagcaggtcttccagaccctgcgatcctttctgtagcagtgattctaaagtggcgtttgctgtgtgcttgagagtaacactgcacgctgcaggggctgttgcagcagtcagtcccaggaagccacagcgcttgtaggatctgctaggaccctgcagctgtgctgccgccacctctgctccagagtgtcccagccaaccctcggaagatgggattgccagtcagccctgcctcaccatgcctgcaggaggctgtccagggagcaggtctgtgtgcccatcagcaggttcccatggctgtcactgcccactcatttccacagttagatacggatgtgttgatgtatttcgtctagtttatttggctcagtccacagctgcgttggagtggtgactttggtagcccttgagctctaattaagagagatccaaaccactcagtacccactgggcagtgggaaggcctaccgacttactttatcattgagggcttactgatacaatgaaatgagtttcatgactttttttttttttaaacactttttgaaatagagtgtgctgtgtttaaaaccaaaaatatgcatgttgtctctgaaaagtaggcattgaaacagacttttttgtagtcagtgttaataaaacggatcctgtttgggccttcattgttaaggtggacttcatggccactggaaggtctgttttggtgttacctgagtgtgacacaggccctggggtgtgcgtgtttctctaactgtctacacgtgcacataggcagactttctcatagaatgttcttgaaaggtgattgggcaaagtcatgcaggcccgccttaaagcgctgattagaacagtccaacacagtccgacctcactcaatacccacaaccatcgaaaatggattcttagtaccagacaatcccagtaatgaaggtttagtttccttgaaggaaactacagaaaaggaaagaagcagaatgagaaaggaatggtacttaggtgtttggtatgctgctcacgtgaagtcagcccacaccagccaaaccctcgtggaagatctgctgcaaccattatctttgttcttgagttcatcatgcatttaaaatgagatgcaagagcatttagcataccatgtaaatatggaccttttaaaattaaaatactattggaagtgctttcaactcagccacatcttagctattagttctttgtgttgtcttatcaaagtttaatggatacagttccacagttgttgatgtgtttgtgtgtatattcgatttttataaagatggtagtaagtcaatacatttatcctgatctgtgtattatttgttcacaaattcaagaagcttaaaggtcgtaaatatcagtatctcataaggtaaaccaatagctgattatgttttggttttgtgctgtaatagaagttcacttagctactttagataaccttgcattaccactggtctggccacgtttgttaaatccttatactgatattcttctaaagagtaaatctcatcatttttccagacaaattttgaggggtttctctgttttgtggacaggcagcagcctccgtaggcacccgcaccctgccttgctggaggagatgggatggggcgggaggtggcttcaccataactatttttaatatgggtcattcttagcatgatttgtaaaggtctcaggcaaacagttgttgaagcttgcttctgtggcatttctgaattgtggcagagcttagatcctgcacccaggggtctttttttcaaacagcatcttgctcagttctgtgaacagaaggctttgttactgaaggaggtggaagaggagtttagggtgaaaaggaggaagggatggacagacccaggtgaggagaggcctggggattggggaagctgtcatctcagtgttaataatcaacttgcttctaacacactggcttatcaggggaggtcatccagtccggtcggtggagttgagagcccttgggccagggtgtttggcggcacaggggcatccgctggatggcctggaggagtgggggaggggaacgtcttcactgggtggtgatcagctgggacagttcaggtagggcaggtgagggacccccgaggccctggagccttgtcctgggatgggtttgaagaactcatcactcatcacttgttttcttttggcttttgttgtttttgttttgttctgtttgttttgttttgtatttctttgttattttattgggaaggtaagcggaatgtgctcatagaccatcagacgcttgtcgaaggcaggtcctagtcatgtaattgcacaggacaaggaggtcagcgtgtgtgatggcagcatgctgtgccggcacatcgtggagtcctagaaactctctagtccctgcggctgttcccctcctctgctctctccctggagaggactgccagctcttaagaaacattcctggtgcggtgtctgcagtgccctttgtgggtgacttcaggcttcccgctttcgtggtgctcttcctgggattcgtttttttattaccctccctccctacttgtaggcctcagctatggcttgacgtaatcgcttttagacccaggttggcttcccttcattaagctatgatcctccaccccattttttttttttttaatttggagtgggagggaggggggtgggcgagagaaagctcgaaaggtattattggtttttcaaaaaattagaggtgacgattctaccagggagttgactgataggagtgtgtgcagggcaggaaaggttcggaggcacccgactaccaccactcggaaagccgctagtccagatcgactagggagaggcttagatactttagtgtatttaaagagcatttcagttaactttttcagctatttttaaagtttgtgaatggagtgttattttggacattcttaaatatgaattctccaaaggcatttagccttgacttaatattaaatcctaaggattttatgtaaggtttttttgcaacctatttaattttttttaaatgcctaacttctgaggtgcataagcccgtggtttgtgtactggaactaaagcggaactcactgattcatattggatccccaggtataccttctgctggtagcatatggctggaaaaggccgtttgcctcacacattgtaacctgccttggctagaaaatgcttttaatgtctcaactctctcttttctgtgtcatgttttggtaggaaatctttaagattggcggacggaacaggtattttagtgagacacttctgagtacttgctttttcctttgacttctaaccaactaaaagagaaggaggtcttcatgttgatattttgcttggttttattttactgattttaaaaggtatatagaaaaatgtaggcctttaaaaagaaacagcatgtagttttttattttaatatgttccatagagtggataggcagacaggtactattgtaatgtattctgtatttaataatttaatatactctagaaagtagacctcatgcattcttttagcatgattttcttttaaactgcttttcattttaagggcacccgtggcggaagctggttttgcaaggactgtgtaagctgtatgcgttctagctgtatgcgttctgtagtcttttcttaggtgggtaacattttcaataacgcgcgcacagcacacaggggtgccctgagccgaaggagcaaaaaaagccaccgctcgtttctataatccagctttgcttttcacaggcgtgggatccaggatggtgtcctctgtgaggacttgaactctggggctttaattccactgtttaattttcaggtaccacagcagcaaagcacagagtgtgacctttttcatgtctgagctgattctgtttgctccacgtgcctgcttcttgctactgttcatttagtaatgggatcacctcaccatgccatgctctgggctctccctctctgtccatttctgttttgctttcctggctaaacccatctaccattcttaacactggtagctcctgtcccattccaagactcactctctcagaccttcccatctccctggctttccatgctcctctccctccacctcctggcttcaactgggtgagggccgtattcctgccactctgctccgcctcagccttgagaactccacgtgggctgggtgggaaggtgctgacgattttcacactgtgtttaccactccatcacctctccatcacctctcaacctttgcttcgacaggtcttcactcacgatttattcctccaggtctttgattggagagagtaactttttaattctgttgttttgcagtttggctctgtaggagtgagtggcgattcaaagatgccggcgtcccgcagtgtgcggttcgtgcccttaaccacccgcttctttgtttcccgcccctctgctttcgcaggagctcttgtgcttgagttcagtgttagtggtagcgtggctcactccacttggaggtggcggccgtctgaccgtgtgttactgctttgccgacggggcctcccggccctgatgcgtgtacactctgcgggctgcaccgggtggctctggttgggggcgaagctgtgttgactgggagagcgttggaaattgagacatggagagatgacgggagtgcgtttctctgggtttgatctccatcctgttttctcccagacacaccacacctaccttgggggaatgccgttgcctgttccacccctttgttcacttcgcgttaactgctgtggtaactttttcaggatctgtgtgaagaatggtaatgacgtagttgaaaggaaaatgtactgttgtgtgtttcatttgtgtgatttcgtaccaaaaaaatgtgtttgaactatattgtatgtaatttggaagtcgtgttaataaaaccctgcagtttcca

SEQ ID NO: 296402 - DNA, 6951 bp, Homo sapiens
cccggggaatctgcctttttatatgatgcgtttttattaaacaggacccaccgggctcttttagtttcctcccaccttggtaggttgattgccgatgtgcagggttagtgtcgatcgtttctttaaattttcacaggcatatgatagatttgtcccacataaatgtggccctgatcgtggagtgagtcctaacaagagagcctgaccttaggctgtacacacactgtggaatttcttcaagggagctgccggccggcgcagaacccccaggagcacaggtctctccgggccgctgtcctgcgtaactgttctccagagcgccagccagccacgggcctgattccagaggagccgaactgacaggacacagcaggctggagttggtgttagattgcttcacattctgttgtcaccaccaagaactccaagtttttcgttttgttttgttttcaaagtgcttacaatgcatgtagacattgttctttgtggtctgactctatgatcgatcacagtgacttagattcaggaaagaacattaacgtcacaagttctaagtagttttcacagcaaagaatatttgataatggttgcacttatcttcagtgcaggttagaagagtcttctcaaccaagcttaactcgagttgtcttctcagccctcaaaaggctcttgtacaaaatgtagattaaaatttgggtgattgttgattgacctttgcataccctggaaagccagggtgtgagtggggtggttgggagtggtgccagttgaacagcagattctgcttcttgtcactgtttcaaaagcgtcaactctgtgttcctagtttcgatgaactccccattcatttttaacacacttcccagataaggcaatgtgctggacaggcacacggcatggccctcggctagagcagggtctgtgatggcctcacctggcagccctctggcctagttcccaccacacatgaggtggtggaatggcctgaaggtggaacagacctgtttttttcctttttaaatgcagtaaggtggcctgtttatcactggctctgtgatacatgacattctttgggaatttggtggccactgcttcagtcacctctgtttttctgaaggctgttccagcagggctgccctgttcatcagcggatgttcactctggcctgccgttccccgtggcatgcggggtgagggtggctttcttccagccccaaatgagacgagtctgtgtcatcattgaaactgcttttcgtaattgcgggtaggttcctgtaggtgagacatattctccataaagctactgtagtagaattcattctgggcaaacactgaaaaaagtgccttacagtatttctgctcatgaaagagtttcactattttggatatattctaaagtggacctgagctatttgagcaaataatgatagggcatactcagacattttagctaccttttatacctacgatttcatgtcacatttactaatagaattaagggaaatagaagcccgttctttcttactgcccctggagggagcatggcgctagggctctcagcctcctagaaggaagggactaaggagacgggcacagacttgcgtcatctcgtttccacagttgacgttttatattactttctcaaattaagttaccaaaacaaactgaagagctgaagcaggtcttccagaccctgcgatcctttctgtagcagtgattctaaagtggcgtttgctgtgtgcttgagagtaacactgcacgctgcaggggctgttgcagcagtcagtcccaggaagccacagcgcttgtaggatctgctaggaccctgcagctgtgctgccgccacctctgctccagagtgtcccagccaaccctcggaagatgggattgccagtcagccctgcctcaccatgcctgcaggaggctgtccagggagcaggtctgtgtgcccatcagcaggttcccatggctgtcactgcccactcatttccacagttagatacggatgtgttgatgtatttcgtctagtttatttggctcagtccacagctgcgttggagtggtgactttggtagcccttgagctctaattaagagagatccaaaccactcagtacccactgggcagtgggaaggcctaccgacttactttatcattgagggcttactgatacaatgaaatgagtttcatgactttttttttttttaaacactttttgaaatagagtgtgctgtgtttaaaaccaaaaatatgcatgttgtctctgaaaagtaggcattgaaacagacttttttgtagtcagtgttaataaaacggatcctgtttgggccttcattgttaaggtggacttcatggccactggaaggtctgttttggtgttacctgagtgtgacacaggccctggggtgtgcgtgtttctctaactgtctacacgtgcacataggcagactttctcatagaatgttcttgaaaggtgattgggcaaagtcatgcaggcccgccttaaagcgctgattagaacagtccaacacagtccgacctcactcaatacccacaaccatcgaaaatggattcttagtaccagacaatcccagtaatgaaggtttagtttccttgaaggaaactacagaaaaggaaagaagcagaatgagaaaggaatggtacttaggtgtttggtatgctgctcacgtgaagtcagcccacaccagccaaaccctcgtggaagatctgctgcaaccattatctttgttcttgagttcatcatgcatttaaaatgagatgcaagagcatttagcataccatgtaaatatggaccttttaaaattaaaatactattggaagtgctttcaactcagccacatcttagctattagttctttgtgttgtcttatcaaagtttaatggatacagttccacagttgttgatgtgtttgtgtgtatattcgatttttataaagatggtagtaagtcaatacatttatcctgatctgtgtattatttgttcacaaattcaagaagcttaaaggtcgtaaatatcagtatctcataaggtaaaccaatagctgattatgtggagccaagttacttcttttctttttgcattatcttgttttggttttgtgctgtaatagaagttcacttagctactttagataaccttgcattaccactggtctggccacgtttgttaaatccttatactgatattcttctaaagagtaaatctcatcatttttccagacaaattttgaggggtttctctgttttgtggacaggcagcagcctccgtaggcacccgcaccctgccttgctggaggagatgggatggggcgggaggtggcttcaccataactatttttaatatgggtcattcttagcatgatttgtaaaggtctcaggcaaacagttgttgaagcttgcttctgtggcatttctgaattgtggcagagcttagatcctgcacccaggggtctttttttcaaacagcatcttgctcagttctgtgaacagaaggctttgttactgaaggaggtggaagaggagtttagggtgaaaaggaggaagggatggacagacccaggtgaggagaggcctggggattggggaagctgtcatctcagtgttaataatcaacttgcttctaacacactggcttatcaggggaggtcatccagtccggtcggtggagttgagagcccttgggccagggtgtttggcggcacaggggcatccgctggatggcctggaggagtgggggaggggaacgtcttcactgggtggtgatcagctgggacagttcaggtagggcaggtgagggacccccgaggccctggagccttgtcctgggatgggtttgaagaactcatcactcatcacttgttttcttttggcttttgttgtttttgttttgttctgtttgttttgttttgtatttctttgttattttattgggaaggtaagcggaatgtgctcatagaccatcagacgcttgtcgaaggcaggtcctagtcatgtaattgcacaggacaaggaggtcagcgtgtgtgatggcagcatgctgtgccggcacatcgtggagtcctagaaactctctagtccctgcggctgttcccctcctctgctctctccctggagaggactgccagctcttaagaaacattcctggtgcggtgtctgcagtgccctttgtgggtgacttcaggcttcccgctttcgtggtgctcttcctgggattcgtttttttattaccctccctccctacttgtaggcctcagctatggcttgacgtaatcgcttttagacccaggttggcttcccttcattaagctatgatcctccaccccattttttttttttttaatttggagtgggagggaggggggtgggcgagagaaagctcgaaaggtattattggtttttcaaaaaattagaggtgacgattctaccagggagttgactgataggagtgtgtgcagggcaggaaaggttcggaggcacccgactaccaccactcggaaagccgctagtccagatcgactagggagaggcttagatactttagtgtatttaaagagcatttcagttaactttttcagctatttttaaagtttgtgaatggagtgttattttggacattcttaaatatgaattctccaaaggcatttagccttgacttaatattaaatcctaaggattttatgtaaggtttttttgcaacctatttaattttttttaaatgcctaacttctgaggtgcataagcccgtggtttgtgtactggaactaaagcggaactcactgattcatattggatccccaggtataccttctgctggtagcatatggctggaaaaggccgtttgcctcacacattgtaacctgccttggctagaaaatgcttttaatgtctcaactctctcttttctgtgtcatgttttggtaggaaatctttaagattggcggacggaacaggtattttagtgagacacttctgagtacttgctttttcctttgacttctaaccaactaaaagagaaggaggtcttcatgttgatattttgcttggttttattttactgattttaaaaggtatatagaaaaatgtaggcctttaaaaagaaacagcatgtagttttttattttaatatgttccatagagtggataggcagacaggtactattgtaatgtattctgtatttaataatttaatatactctagaaagtagacctcatgcattcttttagcatgattttcttttaaactgcttttcattttaagggcacccgtggcggaagctggttttgcaaggactgtgtaagctgtatgcgttctagctgtatgcgttctgtagtcttttcttaggtgggtaacattttcaataacgcgcgcacagcacacaggggtgccctgagccgaaggagcaaaaaaagccaccgctcgtttctataatccagctttgcttttcacaggcgtgggatccaggatggtgtcctctgtgaggacttgaactctggggctttaattccactgtttaattttcaggtaccacagcagcaaagcacagagtgtgacctttttcatgtctgagctgattctgtttgctccacgtgcctgcttcttgctactgttcatttagtaatgggatcacctcaccatgccatgctctgggctctccctctctgtccatttctgttttgctttcctggctaaacccatctaccattcttaacactggtagctcctgtcccattccaagactcactctctcagaccttcccatctccctggctttccatgctcctctccctccacctcctggcttcaactgggtgagggccgtattcctgccactctgctccgcctcagccttgagaactccacgtgggctgggtgggaaggtgctgacgattttcacactgtgtttaccactccatcacctctccatcacctctcaacctttgcttcgacaggtcttcactcacgatttattcctccaggtctttgattggagagagtaactttttaattctgttgttttgcagtttggctctgtaggagtgagtggcgattcaaagatgccggcgtcccgcagtgtgcggttcgtgcccttaaccacccgcttctttgtttcccgcccctctgctttcgcaggagctcttgtgcttgagttcagtgttagtggtagcgtggctcactccacttggaggtggcggccgtctgaccgtgtgttactgctttgccgacggggcctcccggccctgatgcgtgtacactctgcgggctgcaccgggtggctctggttgggggcgaagctgtgttgactgggagagcgttggaaattgagacatggagagatgacgggagtgcgtttctctgggtttgatctccatcctgttttctcccagacacaccacacctaccttgggggaatgccgttgcctgttccacccctttgttcacttcgcgttaactgctgtggtaactttttcaggatctgtgtgaagaatggtaatgacgtagttgaaaggaaaatgtactgttgtgtgtttcatttgtgtgatttcgtaccaaaaaaatgtgtttgaactatattgtatgtaatttggaagtcgtgttaataaaaccctgcagtttccaaaaaaaaaaaaacagcaaaaacaaaaaaagaaaaaaaaaaaaagaaaaaacaacgaaaacaaaaaaaacaaagacaaaaacaaaaaagaaaaaaaagaaaaaaggagaagaacacaacaaaaaaatgacaaagcgagaacaaaataagaagaaagaaaagaaagagagagagagagcagcacagaagaaagaagaaaaaaaaaaaaaaagaggaggagagagagagacaaccagaagagagaaaaaacaaaagcagaagaagacacaagaaaaagaaacaacaagagaggaaggaaaaaaaggaaagacaaaaaa

SEQ ID NO: 296403 - DNA, 4612 bp, Homo sapiens
  misc_feature (27)..(27): n is a, c, g, or t
tctagaggatcccgtaagtgcgagatngtcacgagtggtgactttggtagcccttgagctctaattaagagagatccaaaccactcagtacccactgggcagtgggaaggcctaccgacttactttatcattgagggcttactgatacaatgaaatgagtttcatgactttttttttttttaaacactttttgaaatagagtgtgctgtgtttaaaaccaaaaatatgcatgttgtctctgaaaagtaggcattgaaacagacttttttgtagtcagtgttaataaaacggatcctgtttgggccttcattgttaaggtggacttcatggccactggaaggtctgttttggtgttacctgagtgtgacacaggccctggggtgtgcgtgtttctctaactgtctacacgtgcacataggcagactttctcatagaatgttcttgaaaggtgattgggcaaagtcatgcaggcccgccttaaagcgctgattagaacagtccaacacagtccgacctcactcaatacccacaaccatcgaaaatggattcttagtaccagacaatcccagtaatgaaggtttagtttccttgaaggaaactacagaaaaggaaagaagcagaatgagaaaggaatggtacttaggtgtttggtatgctgctcacgtgaagtcagcccacaccagccaaaccctcgtggaagatctgctgcaaccattatctttgttcttgagttcatcatgcatttaaaatgagatgcaagagcatttagcataccatgtaaatatggaccttttaaaattaaaatactattggaagtgctttcaactcagccacatcttagctattagttctttgtgttgtcttatcaaagtttaatggatacagttccacagttgttgatgtgtttgtgtgtatattcgatttttataaagatggtagtaagtcaatacatttatcctgatctgtgtattatttgttcacaaattcaagaagcttaaaggtcgtaaatatcagtatctcataaggtaaaccaatagctgattatgtggagccaagttacttcttttctttttgcattatcttgttttggttttgtgctgtaatagaagttcacttagctactttagataaccttgcattaccactggtctggccacgtttgttaaatccttatactgatattcttctaaagagtaaatctcatcatttttccagacaaattttgaggggtttctctgttttgtggacaggcagcagcctccgtaggcacccgcaccctgccttgctggaggagatgggatggggcgggaggtggcttcaccataactatttttaatatgggtcattcttagcatgatttgtaaaggtctcaggcaaacagttgttgaagcttgcttctgtggcatttctgaattgtggcagagcttagatcctgcacccaggggtctttttttcaaacagcatcttgctcagttctgtgaacagaaggctttgttactgaaggaggtggaagaggagtttagggtgaaaaggaggaagggatggacagacccaggtgaggagaggcctggggattggggaagctgtcatctcagtgttaataatcaacttgcttctaacacactggcttatcaggggaggtcatccagtccggtcggtggagttgagagcccttgggccagggtgtttggcggcacaggggcatccgctggatggcctggaggagtgggggaggggaacgtcttcactgggtggtgatcagctgggacagttcaggtagggcaggtgagggacccccgaggccctggagccttgtcctgggatgggtttgaagaactcatcactcatcacttgttttcttttggcttttgttgtttttgttttgttctgtttgttttgttttgtatttctttgttattttattgggaaggtaagcggaatgtgctcatagaccatcagacgcttgtcgaaggcaggtcctagtcatgtaattgcacaggacaaggaggtcagcgtgtgtgatggcagcatgctgtgccggcacatcgtggagtcctagaaactctctagtccctgcggctgttcccctcctctgctctctccctggagaggactgccagctcttaagaaacattcctggtgcggtgtctgcagtgccctttgtgggtgacttcaggcttcccgctttcgtggtgctcttcctgggattcgtttttttattaccctccctccctacttgtaggcctcagctatggcttgacgtaatcgcttttagacccaggttggcttcccttcattaagctatgatcctccaccccattttttttttttttaatttggagtgggagggaggggggtgggcgagagaaagctcgaaaggtattattggtttttcaaaaaattagaggtgacgattctaccagggagttgactgataggagtgtgtgcagggcaggaaaggttcggaggcacccgactaccaccactcggaaagccgctagtccagatcgactagggagaggcttagatactttagtgtatttaaagagcatttcagttaactttttcagctatttttaaagtttgtgaatggagtgttattttggacattcttaaatatgaattctccaaaggcatttagccttgacttaatattaaatcctaaggattttatgtaaggtttttttgcaacctatttaattttttttaaatgcctaacttctgaggtgcataagcccgtggtttgtgtactggaactaaagcggaactcactgattcatattggatccccaggtataccttctgctggtagcatatggctggaaaaggccgtttgcctcacacattgtaacctgccttggctagaaaatgcttttaatgtctcaactctctcttttctgtgtcatgttttggtaggaaatctttaagattggcggacggaacaggtattttagtgagacacttctgagtacttgctttttcctttgacttctaaccaactaaaagagaaggaggtcttcatgttgatattttgcttggttttattttactgattttaaaaggtatatagaaaaatgtaggcctttaaaaagaaacagcatgtagttttttattttaatatgttccatagagtggataggcagacaggtactattgtaatgtattctgtatttaataatttaatatactctagaaagtagacctcatgcattcttttagcatgattttcttttaaactgcttttcattttaagggcacccgtggcggaagctggttttgcaaggactgtgtaagctgtatgcgttctagctgtatgcgttctgtagtcttttcttaggtgggtaacattttcaataacgcgcgcacagcacacaggggtgccctgagccgaaggagcaaaaaaagccaccgctcgtttctataatccagctttgcttttcacaggcgtgggatccaggatggtgtcctctgtgaggacttgaactctggggctttaattccactgtttaattttcaggtaccacagcagcaaagcacagagtgtgacctttttcatgtctgagctgattctgtttgctccacgtgcctgcttcttgctactgttcatttagtaatgggatcacctcaccatgccatgctctgggctctccctctctgtccatttctgttttgctttcctggctaaacccatctaccattcttaacactggtagctcctgtcccattccaagactcactctctcagaccttcccatctccctggctttccatgctcctctccctccacctcctggcttcaactgggtgagggccgtattcctgccactctgctccgcctcagccttgagaactccacgtgggctgggtgggaaggtgctgacgattttcacactgtgtttaccactccatcacctctccatcacctctcaacctttgcttcgacaggtcttcactcacgatttattcctccaggtctttgattggagagagtaactttttaattctgttgttttgcagtttggctctgtaggagtgagtggcgattcaaagatgccggcgtcccgcagtgtgcggttcgtgcccttaaccacccgcttctttgtttcccgcccctctgctttcgcaggagctcttgtgcttgagttcagtgttagtggtagcgtggctcactccacttggaggtggcggccgtctgaccgtgtgttactgctttgccgacggggcctcccggccctgatgcgtgtacactctgcgggctgcaccgggtggctctggttgggggcgaagctgtgttgactgggagagcgttggaaattgagacatggagagatgacgggagtgcgtttctctgggtttgatctccatcctgttttctcccagacacaccacacctaccttgggggaatgccgttgcctgttccacccctttgttcacttcgcgttaactgctgtggtaactttttcaggatctgtgtgaagaatggtaatgacgtagttgaaaggaaaatgtactgttgtgtgtttcatttgtgtgatttcgtaccaaaaaaatgtgtttgaactatattgtatgtaatttggaagtcgtgttaataaaaccctgcagtttcca

SEQ ID NO: 296404 - DNA, 6582 bp, Homo sapiens
cccggggaatctgcctttttatatgatgcgtttttattaaacaggacccaccgggctcttttagtttcctcccaccttggtaggttgattgccgatgtgcagggttagtgtcgatcgtttctttaaattttcacaggcatatgatagatttgtcccacataaatgtggccctgatcgtggagtgagtcctaacaagagagcctgaccttaggctgtacacacactgtggaatttcttcaagggagctgccggccggcgcagaacccccaggagcacaggtctctccgggccgctgtcctgcgtaactgttctccagagcgccagccagccacgggcctgattccagaggagccgaactgacaggacacagcaggctggagttggtgttagattgcttcacattctgttgtcaccaccaagaactccaagtttttcgttttgttttgttttcaaagtgcttacaatgcatgtagacattgttctttgtggtctgactctatgatcgatcacagtgacttagattcaggaaagaacattaacgtcacaagttctaagtagttttcacagcaaagaatatttgataatggttgcacttatcttcagtgcaggttagaagagtcttctcaaccaagcttaactcgagttgtcttctcagccctcaaaaggctcttgtacaaaatgtagattaaaatttgggtgattgttgattgacctttgcataccctggaaagccagggtgtgagtggggtggttgggagtggtgccagttgaacagcagattctgcttcttgtcactgtttcaaaagcgtcaactctgtgttcctagtttcgatgaactccccattcatttttaacacacttcccagataaggcaatgtgctggacaggcacacggcatggccctcggctagagcagggtctgtgatggcctcacctggcagccctctggcctagttcccaccacacatgaggtggtggaatggcctgaaggtggaacagacctgtttttttcctttttaaatgcagtaaggtggcctgtttatcactggctctgtgatacatgacattctttgggaatttggtggccactgcttcagtcacctctgtttttctgaaggctgttccagcagggctgccctgttcatcagcggatgttcactctggcctgccgttccccgtggcatgcggggtgagggtggctttcttccagccccaaatgagacgagtctgtgtcatcattgaaactgcttttcgtaattgcgggtaggttcctgtaggtgagacatattctccataaagctactgtagtagaattcattctgggcaaacactgaaaaaagtgccttacagtatttctgctcatgaaagagtttcactattttggatatattctaaagtggacctgagctatttgagcaaataatgatagggcatactcagacattttagctaccttttatacctacgatttcatgtcacatttactaatagaattaagggaaatagaagcccgttctttcttactgcccctggagggagcatggcgctagggctctcagcctcctagaaggaagggactaaggagacgggcacagacttgcgtcatctcgtttccacagttgacgttttatattactttctcaaattaagttaccaaaacaaactgaagagctgaagcaggtcttccagaccctgcgatcctttctgtagcagtgattctaaagtggcgtttgctgtgtgcttgagagtaacactgcacgctgcaggggctgttgcagcagtcagtcccaggaagccacagcgcttgtaggatctgctaggaccctgcagctgtgctgccgccacctctgctccagagtgtcccagccaaccctcggaagatgggattgccagtcagccctgcctcaccatgcctgcaggaggctgtccagggagcaggtctgtgtgcccatcagcaggttcccatggctgtcactgcccactcatttccacagttagatacggatgtgttgatgtatttcgtctagtttatttggctcagtccacagctgcgttggagtggtgactttggtagcccttgagctctaattaagagagatccaaaccactcagtacccactgggcagtgggaaggcctaccgacttactttatcattgagggcttactgatacaatgaaatgagtttcatgactttttttttttttaaacactttttgaaatagagtgtgctgtgtttaaaaccaaaaatatgcatgttgtctctgaaaagtaggcattgaaacagacttttttgtagtcagtgttaataaaacggatcctgtttgggccttcattgttaaggtggacttcatggccactggaaggtctgttttggtgttacctgagtgtgacacaggccctggggtgtgcgtgtttctctaactgtctacacgtgcacataggcagactttctcatagaatgttcttgaaaggtgattgggcaaagtcatgcaggcccgccttaaagcgctgattagaacagtccaacacagtccgacctcactcaatacccacaaccatcgaaaatggattcttagtaccagacaatcccagtaatgaaggtttagtttccttgaaggaaactacagctcacgtgaagtcagcccacaccagccaaaccctcgtggaagatctgctgcaaccattatctttgttcttgagttcatcatgcatttaaaatgagatgcaagagcatttagcataccatgtaaatatggaccttttaaaattaaaatactattggaagtgctttcaactcagccacatcttagctattagttctttgtgttgtcttatcaaagtttaatggatacagttccacagttgttgatgtgtttgtgtgtatattcgatttttataaagatggtagtaagtcaatacatttatcctgatctgtgtattatttgttcacaaattcaagaagcttaaaggtcgtaaatatcagtatctcataaggtaaaccaatagctgattatgtggagccaagttacttcttttctttttgcattatcttgttttggttttgtgctgtaatagaagttcacttagctactttagataaccttgcattaccactggtctggccacgtttgttaaatccttatactgatattcttctaaagagtaaatctcatcatttttccagacaaattttgaggggtttctctgttttgtggacaggcagcagcctccgtaggcacccgcaccctgccttgctggaggagatgggatggggcgggaggtggcttcaccataactatttttaatatgggtcattcttagcatgatttgtaaaggtctcaggcaaacagttgttgaagcttgcttctgtggcatttctgaattgtggcagagcttagatcctgcacccaggggtctttttttcaaacagcatcttgctcagttctgtgaacagaaggctttgttactgaaggaggtggaagaggagtttagggtgaaaaggaggaagggatggacagacccaggtgaggagaggcctggggattggggaagctgtcatctcagtgttaataatcaacttgcttctaacacactggcttatcaggggaggtcatccagtccggtcggtggagttgagagcccttgggccagggtgtttggcggcacaggggcatccgctggatggcctggaggagtgggggaggggaacgtcttcactgggtggtgatcagctgggacagttcaggtagggcaggtgagggacccccgaggccctggagccttgtcctgggatgggtttgaagaactcatcactcatcacttgttttcttttggcttttgttgtttttgttttgttctgtttgttttgttttgtatttctttgttattttattgggaaggtaagcggaatgtgctcatagaccatcagacgcttgtcgaaggcaggtcctagtcatgtaattgcacaggacaaggaggtcagcgtgtgtgatggcagcatgctgtgccggcacatcgtggagtcctagaaactctctagtccctgcggctgttcccctcctctgctctctccctggagaggactgccagctcttaagaaacattcctggtgcggtgtctgcagtgccctttgtgggtgacttcaggcttcccgctttcgtggtgctcttcctgggattcgtttttttattaccctccctccctacttgtaggcctcagctatggcttgacgtaatcgcttttagacccaggttggcttcccttcattaagctatgatcctccaccccattttttttttttttaatttggagtgggagggaggggggtgggcgagagaaagctcgaaaggtattattggtttttcaaaaaattagaggtgacgattctaccagggagttgactgataggagtgtgtgcagggcaggaaaggttcggaggcacccgactaccaccactcggaaagccgctagtccagatcgactagggagaggcttagatactttagtgtatttaaagagcatttcagttaactttttcagctatttttaaagtttgtgaatggagtgttattttggacattcttaaatatgaattctccaaaggcatttagccttgacttaatattaaatcctaaggattttatgtaaggtttttttgcaacctatttaattttttttaaatgcctaacttctgaggtgcataagcccgtggtttgtgtactggaactaaagcggaactcactgattcatattggatccccaggtataccttctgctggtagcatatggctggaaaaggccgtttgcctcacacattgtaacctgccttggctagaaaatgcttttaatgtctcaactctctcttttctgtgtcatgttttggtaggaaatctttaagattggcggacggaacaggtattttagtgagacacttctgagtacttgctttttcctttgacttctaaccaactaaaagagaaggaggtcttcatgttgatattttgcttggttttattttactgattttaaaaggtatatagaaaaatgtaggcctttaaaaagaaacagcatgtagttttttattttaatatgttccatagagtggataggcagacaggtactattgtaatgtattctgtatttaataatttaatatactctagaaagtagacctcatgcattcttttagcatgattttcttttaaactgcttttcattttaagggcacccgtggcggaagctggttttgcaaggactgtgtaagctgtatgcgttctagctgtatgcgttctgtagtcttttcttaggtgggtaacattttcaataacgcgcgcacagcacacaggggtgccctgagccgaaggagcaaaaaaagccaccgctcgtttctataatccagctttgcttttcacaggcgtgggatccaggatggtgtcctctgtgaggacttgaactctggggctttaattccactgtttaattttcaggtaccacagcagcaaagcacagagtgtgacctttttcatgtctgagctgattctgtttgctccacgtgcctgcttcttgctactgttcatttagtaatgggatcacctcaccatgccatgctctgggctctccctctctgtccatttctgttttgctttcctggctaaacccatctaccattcttaacactggtagctcctgtcccattccaagactcactctctcagaccttcccatctccctggctttccatgctcctctccctccacctcctggcttcaactgggtgagggccgtattcctgccactctgctccgcctcagccttgagaactccacgtgggctgggtgggaaggtgctgacgattttcacactgtgtttaccactccatcacctctccatcacctctcaacctttgcttcgacaggtcttcactcacgatttattcctccaggtctttgattggagagagtaactttttaattctgttgttttgcagtttggctctgtaggagtgagtggcgattcaaagatgccggcgtcccgcagtgtgcggttcgtgcccttaaccacccgcttctttgtttcccgcccctctgctttcgcaggagctcttgtgcttgagttcagtgttagtggtagcgtggctcactccacttggaggtggcggccgtctgaccgtgtgttactgctttgccgacggggcctcccggccctgatgcgtgtacactctgcgggctgcaccgggtggctctggttgggggcgaagctgtgttgactgggagagcgttggaaattgagacatggagagatgacgggagtgcgtttctctgggtttgatctccatcctgttttctcccagacacaccacacctaccttgggggaatgccgttgcctgttccacccctttgttcacttcgcgttaactgctgtggtaactttttcaggatctgtgtgaagaatggtaatgacgtagttgaaaggaaaatgtactgttgtgtgtttcatttgtgtgatttcgtaccaaaaaaatgtgtttgaactatattgtatgtaatttggaagtcgtgttaataaaaccctgcagtttcca

SEQ ID NO: 296405 - DNA, 6127 bp, Homo sapiens
cccggggaatctgcctttttatatgatgcgtttttattaaacaggacccaccgggctcttttagtttcctcccaccttggtaggttgattgccgatgtgcagggttagtgtcgatcgtttctttaaattttcacaggcatatgatagatttgtcccacataaatgtggccctgatcgtggagtgagtcctaacaagagagcctgaccttaggctgtacacacactgtggaatttcttcaagggagctgccggccggcgcagaacccccaggagcacaggtctctccgggccgctgtcctgcgtaactgttctccagagcgccagccagccacgggcctgattccagaggagccgaactgacaggacacagcaggctggagttggtgttagattgcttcacattctgttgtcaccaccaagaactccaagtttttcgttttgttttgttttcaaagtgcttacaatgcatgtagacattgttctttgtggtctgactctatgatcgatcacagtgacttagattcaggaaagaacattaacgtcacaagttctaagtagttttcacagcaaagaatatttgataatggttgcacttatcttcagtgcaggttagaagagtcttctcaaccaagcttaactcgagttgtcttctcagccctcaaaaggctcttgtacaaaatgtagattaaaatttgggtgattgttgattgacctttgcataccctggaaagccagggtgtgagtggggtggttgggagtggtgccagttgaacagcagattctgcttcttgtcactgtttcaaaagcgtcaactctgtgttcctagtttcgatgaactccccattcatttttaacacacttcccagataaggcaatgtgctggacaggcacacggcatggccctcggctagagcagggtctgtgatggcctcacctggcagccctctggcctagttcccaccacacatgaggtggtggaatggcctgaaggtggaacagacctgtttttttcctttttaaatgcagtaaggtggcctgtttatcactggctctgtgatacatgacattctttgggaatttggtggccactgcttcagtcacctctgtttttctgaaggctgttccagcagggctgccctgttcatcagcggatgttcactctggcctgccgttccccgtggcatgcggggtgagggtggctttcttccagccccaaatgagacgagtctgtgtcatcattgaaactgcttttcgtaattgcgggtaggttcctgtaggtgagacatattctccataaagctactgtagtagaattcattctgggcaaacactgaaaaaagtgccttacagtatttctgctcatgaaagagtttcactattttggatatattctaaagtggacctgagctatttgagcaaataatgatagggcatactcagacattttagctaccttttatacctacgatttcatgtcacatttactaatagaattaagggaaatagaagcccgttctttcttactgcccctggagggagcatggcgctagggctctcagcctcctagaaggaagggactaaggagacgggcacagacttgcgtcatctcgtttccacagttgacgttttatattactttctcaaattaagttaccaaaacaaactgaagagctgaagcaggtcttccagaccctgcgatcctttctgtagcagtgattctaaagtggcgtttgctgtgtgcttgagagtaacactgcacgctgcaggggctgttgcagcagtcagtcccaggaagccacagcgcttgtaggatctgctaggaccctgcagctgtgctgccgccacctctgctccagagtgtcccagccaaccctcggaagatgggattgccagtcagccctgcctcaccatgcctgcaggaggctgtccagggagcaggtctgtgtgcccatcagcaggttcccatggctgtcactgcccactcatttccacagttagatacggatgtgttgatgtatttcgtctagtttatttggctcagtccacagctgcgttggagtggtgactttggtagcccttgagctctaattaagagagatccaaaccactcagtacccactgggcagtgggaaggcctaccgacttactttatcattgagggcttactgatacaatgaaatgagtttcatgactttttttttttttaaacactttttgaaatagagtgtgctgtgtttaaaaccaaaaatatgcatgttgtctctgaaaagtaggcattgaaacagacttttttgtagtcagtgttaataaaacggatcctgtttgggccttcattgttaaggtggacttcatggccactggaaggtctgttttggtgttacctgagtgtgacacaggccctggggtgtgcgtgtttctctaactgtctacacgtgcacataggcagactttctcatagaatgttcttgaaaggtgattgggcaaagtcatgcaggcccgccttaaagcgctgattagaacagtccaacacagtccgacctcactcaatacccacaaccatcgaaaatggattcttagtaccagacaatcccagtaatgaaggtttagtttccttgaaggaaactacagaaaaggaaagaagcagaatgagaaaggaatggtacttaggtgtttggtatgctgctcacgtgaagtcagcccacaccagccaaaccctcgtggaagatctgctgcaaccattatctttgttcttgagttcatcatgcatttaaaatgagatgcaagagcatttagcataccatgtaaatatggaccttttaaaattaaaatactattggaagtgctttcaactcagccacatcttagctattagttctttgtgttgtcttatcaaagtttaatggatacagttccacagttgttgatgtgtttgtgtgtatattcgatttttataaagatggtagtaagtcaatacatttatcctgatctgtgtattatttgttcacaaattcaagaagcttaaaggtcgtaaatatcagtatctcataaggtaaaccaatagctgattatgtggagccaagttacttcttttctttttgcattatcttgttttggttttgtgctgtaatagaagttcacttagctactttagataaccttgcattaccactggtctggccacgtttgttaaatccttatactgatattcttctaaagagtaaatctcatcatttttccagacaaattttgaggggtttctctgttttgtggacaggcagcagcctccgtaggcacccgcaccctgccttgctggaggagatgggatggggcgggaggtggcttcaccataactatttttaatatgggtcattcttagcatgatttgtaaaggtctcaggcaaacagttgttgaagcttgcttctgtggcatttctgaattgtggcagagcttagatcctgcacccaggggtctttttttcaaacagcatcttgctcagttctgtgaacagaaggctttgttactgaaggaggtggaagaggagtttagggtgaaaaggaggaagggatggacagacccaggtgaggagaggcctggggattggggaagctgtcatctcagtgttaataatcaacttgcttctaacacactggcttatcaggggaggtcatccagtccggtcggtggagttgagagcccttgggccagggtgtttggcggcacaggggcatccgctggatggcctggaggagtgggggaggggaacgtcttcactgggtggtgatcagctgggacagttcaggtagggcaggtgagggacccccgaggccctggagccttgtcctgggatgggtttgaagaactcatcactcatcacttgttttcttttggcttttgttgtttttgttttgttctgtttgttttgttttgtatttctttgttattttattgggaaggtaagcggaatgtgctcatagaccatcagacgcttgtcgaaggcaggtcctagtcatgtaattgcacaggacaaggaggtcagcgtgtgtgatggcagcatgctgtgccggcacatcgtggagtcctagaaactctctagtccctgcggctgttcccctcctctgctctctccctggagaggactgccagctcttaagaaacattcctggtgcggtgtctgcagtgccctttgtgggtgacttcaggcttcccgctttcgtggtgctcttcctgggattcgtttttttattaccctccctccctacttgtaggcctcagctatggcttgacgtaatcgcttttagacccaggttggcttcccttcattaagctatgatcctccaccccattttttttttttttaatttggagtgggagggaggggggtgggcgagagaaagctcgaaaggtattattggtttttcaaaaaattagaggtgacgattctaccagggagttgactgataggagtgtgtgcagggcaggaaaggttcggaggcacccgactaccaccactcggaaagccgctagtccagatcgactagggagaggcttagatactttagtgtatttaaagagcatttcagttaactttttcagctatttttaaagtttgtgaatggagtgttattttggacattcttaaatatgaattctccaaaggcatttagccttgacttaatattaaatcctaaggattttatgtaaggtttttttgcaacctatttaattttttttaaatgcctaacttctgaggtgcataagcccgtggtttgtgtactggaactaaagcggaactcactgattcatattggatccccaggtataccttctgctggtagcatatggctggaaaaggccgtttgcctcacacattgtaacctgccttggctagaaaatgcttttaatgtctcaactctctcttttctgtgtcatgttttggtaggaaatctttaagattggcggacggaacaggtattttagtgagacacttctgagtacttgctttttcctttgacttctaaccaactaaaagagaaggaggtcttcatgttgatattttgcttggttttattttactgattttaaaaggtatatagaaaaatgtaggcctttaaaaagaaacagcatgtagttttttattttaatatgttccatagagtggataggcagacaggtactattgtaatgtattctgtatttaataatttaatatactctagaaagtagacctcatgcattcttttagcatgattttcttttaaactgcttttcattttaagggcacccgtggcggaagctggttttgcaaggactgtgtaagctgtatgcgttctagctgtatgcgttctgtagtcttttcttaggtgggtaacattttcaataacgcgcgcacagcacacaggggtgccctgagccgaaggagcaaaaaaagccaccgctcgtttctataatccagctttgcttttcacaggcgtgggatccaggatggtgtcctctgtgaggacttgaactctggggctttaattccactgtttaattttcaggtaccacagcagcaaagcacagagtgtgacctttttcatgtctgagctgattctgtttgctccacgtgcctgcttcttgctactgttcatttagtaatgggatcacctcaccatgccatgctctgggctctccctctctgtccatttctgttttgctttcctggctaaacccatctaccattcttaacactggtagctcctgtcccattccaagactcactctctcagaccttcccatctccctggctttccatgctcctctccctccacctcctggcttcaactgggtgagggccgtattcctgccactctgctccgcctcagccttgagaactccacgtgggctgggtgggaaggtgctgacgattttcacactgtgtttaccactccatcacctctccatcacctctcaacctttgcttcgacaggtcttcactcacgatttattcctccaggtctttgattggagagagtaactttttaattctgttgttttgcagtttgtgtgatttcgtaccaaaaaaatgtgtttgaactatattgtatgtaatttggaagtcgtgttaataaaaccctgcagtttcca

SEQ ID NO: 296406 - DNA, 5341 bp, Homo sapiens
cccggggaatctgcctttttatatgatgcgtttttattaaacaggacccaccgggctcttttagtttcctcccaccttggtaggttgattgccgatgtgcagggttagtgtcgatcgtttctttaaattttcacaggcatatgatagatttgtcccacataaatgtggccctgatcgtggagtgagtcctaacaagagagcctgaccttaggctgtacacacactgtggaatttcttcaagggagctgccggccggcgcagaacccccaggagcacaggtctctccgggccgctgtcctgcgtaactgttctccagagcgccagccagccacgggcctgattccagaggagccgaactgacaggacacagcaggctggagttggtgttagattgcttcacattctgttgtcaccaccaagaactccaagtttttcgttttgttttgttttcaaagtgcttacaatgcatgtagacattgttctttgtggtctgactctatgatcgatcacagtgacttagattcaggaaagaacattaacgtcacaagttctaagtagttttcacagcaaagaatatttgataatggttgcacttatcttcagtgcaggttagaagagtcttctcaaccaagcttaactcgagttgtcttctcagccctcaaaaggctcttgtacaaaatgtagattaaaatttgggtgattgttgattgacctttgcataccctggaaagccagggtgtgagtggggtggttgggagtggtgccagttgaacagcagattctgcttcttgtcactgtttcaaaagcgtcaactctgtgttcctagtttcgatgaactccccattcatttttaacacacttcccagataaggcaatgtgctggacaggcacacggcatggccctcggctagagcagggtctgtgatggcctcacctggcagccctctggcctagttcccaccacacatgaggtggtggaatggcctgaaggtggaacagacctgtttttttcctttttaaatgcagtaaggtggcctgtttatcactggctctgtgatacatgacattctttgggaatttggtggccactgcttcagtcacctctgtttttctgaaggctgttccagcagggctgccctgttcatcagcggatgttcactctggcctgccgttccccgtggcatgcggggtgagggtggctttcttccagccccaaatgagacgagtctgtgtcatcattgaaactgcttttcgtaattgcgggtaggttcctgtaggtgagacatattctccataaagctactgtagtagaattcattctgggcaaacactgaaaaaagtgccttacagtatttctgctcatgaaagagtttcactattttggatatattctaaagtggacctgagctatttgagcaaataatgatagggcatactcagacattttagctaccttttatacctacgatttcatgtcacatttactaatagaattaagggaaatagaagcccgttctttcttactgcccctggagggagcatggcgctagggctctcagcctcctagaaggaagggactaaggagacgggcacagacttgcgtcatctcgtttccacagttgacgttttatattactttctcaaattaagttaccaaaacaaactgaagagctgaagcaggtcttccagaccctgcgatcctttctgtagcagtgattctaaagtggcgtttgctgtgtgcttgagagtaacactgcacgctgcaggggctgttgcagcagtcagtcccaggaagccacagcgcttgtaggatctgctaggaccctgcagctgtgctgccgccacctctgctccagagtgtcccagccaaccctcggaagatgggattgccagtcagccctgcctcaccatgcctgcaggaggctgtccagggagcaggtctgtgtgcccatcagcaggttcccatggctgtcactgcccactcatttccacagttagatacggatgtgttgatgtatttcgtctagtttatttggctcagtccacagctgcgttggagtggtgactttggtagcccttgagctctaattaagagagatccaaaccactcagtacccactgggcagtgggaaggcctaccgacttactttatcattgagggcttactgatacaatgaaatgagtttcatgactttttttttttttaaacactttttgaaatagagtgtgctgtgtttaaaaccaaaaatatgcatgttgtctctgaaaagtaggcattgaaacagacttttttgtagtcagtgttaataaaacggatcctgtttgggccttcattgttaaggtggacttcatggccactggaaggtctgttttggtgttacctgagtgtgacacaggccctggggtgtgcgtgtttctctaactgtctacacgtgcacataggcagactttctcatagaatgttcttgaaaggtgattgggcaaagtcatgcaggcccgccttaaagcgctgattagaacagtccaacacagtccgacctcactcaatacccacaaccatcgaaaatggattcttagtaccagacaatcccagtaatgaaggtttagtttccttgaaggaaactacagaaaaggaaagaagcagaatgagaaaggaatggtacttaggtgtttggtatgctgctcacgtgaagtcagcccacaccagccaaaccctcgtggaagatctgctgcaaccattatctttgttcttgagttcatcatgcatttaaaatgagatgcaagagcatttagcataccatgtaaatatggaccttttaaaattaaaatactattggaagtgctttcaactcagccacatcttagctattagttctttgtgttgtcttatcaaagtttaatggatacagttccacagttgttgatgtgtttgtgtgtatattcgatttttataaagatggtagtaagtcaatacatttatcctgatctgtgtattatttgttcacaaattcaagaagcttaaaggtcgtaaatatcagtatctcataaggtaaaccaatagctgattatgtggagccaagttacttcttttctttttgcattatcttgttttggttttgtgctgtaatagaagttcacttagctactttagataaccttgcattaccactggtctggccacgtttgttaaatccttatactgatattcttctaaagagtaaatctcatcatttttccagacaaattttgaggggtttctctgttttgtggacaggcagcagcctccgtaggcacccgcaccctgccttgctggaggagatgggatggggcgggaggtggcttcaccataactatttttaatatgggtcattcttagcatgatttgtaaaggtctcaggcaaacagttgttgaagcttgcttctgtggcatttctgaattgtggcagagcttagatcctgcacccaggggtctttttttcaaacagcatcttgctcagttctgtgaacagaaggctttgttactgaaggaggtggaagaggagtttagggtgaaaaggaggaagggatggacagacccaggtgaggagaggcctggggattggggaagctgtcatctcagtgttaataatcaacttgcttctaacacactggcttatcaggggaggtcatccagtccggtcggtggagttgagagcccttgggccagggtgtttggcggcacaggggcatccgctggatggcctggaggagtgggggaggggaacgtcttcactgggtggtgatcagctgggacagttcaggtagggcaggtgagggacccccgaggccctggagccttgtcctgggatgggtttgaagaactcatcactcatcacttgttttcttttggcttttgttgtttttgttttgttctgtttgttttgttttgtatttctttgttattttattgggaaggtaagcggaatgtgctcatagaccatcagacgcttgtcgaaggcaggtcctagtcatgtaattgcacaggacaaggaggtcagcgtgtgtgatggcagcatgctgtgccggcacatcgtggagtcctagaaactctctagtccctgcggctgttcccctcctctgctctctccctggagaggactgccagctcttaagaaacattcctggtgcggtgtctgcagtgccctttgtgggtgacttcaggcttcccgctttcgtggtgctcttcctgggattcgtttttttattaccctccctccctacttgtaggcctcagctatggcttgacgtaatcgcttttagacccaggttggcttcccttcattaagctatgatcctccaccccattttttttttttttaatttggagtgggagggaggggggtgggcgagagaaagctcgaaaggtattattggtttttcaaaaaattagaggtgacgattctaccagggagttgactgataggagtgtgtgcagggcaggaaaggttcggaggcacccgactaccaccactcggaaagccgctagtccagatcgactagggagaggcttagatactttagtgtatttaaagagcatttcagttaactttttcagctatttttaaagtttgtgaatggagtgttattttggacattcttaaatatgaattctccaaaggcatttagccttgacttaatattaaatcctaaggattttatgtaaggtttttttgcaacctatttaattttttttaaatgcctaacttctgaggtgcataagcccgtggtttgtgtactggaactaaagcggaactcactgattcatattggatccccaggtataccttctgctggtagcatatggctggaaaaggccgtttgcctcacacattgtaacctgccttggctagaaaatgcttttaatgtctcaactctctcttttctgtgtcatgttttggtaggaaatctttaagattggcggacggaacaggtattttagtgagacacttctgagtacttgctttttcctttgacttctaaccaactaaaagagaaggaggtcttcatgttgatattttgcttggttttattttactgattttaaaaggtatatagaaaaatgtaggcctttaaaaagaaacagcatgtagttttttattttaatatgttccacccctttgttcacttcgcgttaactgctgtggtaactttttcaggatctgtgtgaagaatggtaatgacgtagttgaaaggaaaatgtactgttgtgtgtttcatttgtgtgatttcgtaccaaaaaaatgtgtttgaactatattgtatgtaatttggaagtcgtgttaataaaaccctgcagtttcca

SEQ ID NO: 296407 - DNA, 571 bp, Homo sapiens
tcgtgcccttaaccacccgcttctttgtttcccgcccctctgctttcgcaggagctcttgtgcttgagttcagtgttagtggtagcgtggctcactccacttggaggtggcggccgtctgaccgtgtgttactgctttgccgacggggcctcccggccctgatgcgtgtacactctgcgggctgcaccgggtggctctggttgggggcgaagctgtgttgactgggagagcgttggaaattgagacatggagagatgacgggagtgcgtttctctgggtttgatctccatcctgttttctcccagacacaccacacctaccttgggggaatgccgttgcctgttccacccctttgttcacttcgcgttaactgctgtggtaactttttcaggatctgtgtgaagaatggtaatgacgtagttgaaaggaaaatgtactgttgtgtgtttcatttgtgtgatttcgtaccaaaaaaatgtgtttgaactatattgtatgtaatttggaagtcgtgttaataaaaccctgcagtttccactctggttccgtagccttcattttgtctgggcgc

SEQ ID NO: 296408 - DNA, 6337 bp, Homo sapiens
  misc_feature (3026)..(3026): n is a, c, g, or t
ggagtacgcgcggctggtgatggaggcgcagccggagtggctgcgcgccgaggtgaagcggctgtcccacgagctggccgagaccacgcgtgagaagatccaggcggccgagtacgggctggcggtgctcgaggagaagcaccagctcaagctgcagttcgaggagctcgaggtggactatgaggctatccgcagcgagatggagcagctcaaggaggcctttggacaagcacacacaaaccacaagaaggtggctgctgacggagagagccgggaggagagcctgatccaggagtcggcctccaaggagcagtactacgtgcggaaggtgctagagctgcagacggagctgaagagttgcgcaatgtcctcaccaacacgcagtcggagaatgagcgcctggcctctgtggcccaggagctgaaggagatcaaccagaatgtggagatccagcgtggccgcctgcgggatgacatcaaggagtacaaattccgggaagctcgtctgctgcaggactactcggagctgcgtctgctaggagaacatcagcctgcagaagcaagtgtctgtgctcagacagaaccaggtggagtttgagggcctcaagcatgagatcaagcgtctggaggaggagaccgagtacctcaacagccagctggaggatgccatccgcctcaaggagatctcagagcggcagctggaggaggcgctggagaccctgaagacggagcgcgaacagaagaacagcctgcgcaaggagctgtcacactacatgagcatcaatgactccttctacaccagccacctgcatgtctcgctggatggcctcaagttcagtgacgatgctgccgagcccaacaacgatgccgaggccctggtcaatggctttgagcacggcggcctggccaagctgccactggacaacaagacctccacgcccaagaaggagggcctcgcaccgccctcccccagcctcgtctccgacctactcagtgagctcaacatctctgagatccagaagctgaagcagcagctgatgcagatggagcgggaaaaggcgggcctgctggcaacgctgcaggacacacagaagcagctggagcacacgcggggctccctgtcagaacagcaggagaaggtgacccgcctcacagagaatctgagtgccctgcggcgcctgcaggccagcaaggagcggcagacagccctggacaacgagaaggaccgtgacagccatgaggatggggactactacgaggtggacatcaacgggcctgagatcttggcctgcaagtaccatgtggctgtggctgaggctggcgagctccgcgagcagctcaaggcactgcgcagcacgcacgaggctcgtgaggcccagcacgccgaggagaagggccgctatgaggctgagggccaggcactcacggagaaggtctccctgctagagaaggccagccgccaggaccgcgagctgctggcccggctggagaaggagctaaagaaggtgagcgacgtcgccggcgagacacagggcagcctgagtgtggcccaggatgagctggtgaccttcagtgaggagctggccaatctctaccaccacgtgtgcatgtgcaacaatgagacacccaaccgtgtcatgctggactactaccgcgagggccagggcggggccggccgcaccagtcccgggggccgcaccagccccgaggcgcgtggccggcgctcacccatcctcctacccaaggggctgctggctcctgaggcgggccgagcagatggtgggacgggggacagcagcccctcgcctggctcctcactgccatcacccctgagtgacccacgccgggagcccatgaacatctacaacctgatcgctatcatccgtgaccagatcaagcacctgcaggcagccgtggaccgcaccacggagctgtcacgccagcgcattgcctctcaggagctgggccccgccgtggacaaggacaaggaagcgcttatggaggagatcctcaagctgaagtcgctgctcagcaccaagcgggagcagatcaccacgctgcgcactgtgctcaaggccaacaagcagacggccgaggtggcccttgccaacctgaagagcaagtatgagaatgagaaggccatggttaccgagaccatgatgaagctgcgcaatgagctcaaggccctcaaggaggacgcagccaccttctcctcgctgcgtgctatgtttgccaccaggtgtgacgagtacattacacagctggatgagatgcagcggcagctggcggctgctgaggacgagaagaagacgctgaactcgctgctgcgcatggccatccagcagaagctggcgctgacccagcggctggagctgctcgagctggaccatgagcagacccggcgtggccgtgccaaagccgccccgaagaccaagccagccacaccgagcgtaagtcacacctgtgcctgtgccagcgacagggccgagggcaccgggctggccaaccaggtgttctgcagcgagaagcacagcatttactgtgattaggggctgtggggcgccgcacgctgcagctaacatctgcttcacctcaactaacccagcagcagcgggacggcggtgctaggtcaatcttaacgtgactaatgcacagagggtaggagtctagccgaggcgccatggggcgttgcatcagcaggacacttgtgagagctttgtgtcgcttctcactcctcaaagccccctcaggagcacccagtcctcagctgctctcttaggtgggggtcagaggtggggatagagctgcacattcttgcagcagatgtgtgatgaaagcatcttctaagccctgcgcacccgtggggaaacccaagggaggagtcctggtcctgctccctcagcacccaaaaggggcagaacctgagttgagacttgcatgttcctcgcatgtgtctaatgtcagcactagaaagcagttttaggaggttccagcctgcagcataggtacgacctcagaggatggctntgcacttggcatagtttcatggaaaggagtacgttgtagtttatgcagtatctgactgcaaatcatattcaggaaagaagtgcagaatttcttccccaagcccagagaagagcagccctgagcccctgtattctgctggccagacacacatggcacagacacagctgaccataacccaggaatccagagctcggtttctcatttctgagatcaggatgcttgtatagtggcctgtgaggtgacagattggcagggcccaaggccccaggttttcatttttcatgagaaaagctttccaagtgcctggccagaccttggtccttagtgcagagcccgtccttttgtacttggggtgaccccagcagccaattatccggccttccatagggggttcagtcccaaagacatggggctttgaaaaccctagcctgaagtctgagccaccaagggcttggctgggttggacacccacaggtgtatccagagcccagcccggtgctgggaaagctttgcatagggccagggccacttgtcaggattcacaggtaggagatgtttaggtctctttatttagtgcaatctgggggatggcaacagagaaagaggaaaggtagctgtagggttctcccatttccagaggctccatccacacctgccttcccacattctgagcagaacttttctcagtacttttttcccgatcaccctgtgggaccagctggacctgaggctgcagtcttctctcctgcaggctgcttgccttgtctctcatgcggaagaggcattcgagttacctggtgagagaccgtgttgccccctcccacagctctctgccctgcgcgttcttccctttggtgccgagtatgtttcggtcccctccagactccaggacacgcccatgtatgtcccctgcgtgttcatcctgggcccagatccccctgccccagcaagactcgcagtgggatggctgctggcatgcccaccctgcatgcgctttgccctctccttgcaagcctggcatatagcttctctccatactcctaagggactttgcagacacccaagccactgggacccctgctaacacatgcaggtcttctcttctgccaactaacgtgctcgcgccctcccagcacgtggagagcttcaattgtcagataaacaggaagcgacagatgaccgctttctaacgctctcttttctcccgttttcagctgtagagtagctgccaggaggacttggccacccggccctgtcacactgcagccccttccccttccctctcgtggcccacaaggaggaaggaagggcaacctaaaagcccacttagaaactttttggatatgccactgcaattcttttcaaaatagcattccccaggtttttaatgggaggaaaaaaagctttaatgttgagcatgctgcgagctgctgcgtggaaaggcctctgtatgggccgaagacccttcttccctggctgccaggctcgccaggagcccactggaaacgcccaccacgggggctccttgttacacatgttctttttttatccgatcaacctgtgcacttttgatattttgatattatatttgcttccttaattcctcgcgtagagacggtctcaggtgccgtggtctatgctcgtggtcctgtagctgtccgcctcagctcccaccgtgtttgtctggtgtcagcacgaggcagagctgtgtgctccatagcgtgtagctttagactcggagatgagtgctttgacccagcgaggagctcagctaagtgtatccacgctgtggttcagcagcctttagatcatacggcattgtggttcatgtttgaaattacagattttaaatgccatgttcattaagaaatccagggtattcagattctggggtttttcatattgtattattattattcttaggaatagttcaatgtaacaagaagaaaacttgacctttgctctggttaaaacagtaataggcacttgaaaaaaaaagataaattattgaatgagtagtattacctacaaattccagaattttctgggttttaggacgttgtgaagcatgactgattaacagaattttatacaactgtaccaataaaattccaaattggaattgttttgttactctggttgttgtgccaaattgtggtacacttagaaaattctacagtcgtcgatttttagggtgttctctttcaacacctttttgttagtaatcattgccagtagtgccttcatcagttaagggaggtgtcccagcacagatcattctcaaaagcgagcagggaagagctagtgggcatgctgaaggccagcgtggacagcaggtgaggcaggtgctcctcacacccagacctgggcatcttcattgagggaaagaaaacagtcattgtgcaaaattctgttagtcagtgattctttacttgcaaattcaggggcttagaaaatgaaagcaaacacaaaaccttgagtgtgctttgggaaccaaatggaccttctgggacaagctgagcaagctgtatgaacgccacgtttgtgaagagctgagggtatcaggagggccgacgctgtgttggcatgcgcagtaggggatgagggttagccatagtattctttgcaaatgtgaaagcgagacattatatcttctcttgcttggtgtaactaatcactgttaatttcaggaaacagaactcattaaaactccttagcaaaccaggtctacatcctgttttgtttgctgagtgaggttagtgggagtggtcaaattggtactcttggaggaagaaaaactgtccttccttctccaaaaaaggaaaaattataataatataaatgacaaaaataaaagaattctgtttcctggaataagcatttcttattcctagttgtagggactcctatttttaccttccgttacagtgttgattcataagaaatattgttacatttgagataacttcatctgtatggggtatttatttgcaatgatgtctgagtactgtattttttctgtgcattaccttagtgtcagaatgttggtctttattttaaagtcatatgcatgttctcctgccaaggaacctttacacagacccaaacaaaaaaataataatcaaatgccttcaatttctgagaaaatgaggcagagcatggaaaaggaataggaaggagaaattaattgagattttcaggacacagacatatgatgtgaatgcctacaaagccagtgcgcataggaacagtgggcctgggtaaagagtcacattggtaggaccaataaagaataataaaaagacaaagca

SEQ ID NO: 296409 - DNA, 770 bp, Homo sapiens
gttggtctttattttaaagtcatatgcatgttctcctgccaaggaacctttacacagaaaaaatacagtactcagatattctttgcaaatgtgaaagcgagacattatatcttctcttgcttggtgtaactaatcactgttaatttcaggaaacagaactcattaaaactccttagcaaaccaggtctacatcctgttttgtttgctgagtgaggttagtgggagtggtcaaattggtactcttggaggaagaaaaactgtccttccttctccaaaaaaggaaaaattataataatataaatgacaaaaataaaagaattctgtttcctggaataagcatttcttattcctagttgtagggactcctatttttaccttccgttacagtgttgattcataagaaatattgttacatttgagataacttcatctgtatggggtatttatttgcaatgatgtctgagtactgtattttttctgtgcattaccttagtgtcagaatgttggtctttattttaaagtcatatgcatgttctcctgccaaggaacctttacacagacccaaacaaaaaaataataatcaaatgccttcaatttctgagaaaatgaggcagagcatggaaaaggaataggaaggagaaattaattgagattttcaggacacagacatatgatgtgaatgcctacaaagccagtgcgcataggaacagtgggcctgggtaaagagtcacattggtaggaccaataaagaataataaaaagacaaagca

SEQ ID NO: 296410 - DNA, 2661 bp, Homo sapiens
gaaaaaaaaaaaaaaaattggacagataggccgtggtgtaactaggagaggcaccatctggaccatgactggacctgaggctgcagtcttctctcctgcaggctgcttgccttgtctctcatgcggaagaggcattcgagttacctggtgagagaccgtgttgccccctcccacagctctctgccctgcgcgttcttccctttggtgccgagtatgtttcggtcccctccagactccaggacacgcccatgtatgtcccctgcgtgttcatcctgggcccagatccccctgccccagcaagactcgcagtgggatggctgctggcatgcccaccctgcatgcgctttgccctctccttgcaagcctggcatatagcttctctccatactcctaagggactttgcagacacccaagccactgggacccctgctaacacatgcaggtcttctcttctgccaactaacgtgctcgcgccctcccagcacgtggagagcttcaattgtcagataaacaggaagcgacagatgaccgctttctaacgctctcttttctcccgttttcagctgtagagtagctgccaggaggacttggccacccggccctgtcacactgcagccccttccccttccctctcgtggcccacaaggaggaaggaagggcaacctaaaagcccacttagaaactttttggatatgccactgcaattcttttcaaaatagcattccccaggtttttaatgggaggaaaaaaagctttaatgttgagcatgctgcgagctgctgcgtggaaaggcctctgtatgggccgaagacccttcttccctggctgccaggctcgccaggagcccactggaaacgcccaccacgggggctccttgttacacatgttctttttttatccgatcaacctgtgcacttttgatattttgatattatatttgcttccttaattcctcgcgtagagacggtctcaggtgccgtggtctatgctcgtggtcctgtagctgtccgcctcagctcccaccgtgtttgtctggtgtcagcacgaggcagagctgtgtgctccatagcgtgtagctttagactcggagatgagtgctttgacccagcgaggagctcagctaagtgtatccacgctgtggttcagcagcctttagatcatacggcattgtggttcatgtttgaaattacagattttaaatgccatgttcattaagaaatccagggtattcagattctggggtttttcatattgtattattattattcttaggaatagttcaatgtaacaagaagaaaacttgacctttgctctggttaaaacagtaataggcacttgaaaaaaaaagataaattattgaatgagtagtattacctacaaattccagaattttctgggttttaggacgttgtgaagcatgactgattaacagaattttatacaactgtaccaataaaattccaaattggaattgttttgttactctggttgttgtgccaaattgtggtacacttagaaaattctacagtcgtcgatttttagggtgttctctttcaacacctttttgttagtaatcattgccagtagtgccttcatcagttaagggaggtgtcccagcacagatcattctcaaaagcgagcagggaagagctagtgggcatgctgaaggccagcgtggacagcaggtgaggcaggtgctcctcacacccagacctgggcatcttcattgagggaaagaaaacagtcattgtgcaaaattctgttagtcagtgattctttacttgcaaattcaggggcttagaaaatgaaagcaaacacaaaaccttgagtgtgctttgggaaccaaatggaccttctgggacaagctgagcaagctgtatgaacgccacgtttgtgaagagctgagggtatcaggagggccgacgctgtgttggcatgcgcagtaggggatgagggttagccatagtattctttgcaaatgtgaaagcgagacattatatcttctcttgcttggtgtaactaatcactgttaatttcaggaaacagaactcattaaaactccttagcaaaccaggtctacatcctgttttgtttgctgagtgaggttagtgggagtggtcaaattggtactcttggaggaagaaaaactgtccttccttctccaaaaaaggaaaaattataataatataaatgacaaaaataaaagaattctgtttcctggaataagcatttcttattcctagttgtagggactcctatttttaccttccgttacagtgttgattcataagaaatattgttacatttgagataacttcatctgtatggggtatttatttgcaatgatgtctgagtactgtattttttctgtgcattaccttagtgtcagaatgttggtctttattttaaagtcatatgcatgttctcctgccaaggaacctttacacagacccaaacaaaaaaataataatcaaatgccttcaatttctgagaaaatgaggcagagcatggaaaaggaataggaaggagaaattaattgagattttcaggacacagacatatgatgtgaatgcctacaaagccagtgcgcataggaacagtgggcctgggtaaagagtcacattggtaggaccaataaagaataataaaaagacaaagca

SEQ ID NO: 296411 - DNA, 4355 bp, Homo sapiens
ctcctcagcagacgcagctcaaggaggcctttggacaagcacacacaaaccacaagaaggtggctgctgacggagagagccgggaggagagcctgatccaggagtcggcctccaaggagcagtactacgtgcggaaggtgctagagctgcagacggagctgaagagttgcgcaatgtcctcaccaacacgcagtcggagaatgagcgcctggcctctgtggcccaggagctgaaggagatcaaccagaatgtggagatccagcgtggccgcctgcgggatgacatcaaggagtacaaattccgggaagctcgtctgctgcaggactactcggagctgcgtctgctaggagaacatcagcctgcagaagcaagtgtctgtgctcagacagaaccaggtggagtttgagggcctcaagcatgagatcaagcgtctggaggaggagaccgagtacctcaacagccagctggaggatgccatccgcctcaaggagatctcagagcggcagctggaggaggcgctggagaccctgaagacggagcgcgaacagaagaacagcctgcgcaaggagctgtcacactacatgagcatcaatgactccttctacaccagccacctgcatgtctcgctggatggcctcaagttcagtgacgatgctgccgagcccaacaacgatgccgaggccctggtcaatggctttgagcacggcggcctggccaagctgccactggacaacaagacctccacgcccaagaaggagggcctcgcaccgccctcccccagcctcgtctccgacctactcagtgagctcaacatctctgagatccagaagctgaagcagcagctgatgcagatggagcgggaaaaggcgggcctgctggcaacgctgcaggacacacagaagcagctggagcacacgcggggctccctgtcagaacagcaggagaaggtgacccgcctcacagagaatctgagtgccctgcggcgcctgcaggccagcaaggagcggcagacagccctggacaacgagaaggaccgtgacagccatgaggatggggactactacgaggtggacatcaacgggcctgagatcttggcctgcaagtaccatgtggctgtggctgaggctggcgagctccgcgagcagctcaaggcactgcgcagcacgcacgaggctcgtgaggcccagcacgccgaggagaagggccgctatgaggctgagggccaggcactcacggagaaggtctccctgctagagaaggccagccgccaggaccgcgagctgctggcccggctggagaaggagctaaagaaggtgagcgacgtcgccggcgagacacagggcagcctgagtgtggcccaggatgagctggtgaccttcagtgaggagctggccaatctctaccaccacgtgtgcatgtgcaacaatgagacacccaaccgtgtcatgctggactactaccgcgagggccagggcggggccggccgcaccagtcccgggggccgcaccagccccgaggcgcgtggccggcgctcacccatcctcctacccaaggggctgctggctcctgaggcgggccgagcagatggtgggacgggggacagcagcccctcgcctggctcctcactgccatcacccctgagtgacccacgccgggagcccatgaacatctacaacctgatcgctatcatccgtgaccagatcaagcacctgcaggcagccgtggaccgcaccacggagctgtcacgccagcgcattgcctctcaggagctgggccccgccgtggacaaggacaaggaagcgcttatggaggagatcctcaagctgaagtcgctgctcagcaccaagcgggagcagatcaccacgctgcgcactgtgctcaaggccaacaagcagacggccgaggtggcccttgccaacctgaagagcaagtatgagaatgagaaggccatggttaccgagaccatgatgaagctgcgcaatgagctcaaggccctcaaggaggacgcagccaccttctcctcgctgcgtgctatgtttgccaccaggtgtgacgagtacattacacagctggatgagatgcagcggcagctggcggctgctgaggacgagaagaagacgctgaactcgctgctgcgcatggccatccagcagaagctggcgctgacccagcggctggagctgctcgagctggaccatgagcagacccggcgtggccgtgccaaagccgccccgaagaccaagccagccacaccgagcctgtagagtagctgccaggaggacttggccacccggccctgtcacactgcagccccttccccttccctctcgtggcccacaaggaggaaggaagggcaacctaaaagcccacttagaaactttttggatatgccactgcaattcttttcaaaatagcattccccaggtttttaatgggaggaaaaaaagctttaatgttgagcatgctgcgagctgctgcgtggaaaggcctctgtatgggccgaagacccttcttccctggctgccaggctcgccaggagcccactggaaacgcccaccacgggggctccttgttacacatgttctttttttatccgatcaacctgtgcacttttgatattttgatattatatttgcttccttaattcctcgcgtagagacggtctcaggtgccgtggtctatgctcgtggtcctgtagctgtccgcctcagctcccaccgtgtttgtctggtgtcagcacgaggcagagctgtgtgctccatagcgtgtagctttagactcggagatgagtgctttgacccagcgaggagctcagctaagtgtatccacgctgtggttcagcagcctttagatcatacggcattgtggttcatgtttgaaattacagattttaaatgccatgttcattaagaaatccagggtattcagattctggggtttttcatattgtattattattattcttaggaatagttcaatgtaacaagaagaaaacttgacctttgctctggttaaaacagtaataggcacttgaaaaaaaaagataaattattgaatgagtagtattacctacaaattccagaattttctgggttttaggacgttgtgaagcatgactgattaacagaattttatacaactgtaccaataaaattccaaattggaattgttttgttactctggttgttgtgccaaattgtggtacacttagaaaattctacagtcgtcgatttttagggtgttctctttcaacacctttttgttagtaatcattgccagtagtgccttcatcagttaagggaggtgtcccagcacagatcattctcaaaagcgagcagggaagagctagtgggcatgctgaaggccagcgtggacagcaggtgaggcaggtgctcctcacacccagacctgggcatcttcattgagggaaagaaaacagtcattgtgcaaaattctgttagtcagtgattctttacttgcaaattcaggggcttagaaaatgaaagcaaacacaaaaccttgagtgtgctttgggaaccaaatggaccttctgggacaagctgagcaagctgtatgaacgccacgtttgtgaagagctgagggtatcaggagggccgacgctgtgttggcatgcgcagtaggggatgagggttagccatagtattctttgcaaatgtgaaagcgagacattatatcttctcttgcttggtgtaactaatcactgttaatttcaggaaacagaactcattaaaactccttagcaaaccaggtctacatcctgttttgtttgctgagtgaggttagtgggagtggtcaaattggtactcttggaggaagaaaaactgtccttccttctccaaaaaaggaaaaattataataatataaatgacaaaaataaaagaattctgtttcctggaataagcatttcttattcctagttgtagggactcctatttttaccttccgttacagtgttgattcataagaaatattgttacatttgagataacttcatctgtatggggtatttatttgcaatgatgtctgagtactgtattttttctgtgcattaccttagtgtcagaatgttggtctttattttaaagtcatatgcatgttctcctgccaaggaacctttacacagacccaaacaaaaaaataataatcaaatgccttcaatttctgagaaaatgaggcagagcatggaaaaggaataggaaggagaaattaattgagattttcaggacacagacatatgatgtgaatgcctacaaagccagtgcgcataggaacagtgggcctgggtaaagagtcacattggtaggaccaataaagaataataaaaagacaaagca

SEQ ID NO: 296412 - DNA, 4274 bp, Homo sapiens
ctcctcagcagacgcagctcaaggaggcctttggacaagcacacacaaaccacaagaaggtggctgctgacggagagagccgggaggagagcctgatccaggagtcggcctccaaggagcagtactacgtgcggaaggtgctagagctgcagacggagctgaagagttgcgcaatgtcctcaccaacacgcagtcggagaatgagcgcctggcctctgtggcccaggagctgaaggagatcaaccagaatgtggagatccagcgtggccgcctgcgggatgacatcaaggagtacaaattccgggaagctcgtctgctgcaggactactcggagctgcgtctgctaggagaacatcagcctgcagaagcaagtgtctgtgctcagacagaaccaggtggagtttgagggcctcaagcatgagatcaagcgtctggaggaggagaccgagtacctcaacagccagctggaggatgccatccgcctcaaggagatctcagagcggcagctggaggaggcgctggagaccctgaagacggagcgcgaacagaagaacagcctgcgcaaggagctgtcacactacatgagcatcaatgactccttctacaccagccacctgcatgtctcgctggatggcctcaagttcagtgacgatgctgccgagcccaacaacgatgccgaggccctggtcaatggctttgagcacggcggcctggccaagctgccactggacaacaagacctccacgcccaagaaggagggcctcgcaccgccctcccccagcctcgtctccgacctactcagtgagctcaacatctctgagatccagaagctgaagcagcagctgatgcagatggagcgggaaaaggcgggcctgctggcaacgctgcaggacacacagaagcagctggagcacacgcggggctccctgtcagaacagcaggagaaggtgacccgcctcacagagaatctgagtgccctgcggcgcctgcaggccagcaaggagcggcagacagccctggacaacgagaaggaccgtgacagccatgaggatggggactactacgaggtggacatcaacgggcctgagatcttggcctgcaagtaccatgtggctgtggctgaggctggcgagctccgcgagcagctcaaggcactgcgcagcacgcacgaggctcgtgaggcccagcacgccgaggagaagggccgctatgaggctgagggccaggcactcacggagaaggtctccctgctagagaaggccagccgccaggaccgcgagctgctggcccggctggagaaggagctaaagaaggtgagcgacgtcgccggcgagacacagggcagcctgagtgtggcccaggatgagctggtgaccttcagtgaggagctggccaatctctaccaccacgtgtgcatgtgcaacaatgagacacccaaccgtgtcatgctggactactaccgcgagggccagggcggggccggccgcaccagtcccgggggccgcaccagccccgaggcgcgtggccggcgctcacccatcctcctacccaaggggctgctggctcctgaggcgggccgagcagatggtgggacgggggacagcagcccctcgcctggctcctcactgccatcacccctgagtgacccacgccgggagcccatgaacatctacaacctgatcgctatcatccgtgaccagatcaagcacctgcaggcagccgtggaccgcaccacggagctgtcacgccagcgcattgcctctcaggagctgggccccgccgtggacaaggacaaggaagcgcttatggaggagatcctcaagctgaagtcgctgctcagcaccaagcgggagcagatcaccacgctgcgcactgtgctcaaggccaacaagcagacggccgaggtggcccttgccaacctgaagagcaagtatgagaatgagaaggccatggttaccgagaccatgatgaagctgcgcaatgagctcaaggccctcaaggaggacgcagccaccttctcctcgctgcgtgctatgtttgccaccaggtgtgacgagtacattacacagctggatgagatgcagcggcagctggcggctgctgaggacgagaagaagacgctgaactcgctgctgcgcatggccatccagcagaagctggcgctgacccagcggctggagctgctcgagctggaccatgagcagacccggcgtggccgtgccaaagccgccccgaagaccaagccagccacaccgagcctgtagagtagctgccaggaggacttggccacccggccctgtcacactgcagccccttccccttccctctcgtggcccacaaggaggaaggaagggcaacctaaaagcccacttagaaactttttggatatgccactgcaattcttttcaaaatagcattccccaggtttttaatgggaggaaaaaaagctttaatgttgagcatgctgcgagctgctgcgtggaaaggcctctgtatgggccgaagacccttcttccctggctgccaggctcgccaggagcccactggaaacgcccaccacgggggctccttgttacacatgttctttttttatccgatcaacctgtgcacttttgatattttgatattatatttgcttccttaattcctcgcgtagagacggtctcaggtgccgtggtctatgctcgtggtcctgtagctgtccgcctcagctcccaccgtgtttgtctggtgtcagcacgaggcagagctgtgtgctccatagcgtgtagctttagactcggagatgagtgctttgacccagcgaggagctcagctaagtgtatccacgctgtggttcagcagcctttagatcatacggcattgtggttcatgtttgaaattacagattttaaatgccatgttcattaagaaatccagggtattcagattctggggtttttcatattgtattattattattcttaggaatagttcaatgtaacaagaagaaaacttgacctttgctctggttaaaacagtaataggcacttgaaaaaaaaagataaattattgaatgagtagtattacctacaaattccagaattttctgggttttaggacgttgtgaagcatgactgattaacagaattttatacaactgtaccaataaaattccaaattggaattgttttgttactctggttgttgtgccaaattgtggtacacttagaaaattctacagtcgtcgatttttagggtgttctctttcaacacctttttgttagtaatcattgccagtagtgccttcatcagttaagggaggtgtcccagcacagatcattctcaaaagcgagcagggaagagctagtgggcatgctgaaggccagcgtggacagcaggtgaggcaggtgctcctcacacccagacctgggcatcttcattgagggaaagaaaacagtcattgtgcaaaattctgttagtcagtgattctttacttgcaaattcaggggcttagaaaatgaaagcaaacacaaaaccttgagtgtgctttgggaaccaaatggaccttctgggacaagctgagcaagctgtatgaacgccacgtttgtgaagagctgagggtatcaggagggccgacgctgtgttggcatgcgcagtaggggatgagggttagccatagtattctttgcaaatgtgaaagcgagacattatatcttctcttgcttggtgtaactaatcactgttaatttcaggaaacagaactcattaaaactccttagcaaaccaggtctacatcctgttttgtttgctgagtgaggttagtgggagtggtcaaattggtactcttggaggaagaaaaactgtccttccttctccaaaaaaggaaaaattataataatataaatgacaaaaataaaagaattctgtttcctggaataagcatttcttattcctagttgtagggactcctatttttaccttccgttacagtgttgattcataagaaatattgttacatttgagataacttcatctgtatggggtatttatttgcaatgatgtctgagtactgtattttttctgtgcattaccttagtgtcagaatgttggtctttattttaaagtcatatgcatgttctcctgccaaggaataggaaggagaaattaattgagattttcaggacacagacatatgatgtgaatgcctacaaagccagtgcgcataggaacagtgggcctgggtaaagagtcacattggtaggaccaataaagaataataaaaagacaaagca

SEQ ID NO: 296413 - DNA, 631 bp, Homo sapiens
tcctaccttgccccttcaaagaacactgcggctgttgtcgaccccagcgtctgctgttgaagctgcacacccactctgtgcatgaagctggaactggactctgtttttttgtttgtttgtttgtttttcaagacaggatcttggtctatcactggactggagtgcagtggcatgatcacagctcactgcagcctccacctcctaggctcaagtgatcctcccacctcagcctccccaatagctaaaattccaggtgcatgctgccatgcctggctaatttttattttttttgtgtggagacagggtgtctctgtgttgcctaggttggtcttgaactcctgggctcaagtgatcctcccacctcggtctcccaaagtgttgggagtgcacgtgagccactacagcttgtcttggactccgcttcttgtatatggtcattcaagatgtcctgtcattgaaaagaaagggaatgatgattgaaatatcggtccctcacttaaggatggcaggactgacgaccagcagatctgtcctaattgttgttgctgtgttcagtttatgaactttcactgcacttacacctagatattgcttggaatggttaattggcttcttaggccctggaatttgg

SEQ ID NO: 296414 - DNA, 739 bp, Homo sapiens
gctccgggaaggcgtcaggacccccaggggccccattgcgttgctccgcccagaagtgccaaaggaagcttcgtgccgaattggaaatcaagctattcgatacctaaagttttattggaacacagcaacacccattcctttctgcattgccttgtgctctggggctgcaggtgaagagtagctgccacaaaccacctggcccataaagctcaaaatagttgccatctggccctttacagacagctagctgactcctaatctagggcaaacgcaggtgcctaaaaaggaccagaaaggagaccagaatgaagggcaggggggtggcagggcctgtggcaactggagagtaggcgtcctgtgccacgggaatgttgccaggtccgtttttctagggaaagcagaaatctggatttttatgtggaatctcactgtaggggtggggaaatctcattttaaaaatgtaatcaggccaggcacagtggctcacacctgtaatcccagcgctttgggaggccaagataggaggatgagttgagcccatgagttggagaccagcctgggcaacatagtgagaccccatctctactaaaaagtattaaaaagtagcagggtgaccaggcatggtggctcacacctgtaatcccagcactttgggaggctgaggcaggcagatcacaaggtcaagagatcgagactatcctggcaaacatggtgaaaccctgtctctactaaaaataca

SEQ ID NO: 296415 - DNA, 463 bp, Homo sapiens
gcggccgccaccccggggcgccccctcgggaattccagagcccagcggggtgagggggggctgatccgggacgagtgaggggggtggacagtggattcagctggaactttggcccccgccggccccactaaggaccaacccgaccccctctcccgcagcactacgccccatcggtgttcgagaagtacacggccagcgtgaccgttggcagcaaggaggtgaccctgaacctctacgacacggccggtgagtgcgcctgcgcgccggggggcccgagggtccgcccgcccgaagggtttcccctcccgggcgtcccccactgggtgtccccgccctgcagccttggcagggccttggccggctcttcactcctggaggccgctcaggggcgctggctgcggggccctagaggccaagccctatacgtaagtggaaggtgtttggaggaggaggtgaactctgg

SEQ ID NO: 296416 - DNA, 3337 bp, Homo sapiens
atcaggggcacctggagtcgctgggcagccacgatcgggtctcgccggcgaggggcgcgacgtgacgcgcggagggtggcggtgggttgggggtgggagctttgctcgcagctgagccccgtttttccggtgctgcagtatccctgggactgagagctgaatacccacacccagggctgagaccttagcagaaaggaaactgaggctgggaggtcggccgggaggctgcctggcggaggcggcgctgctccgagtgggcggggctggttccggccccgccccgcccccgacctcttggctccgctagtgcccagcgcgccgccgccagtgctgcgggctccgggcaatggatgcccccggggccctggcccagaccgccgcccccggtccgggcaggaaggagctgaagatcgtgatcgtgggcgacggcggctgcggcaagacctcgctgctcatggtgtacagccagggctccttccccgagcactacgccccatcggtgttcgagaagtacacggccagcgtgaccgttggcagcaaggaggtgaccctgaacctctacgacacggccgggcaagaagactatgaccggctgcggcccctgtcctaccagaacacccacctcgtgctcatctgctatgacgtcatgaatcccaccagctacgacaacgtcctcatcaagtggttccctgaggtcacgcatttctgccgcgggatccccatggtgctcatcggctgcaagacagacctgaggaaggacaaggagcagctgcggaagctccgggccgcccagctggagcccatcacctacatgcagggcctgagcgcctgcgaacagatccgagctgctctctacctggaatgttccgccaagtttcgggagaatgtggaggacgtcttccgggaggccgccaaggtggctctcagcgctctgaagaaggcgcaacggcagaagaagcgccggctctgcctgctgctctgacccagggcagacagacctcacgacagcactgacagggcccgggggcccaggtgccgattgcaccagggaggctgccccatcccgaccctccagctcatggtgtctggggcctgcggctagactcttggaacattctggaactctctcctttcctggctggggctctgaccacaaactcccctccaggctgcccctgggacatggtggtgatgtgggtgcaggagccagtgtctgttgtcgggactcgcaagtgccctcatcacagccacccccaccacgagtgtctccccagtgcagactcaagttatgcttgaaatgaaaaagtctatctggtagtgggtaaacgtagacctggcactgttccacgcgggcgccccaagcctgccactcctgtgtccctgcctccctgggctcccgagataggcaccactgtatcctccagctccttccttccttcccccaggaacacggaggccaccgagggggctgggcctatcaggaggacacaggctgcagcctggcacccacccctcccatctccaccccacatggaagacttgtcttcaacttggccactgtctttgcagagctgggcacatgtgcccagggggcagaaaaaatggcttctcagttgttaaaagtataccctggaccacccatctgaccatctccttaaggtttcacccaaagcccccagtgtcagagacttgggatgggaagaacagtcggctcccagtgtggtcatgagcaagttttctgtggactgttccccccactgtggtaggacaggactggcccacttagtcctcaagctcccaacctgctgtccctcaagccccgcttctaccagcctgtggagttcaggaggcgagacatcctggcctcctttgagaactgatgggatctaccccctgtccacgcgggacagtttctcagaactggttcatagaccacctgtgtcaccaacagccagatacctaatccctgagcctcctttgggaaggtctggggccgagggtctgggaatttttttttttttttttttttgggacagagtctcattctgtcactcaggctagagtgcagtggcatgatcttggctcactgcaagctccacctcctgggttcaagcgattctcttgcctcagcctcctgagtagctgggactacatgcgcacaccaccacgtccggctaatttttgtatttttagtagagacagggtttcaccatgttggccaggctggtcttgaactcctgacctcgtgatccacccgccttagcctcccaaagtgctgggattacaggcgtgagccaccgtgcccggcccaggacttttaaaacaagcatcccaggggattccggtgcctaccagaagtcgcaagctgcttggctctggagggcgcctaggagtcggtgtcgcctaagatgggataatggcttcaggcaactcctagccttccccatatctcctgcctcagcccccctggcccagtgctggggcgtcagctaaacctgagcttccaagaagtcaggttgccaaaggaaggagccttctgagaccctccccaacccacccaggttcccaaggccctgccgtaccctggggaatcaaccaaggagttcttgttctcgaagaaccccaggcctcatgatggtctacggtagaggtccaacaactacagcctgtgggccacatctggccacagcctgatttgtaaataaagttttattggaacacagcaacacccattcctttctgcattgccttgtgctctggggctgcaggtgaagagtagctgccacaaaccacctggcccataaagctcaaaatagttgccatctggccctttacagacagctagctgactcctaatctagggcaaacgcaggtgcctaaaaaggaccagaaaggagaccagaatgaagggcaggggggtggcagggcctgtggcaactggagagtaggcgtcctgtgccacgggaatgttgccaggtccgtttttctagggaaagcagaaatctggatttttatgtggaatctcactgtaggggtggggaaatctcattttaaaaatgtaatcaggccaggcacagtggctcacacctgtaatcccagcgctttgggaggccaagataggaggatgagttgagcccatgagttggagaccagcctgggcaacatagtgagaccccatctctactaaaaagtattaaaaagtagcagggtgaccaggcatggtggctcacacctgtaatcccagcactttgggaggctgaggcaggcagatcacaaggtcaagagatcgagactatcctggcaaacatggtgaaaccctgtctctactaaaaataca

SEQ ID NO: 296417 - DNA, 3322 bp, Homo sapiens
ggcgattgcccggcagagggcgtcagacgtccaccctgcagcccagggtcggggtgcgggtaagcggagcccagtccctcaccccgaacccgcgtgcacgctggcgtccctggcccaggcgagtatccctgggactgagagctgaatacccacacccagggctgagaccttagcagaaaggaaactgaggctgggaggtcggccgggaggctgcctggcggaggcggcgctgctccgagtgggcggggctggttccggccccgccccgcccccgacctcttggctccgctagtgcccagcgcgccgccgccagtgctgcgggctccgggcaatggatgcccccggggccctggcccagaccgccgcccccggtccgggcaggaaggagctgaagatcgtgatcgtgggcgacggcggctgcggcaagacctcgctgctcatggtgtacagccagggctccttccccgagcactacgccccatcggtgttcgagaagtacacggccagcgtgaccgttggcagcaaggaggtgaccctgaacctctacgacacggccgggcaagaagactatgaccggctgcggcccctgtcctaccagaacacccacctcgtgctcatctgctatgacgtcatgaatcccaccagctacgacaacgtcctcatcaagtggttccctgaggtcacgcatttctgccgcgggatccccatggtgctcatcggctgcaagacagacctgaggaaggacaaggagcagctgcggaagctccgggccgcccagctggagcccatcacctacatgcagggcctgagcgcctgcgaacagatccgagctgctctctacctggaatgttccgccaagtttcgggagaatgtggaggacgtcttccgggaggccgccaaggtggctctcagcgctctgaagaaggcgcaacggcagaagaagcgccggctctgcctgctgctctgacccagggcagacagacctcacgacagcactgacagggcccgggggcccaggtgccgattgcaccagggaggctgccccatcccgaccctccagctcatggtgtctggggcctgcggctagactcttggaacattctggaactctctcctttcctggctggggctctgaccacaaactcccctccaggctgcccctgggacatggtggtgatgtgggtgcaggagccagtgtctgttgtcgggactcgcaagtgccctcatcacagccacccccaccacgagtgtctccccagtgcagactcaagttatgcttgaaatgaaaaagtctatctggtagtgggtaaacgtagacctggcactgttccacgcgggcgccccaagcctgccactcctgtgtccctgcctccctgggctcccgagataggcaccactgtatcctccagctccttccttccttcccccaggaacacggaggccaccgagggggctgggcctatcaggaggacacaggctgcagcctggcacccacccctcccatctccaccccacatggaagacttgtcttcaacttggccactgtctttgcagagctgggcacatgtgcccagggggcagaaaaaatggcttctcagttgttaaaagtataccctggaccacccatctgaccatctccttaaggtttcacccaaagcccccagtgtcagagacttgggatgggaagaacagtcggctcccagtgtggtcatgagcaagttttctgtggactgttccccccactgtggtaggacaggactggcccacttagtcctcaagctcccaacctgctgtccctcaagccccgcttctaccagcctgtggagttcaggaggcgagacatcctggcctcctttgagaactgatgggatctaccccctgtccacgcgggacagtttctcagaactggttcatagaccacctgtgtcaccaacagccagatacctaatccctgagcctcctttgggaaggtctggggccgagggtctgggaatttttttttttttttttttttgggacagagtctcattctgtcactcaggctagagtgcagtggcatgatcttggctcactgcaagctccacctcctgggttcaagcgattctcttgcctcagcctcctgagtagctgggactacatgcgcacaccaccacgtccggctaatttttgtatttttagtagagacagggtttcaccatgttggccaggctggtcttgaactcctgacctcgtgatccacccgccttagcctcccaaagtgctgggattacaggcgtgagccaccgtgcccggcccaggacttttaaaacaagcatcccaggggattccggtgcctaccagaagtcgcaagctgcttggctctggagggcgcctaggagtcggtgtcgcctaagatgggataatggcttcaggcaactcctagccttccccatatctcctgcctcagcccccctggcccagtgctggggcgtcagctaaacctgagcttccaagaagtcaggttgccaaaggaaggagccttctgagaccctccccaacccacccaggttcccaaggccctgccgtaccctggggaatcaaccaaggagttcttgttctcgaagaaccccaggcctcatgatggtctacggtagaggtccaacaactacagcctgtgggccacatctggccacagcctgatttgtaaataaagttttattggaacacagcaacacccattcctttctgcattgccttgtgctctggggctgcaggtgaagagtagctgccacaaaccacctggcccataaagctcaaaatagttgccatctggccctttacagacagctagctgactcctaatctagggcaaacgcaggtgcctaaaaaggaccagaaaggagaccagaatgaagggcaggggggtggcagggcctgtggcaactggagagtaggcgtcctgtgccacgggaatgttgccaggtccgtttttctagggaaagcagaaatctggatttttatgtggaatctcactgtaggggtggggaaatctcattttaaaaatgtaatcaggccaggcacagtggctcacacctgtaatcccagcgctttgggaggccaagataggaggatgagttgagcccatgagttggagaccagcctgggcaacatagtgagaccccatctctactaaaaagtattaaaaagtagcagggtgaccaggcatggtggctcacacctgtaatcccagcactttgggaggctgaggcaggcagatcacaaggtcaagagatcgagactatcctggcaaacatggtgaaaccctgtctctactaaaaataca

SEQ ID NO: 296418 - DNA, 3163 bp, Homo sapiens
atcaggggcacctggagtcgctgggcagccacgatcgggtctcgccggcgaggggcgcgacgtgacgcgcggagggtggcggtgggttgggggtgggagctttgctcgcagctgagccccgtttttccggtgctgcagtatccctgggactgagagctgaatacccacacccagggctgagaccttagcagaaaggaaactgaggctgggaggtcggccgggaggctgcctggcggaggcggcgctgctccgagtgggcggggctggttccggccccgccccgcccccgacctcttggctccgctagtgcccagcgcgccgccgccagtgctgcgggctccgggcaatggatgcccccggggccctggcccagaccgccgcccccggtccgggcaggaaggagctgaagatcgtgatcgtgggcgacggcggctgcggcaagacctcgctgctcatggtgtacagccagggctccttccccgagcactacgccccatcggtgttcgagaagtacacggccagcgtgaccgttggcagcaaggaggtgaccctgaacctctacgacacggccgggcaagaagactatgaccggctgcggcccctgtcctaccagaacacccacctcgtgctcatctgctatgacgtcatgaatcccaccagctacgacaacgtcctcatcaagtggttccctgaggtcacgcatttctgccgcgggatccccatggtgctcatcggctgcaagacagacctgaggaaggacaaggagcagctgcggaagctccgggccgcccagctggagcccatcacctacatgcagggcctgagcgcctgcgaacagatccgagctgctctctacctggaatgttccgccaagtttcgggagaatgtggaggacgtcttccgggaggccgccaaggtggctctcagcgctctgaagaaggcgcaacggcagaagaagcgccggctctgcctgctgctctgacccagggcagacagacctcacgacagcactgacagggcccgggggcccaggtgccgattgcaccagggaggctgccccatcccgaccctccagctcatggtgtctggggcctgcggctagactcttggaacattctggaactctctcctttcctggctggggctctgaccacaaactcccctccaggctgcccctgggacatggtggtgatgtgggtgcaggagccagtgtctgttgtcgggactcgcaagtgccctcatcacagccacccccaccacgagtgtctccccagtgcagactcaagttatgcttgaaatgaaaaagtctatctggtagtgggtaaacgtagacctggcactgttccacgcgggcgccccaagcctgccactcctgtgtccctgcctccctgggctcccgagataggcaccactgtatcctccagctccttccttccttcccccaggaacacggaggccaccgagggggctgggcctatcaggaggacacaggctgcagcctggcacccacccctcccatctccaccccacatggaagacttgtcttcaacttggccactgtctttgcagagctgggcacatgtgcccagggggcagaaaaaatggcttctcagttgttaaaagtataccctggaccacccatctgaccatctccttaaggtttcacccaaagcccccagtgtcagagacttgggatgggaagaacagtcggctcccagtgtggtcatgagcaagttttctgtggactgttccccccactgtggtaggacaggactggcccacttagtcctcaagctcccaacctgctgtccctcaagccccgcttctaccagcctgtggagttcaggaggcgagacatcctggcctcctttgagaactgatgggatctaccccctgtccacgcgggacagtttctcagaactggttcatagaccacctgtgtcaccaacagccagatacctaatccctgagcctcctttgggaaggtctggggccgagggtctgggaatttttttttttttttttttttgggacagagtctcattctgtcactcaggctagagtgcagtggcatgatcttggctcactgcaagctccacctcctgggttcaagcgattctcttgcctcagcctcctgagtagctgggactacatgcgcacaccaccacgtccggctaatttttgtatttttagtagagacagggtttcaccatgttggccaggctggtcttgaactcctgacctcgtgatccacccgccttagcctcccaaagtgctgggattacaggcgtgagccaccgtgcccggcccaggacttttaaaacaagcatcccaggggattccggtgcctaccagaagtcgcaagctgcttggctctggagggcgcctaggagtcggtgtcgcctaagatgggataatggcttcaggcaactcctagccttccccatatctcctgcctcagcccccctggcccagtgctggggcgtcagctaaacctgagcttccaagaagtcaggttgccaaaggaaggagccttctgagaccctccccaacccacccaggttcccaaggccctgccgtaccctggggaatcaaccaaggagttcttgttctcgaagaaccccaggcctcatgatggtctacggtagaggtccaacaactacagcctgtgggccacatctggccacagcctgatttgtaaataaagttttattggaacacagcaacacccattcctttctgcattgccttgtgctctggggctgcaggtgaagagtagctgccacaaaccacctggcccataaagctcaaaatagttgccatctggccctttacagacagctagctgactcctaatctagggcaaacgcaggtgcctaaaaaggaccagaaaggagaccagaatgaagggcaggggggtggcagggcctgtggcaactggagagtaggcgtcctgtgccacgggaatgttgccaggtccgtttttctagggaaagcagaaatctggatttttatgtggaatctcactgtaggggtggggaaatctcattttaaaaatgtaatcaggccaggcacagtggctcacacctgtaatcccagcgctttgtagaggcacagcattgcagatcggggtaccggagcatcgaattcggtaactcatggg

SEQ ID NO: 296419 - DNA, 2313 bp, Homo sapiens
atcaggggcacctggagtcgctgggcagccacgatcgggtctcgccggcgaggggcgcgacgtgacgcgcggagggtggcggtgggttgggggtgggagctttgctcgcagctgagccccgtttttccggtgctgcagtatccctgggactgagagctgaatacccacacccagggctgagaccttagcagaaaggaaactgaggctgggaggtcggccgggaggctgcctggcggaggcggcgctgctccgagtgggcggggctggttccggccccgccccgcccccgacctcttggctccgctagtgcccagcgcgccgccgccagtgctgcgggctccgggcaatggatgcccccggggccctggcccagaccgccgcccccggtccgggcaggaaggagctgaagatcgtgatcgtgggcgacggcggctgcggcaagacctcgctgctcatggtgtacagccagggctccttccccgagcactacgccccatcggtgttcgagaagtacacggccagcgtgaccgttggcagcaaggaggtgaccctgaacctctacgacacggccgggcaagaagactatgaccggctgcggcccctgtcctaccagaacacccacctcgtgctcatctgctatgacgtcatgaatcccaccagctacgacaacgtcctcatcaagtggttccctgaggtcacgcatttctgccgcgggatccccatggtgctcatcggctgcaagacagacctgaggaaggacaaggagcagctgcggaagctccgggccgcccagctggagcccatcacctacatgcagggcctgagcgcctgcgaacagatccgagctgctctctacctggaatgttccgccaagtttcgggagaatgtggaggacgtcttccgggaggccgccaaggtggctctcagcgctctgaagaaggcgcaacggcagaagaagcgccggctctgcctgctgctctgacccagggcagacagacctcacgacagcactgacagggcccgggggcccaggtgccgattgcaccagggaggctgccccatcccgaccctccagctcatggtgtctggggcctgcggctagactcttggaacattctggaactctctcctttcctggctggggctctgaccacaaactcccctccaggctgcccctgggacatggtggtgatgtgggtgcaggagccagtgtctgttgtcgggactcgcaagtgccctcatcacagccacccccaccacgagtgtctccccagtgcagactcaagttatgcttgaaatgaaaaagtctatctggtagtgggtaaacgtagacctggcactgttccacgcgggcgccccaagcctgccactcctgtgtccctgcctccctgggctcccgagataggcaccactgtatcctccagctccttccttccttccccctggcccagtgctggggcgtcagctaaacctgagcttccaagaagtcaggttgccaaaggaaggagccttctgagaccctccccaacccacccaggttcccaaggccctgccgtaccctggggaatcaaccaaggagttcttgttctcgaagaaccccaggcctcatgatggtctacggtagaggtccaacaactacagcctgtgggccacatctggccacagcctgatttgtaaataaagttttattggaacacagcaacacccattcctttctgcattgccttgtgctctggggctgcaggtgaagagtagctgccacaaaccacctggcccataaagctcaaaatagttgccatctggccctttacagacagctagctgactcctaatctagggcaaacgcaggtgcctaaaaaggaccagaaaggagaccagaatgaagggcaggggggtggcagggcctgtggcaactggagagtaggcgtcctgtgccacgggaatgttgccaggtccgtttttctagggaaagcagaaatctggatttttatgtggaatctcactgtaggggtggggaaatctcattttaaaaatgtaatcaggccaggcacagtggctcacacctgtaatcccagcgctttgggaggccaagataggaggatgagttgagcccatgagttggagaccagcctgggcaacatagtgagaccccatctctactaaaaagtattaaaaagtagcagggtgaccaggcatggtggctcacacctgtaatcccagcactttgggaggctgaggcaggcagatcacaaggtcaagagatcgagactatcctggcaaacatggtgaaaccctgtctctactaaaaataca

SEQ ID NO: 296420 - DNA, 2392 bp, Homo sapiens
atcaggggcacctggagtcgctgggcagccacgatcgggtctcgccggcgaggggcgcgacgtgacgcgcggagggtggcggtgggttgggggtgggagctttgctcgcagctgagccccgtttttccggtgctgcagtatccctgggactgagagctgaatacccacacccagggctgagaccttagcagaaaggaaactgaggctgggaggtcggccgggaggctgcctggcggaggcggcgctgctccgagtgggcggggctggttccggccccgccccgcccccgacctcttggctccgctagtgcccagcgcgccgccgccagtgctgcgggctccgggcaatggatgcccccggggccctggcccagaccgccgcccccggtccgggcaggaaggagctgaagatcgtgatcgtgggcgacggcggctgcggcaagacctcgctgctcatggtgtacagccagggctccttccccgagcactacgccccatcggtgttcgagaagtacacggccagcgtgaccgttggcagcaaggaggtgaccctgaacctctacgacacggccgggcaagaagactatgaccggctgcggcccctgtcctaccagaacacccacctcgtgctcatctgctatgacgtcatgaatcccaccagctacgacaacgtcctcatcaagtggttccctgaggtcacgcatttctgccgcgggatccccatggtgctcatcggctgcaagacagacctgaggaaggacaaggagcagctgcggaagctccgggccgcccagctggagcccatcacctacatgcagggcctgagcgcctgcgaacagatccgagctgctctctacctggaatgttccgccaagtttcgggagaatgtggaggacgtcttccgggaggccgccaaggtggctctcagcgctctgaagaaggcgcaacggcagaagaagcgccggctctgcctgctgctctgacccagggcagacagacctcacgacagcactgacagggcccgggggcccaggtgccgattgcaccagggaggctgccccatcccgaccctccagctcatggtgtctggggcctgcggctagactcttggaacattctggaactctctcctttcctggctggggctctgaccacaaactcccctccaggctgcccctgggacatggtggtgatgtgggtgcaggagccagtgtctgttgtcgggactcgcaagtgccctcatcacagccacccccaccacgagtgtctccccagtgcagactcaagttatgcttgaaatgaaaaagtctatctggtagtgggtaaacgtagacctggcactgttccacgcgggcgccccaagcctgccactcctgtgtccctgcctccctgggctcccgagataggcaccactgtatcctccagctccttccttccttcccccaggaacacggaggccaccgagggggctgggcctatcaggaggacacaggctgcagcctggcacccacccctcccatctccaccccacatggaagacttgtcttcaacttggccactgtctttgcagagctgggcacatgtgcccagggggcagaaaaaatggcttctcagttgttaaaagtataccctggaccacccatctgaccatctccttaaggtttcacccaaagcccccagtgtcagagacttgggatgggaagaacagtcggctcccagtgtggtcatgagcaagttttctgtggactgttccccccactgtggtaggacaggactggcccacttagtcctcaagctcccaacctgctgtccctcaagccccgcttctaccagcctgtggagttcaggaggcgagacatcctggcctcctttgagaactgatgggatctaccccctgtccacgcgggacagtttctcagaactggttcatagaccacctgtgtcaccaacagccagatacctaatccctgagcctcctttgggaaggtctggggccgagggtctgggaatttttttttttttttttttttttttgtggggaccagggtctctttcgtgtcccccgggcctcaggtggccgggggcttgtattctgggcccccgtggagcccccccccctggggttcccggcgattcttcgttgcctcagcctccgtgagttgcggggcatttctatgcccccaccgtcagcggcgcggccaaattggtggtctgtgcagtaaagcacgggtttccccctgttgtgccggcctgttcttgaacctctgcacctcgtgatcccgccgctttggactccccaagtgcgtggtttcggctttgaccctcgtgcgcgcccggatttaacaggctcccggggtcccgtgccccgaattcagcgtttgctcgggcttgat

SEQ ID NO: 296421 - DNA, 1324 bp, Homo sapiens
atcaggggcacctggagtcgctgggcagccacgatcgggtctcgccggcgaggggcgcgacgtgacgcgcggagggtggcggtgggttgggggtgggagctttgctcgcagctgagccccgtttttccggtgctgcagtatccctgggactgagagctgaatacccacacccagggctgagaccttagcagaaaggaaactgaggctgggaggtcggccgggaggctgcctggcggaggcggcgctgctccgagtgggcggggctggttccggccccgccccgcccccgacctcttggctccgctagtgcccagcgcgccgccgccagtgctgcgggctccgggcaatggatgcccccggggccctggcccagaccgccgcccccggtccgggcaggaaggagctgaagatcgtgatcgtgggcgacggcggctgcggcaagacctcgctgctcatggtgtacagccagggctccttccccgagcactacgccccatcggtgttcgagaagtacacggccagcgtgaccgttggcagcaaggaggtgaccctgaacctctacgacacggccgggcaagaagactatgaccggctgcggcccctgtcctaccagaacacccacctcgtgctcatctgctatgacgtcatgaatcccaccagctacgacaacgtcctcatcaagtggttccctgaggtcacgcatttctgccgcgggatccccatggtgctcatcggctgcaagacagacctgaggaaggacaaggagcagctgcggaagctccgggccgcccagctggagcccatcacctacatgcagggcctgagcgcctgcgaacagatccgagctgctctctacctggaatgttccgccaagtttcgggagaatgtggaggacgtcttccgggaggccgccaaggtggctctcagcgctctgaagaaggcgcaacggcagaagaagcgccggctctgcctgctgctctgacccagggcagacagacctcacgacagcactgacagggcccgggggcccaggtgccgattgcaccagggaggctgccccatcccgaccctccagctcatggtgtctggggcctgcggctagactcttggaacattctggaactctctcctttcctggctggggctctgaccacaaactcccctccaggctgcccctgggacatggtggtgatgtgggtgcaggagccagtgtctgttgtcgggactcgcaagtgccctcatcacagccacccccaccacgagtgtctccccagtgcagactcaagttatgcttgaaatgaaaaagtctatctggtagtgggta

SEQ ID NO: 296422 - DNA, 3011 bp, Homo sapiens
gcggccgccaccccggggcgccccctcgggaattccagagcccagcggggtgagggggggctgatccgggacgagtgaggggggtggacagtggattcagctggaactttggcccccgccggccccactaaggaccaacccgaccccctctcccgcagcactacgccccatcggtgttcgagaagtacacggccagcgtgaccgttggcagcaaggaggtgaccctgaacctctacgacacggccgggcaagaagactatgaccggctgcggcccctgtcctaccagaacacccacctcgtgctcatctgctatgacgtcatgaatcccaccagctacgacaacgtcctcatcaagtggttccctgaggtcacgcatttctgccgcgggatccccatggtgctcatcggctgcaagacagacctgaggaaggacaaggagcagctgcggaagctccgggccgcccagctggagcccatcacctacatgcagggcctgagcgcctgcgaacagatccgagctgctctctacctggaatgttccgccaagtttcgggagaatgtggaggacgtcttccgggaggccgccaaggtggctctcagcgctctgaagaaggcgcaacggcagaagaagcgccggctctgcctgctgctctgacccagggcagacagacctcacgacagcactgacagggcccgggggcccaggtgccgattgcaccagggaggctgccccatcccgaccctccagctcatggtgtctggggcctgcggctagactcttggaacattctggaactctctcctttcctggctggggctctgaccacaaactcccctccaggctgcccctgggacatggtggtgatgtgggtgcaggagccagtgtctgttgtcgggactcgcaagtgccctcatcacagccacccccaccacgagtgtctccccagtgcagactcaagttatgcttgaaatgaaaaagtctatctggtagtgggtaaacgtagacctggcactgttccacgcgggcgccccaagcctgccactcctgtgtccctgcctccctgggctcccgagataggcaccactgtatcctccagctccttccttccttcccccaggaacacggaggccaccgagggggctgggcctatcaggaggacacaggctgcagcctggcacccacccctcccatctccaccccacatggaagacttgtcttcaacttggccactgtctttgcagagctgggcacatgtgcccagggggcagaaaaaatggcttctcagttgttaaaagtataccctggaccacccatctgaccatctccttaaggtttcacccaaagcccccagtgtcagagacttgggatgggaagaacagtcggctcccagtgtggtcatgagcaagttttctgtggactgttccccccactgtggtaggacaggactggcccacttagtcctcaagctcccaacctgctgtccctcaagccccgcttctaccagcctgtggagttcaggaggcgagacatcctggcctcctttgagaactgatgggatctaccccctgtccacgcgggacagtttctcagaactggttcatagaccacctgtgtcaccaacagccagatacctaatccctgagcctcctttgggaaggtctggggccgagggtctgggaatttttttttttttttttttttgggacagagtctcattctgtcactcaggctagagtgcagtggcatgatcttggctcactgcaagctccacctcctgggttcaagcgattctcttgcctcagcctcctgagtagctgggactacatgcgcacaccaccacgtccggctaatttttgtatttttagtagagacagggtttcaccatgttggccaggctggtcttgaactcctgacctcgtgatccacccgccttagcctcccaaagtgctgggattacaggcgtgagccaccgtgcccggcccaggacttttaaaacaagcatcccaggggattccggtgcctaccagaagtcgcaagctgcttggctctggagggcgcctaggagtcggtgtcgcctaagatgggataatggcttcaggcaactcctagccttccccatatctcctgcctcagcccccctggcccagtgctggggcgtcagctaaacctgagcttccaagaagtcaggttgccaaaggaaggagccttctgagaccctccccaacccacccaggttcccaaggccctgccgtaccctggggaatcaaccaaggagttcttgttctcgaagaaccccaggcctcatgatggtctacggtagaggtccaacaactacagcctgtgggccacatctggccacagcctgatttgtaaataaagttttattggaacacagcaacacccattcctttctgcattgccttgtgctctggggctgcaggtgaagagtagctgccacaaaccacctggcccataaagctcaaaatagttgccatctggccctttacagacagctagctgactcctaatctagggcaaacgcaggtgcctaaaaaggaccagaaaggagaccagaatgaagggcaggggggtggcagggcctgtggcaactggagagtaggcgtcctgtgccacgggaatgttgccaggtccgtttttctagggaaagcagaaatctggatttttatgtggaatctcactgtaggggtggggaaatctcattttaaaaatgtaatcaggccaggcacagtggctcacacctgtaatcccagcgctttgggaggccaagataggaggatgagttgagcccatgagttggagaccagcctgggcaacatagtgagaccccatctctactaaaaagtattaaaaagtagcagggtgaccaggcatggtggctcacacctgtaatcccagcactttgggaggctgaggcaggcagatcacaaggtcaagagatcgagactatcctggcaaacatggtgaaaccctgtctctactaaaaataca

SEQ ID NO: 296423 - DNA, 2240 bp, Homo sapiens
cagagcaatgagccaacctcaacaggttctgaaacatgagtcatctactgctaccacaaactcccctccaggctgcccctgggacatggtggtgatgtgggtgcaggagccagtgtctgttgtcgggactcgcaagtgccctcatcacagccacccccaccacgagtgtctccccagtgcagactcaagttatgcttgaaatgaaaaagtctatctggtagtgggtaaacgtagacctggcactgttccacgcgggcgccccaagcctgccactcctgtgtccctgcctccctgggctcccgagataggcaccactgtatcctccagctccttccttccttcccccaggaacacggaggccaccgagggggctgggcctatcaggaggacacaggctgcagcctggcacccacccctcccatctccaccccacatggaagacttgtcttcaacttggccactgtctttgcagagctgggcacatgtgcccagggggcagaaaaaatggcttctcagttgttaaaagtataccctggaccacccatctgaccatctccttaaggtttcacccaaagcccccagtgtcagagacttgggatgggaagaacagtcggctcccagtgtggtcatgagcaagttttctgtggactgttccccccactgtggtaggacaggactggcccacttagtcctcaagctcccaacctgctgtccctcaagccccgcttctaccagcctgtggagttcaggaggcgagacatcctggcctcctttgagaactgatgggatctaccccctgtccacgcgggacagtttctcagaactggttcatagaccacctgtgtcaccaacagccagatacctaatccctgagcctcctttgggaaggtctggggccgagggtctgggaatttttttttttttttttttttgggacagagtctcattctgtcactcaggctagagtgcagtggcatgatcttggctcactgcaagctccacctcctgggttcaagcgattctcttgcctcagcctcctgagtagctgggactacatgcgcacaccaccacgtccggctaatttttgtatttttagtagagacagggtttcaccatgttggccaggctggtcttgaactcctgacctcgtgatccacccgccttagcctcccaaagtgctgggattacaggcgtgagccaccgtgcccggcccaggacttttaaaacaagcatcccaggggattccggtgcctaccagaagtcgcaagctgcttggctctggagggcgcctaggagtcggtgtcgcctaagatgggataatggcttcaggcaactcctagccttccccatatctcctgcctcagcccccctggcccagtgctggggcgtcagctaaacctgagcttccaagaagtcaggttgccaaaggaaggagccttctgagaccctccccaacccacccaggttcccaaggccctgccgtaccctggggaatcaaccaaggagttcttgttctcgaagaaccccaggcctcatgatggtctacggtagaggtccaacaactacagcctgtgggccacatctggccacagcctgatttgtaaataaagttttattggaacacagcaacacccattcctttctgcattgccttgtgctctggggctgcaggtgaagagtagctgccacaaaccacctggcccataaagctcaaaatagttgccatctggccctttacagacagctagctgactcctaatctagggcaaacgcaggtgcctaaaaaggaccagaaaggagaccagaatgaagggcaggggggtggcagggcctgtggcaactggagagtaggcgtcctgtgccacgggaatgttgccaggtccgtttttctagggaaagcagaaatctggatttttatgtggaatctcactgtaggggtggggaaatctcattttaaaaatgtaatcaggccaggcacagtggctcacacctgtaatcccagcgctttgggaggccaagataggaggatgagttgagcccatgagttggagaccagcctgggcaacatagtgagaccccatctctactaaaaagtattaaaaagtagcagggtgaccaggcatggtggctcacacctgtaatcccagcactttgggaggctgaggcaggcagatcacaaggtcaagagatcgagactatcctggcaaacatggtgaaaccctgtctctactaaaaataca

SEQ ID NO: 296424 - DNA, 1038 bp, Homo sapiens
atcaggggcacctggagtcgctgggcagccacgatcgggtctcgccggcgaggggcgcgacgtgacgcgcggagggtggcggtgggttgggggtgggagctttgctcgcagctgagccccgtttttccggtgctgcagtatccctgggactgagagctgaatacccacacccagggctgagaccttagcagaaaggaaactgaggctgggaggtcggccgggaggctgcctggcggaggcggcgctgctccgagtgggcggggctggttccggccccgccccgcccccgacctcttggctccgctagtgcccagcgcgccgccgccagtgctgcgggctccgggcaatggatgcccccggggccctggcccagaccgccgcccccggtccgggcaggaaggagctgaagatcgtgatcgtgggcgacggcggctgcggcaagacctcgctgctcatggtgtacagccagggctccttccccgagcactacgccccatcggtgttcgagaagtacacggccagcgtgaccgttggcagcaaggaggtgaccctgaacctctacgacacggccgggcaagaagactatgaccggctgcggcccctgtcctaccagaacacccacctcgtgctcatctgctatgacgtcatgaatcccaccagctacgacaacgtcctcatcaagtggttccctgaggtcacgcatttctgccgcgggatccccatggtgctcatcggctgcaagacagacctgaggaaggacaaggagcagctgcggaagctccgggccgcccagctggagcccatcacctacatgcaggtgggccggggccaagaccctggggcacagccgtggctgtgaagcctcccggacctttggcctctgcaactggggtgccttagtggcctttcagggagctgagggaagcaagattctaagaataatttttaactattagtattgatggcctgtggacctgagcactttacacgactactcccaatccttaggactcggaggcaggcgctgttcacatcccc

SEQ ID NO: 296425 - DNA, 1636 bp, Homo sapiens
caaattctgtcttcgtgcctttgcgttgtttcggccccacacgaggtctggttcaccccacaaaagtggtccttgcactcactccggttggtgtaaccacttgcaagggcttccccctccggtagacccttcggggcttcttctgtgcgtgatcccccaggggtattctctaacggccttcgttaattgaccagcccgggcgtgtctcttcctttgtgagagcgacaaaattctttcccgttctcggtatatttttgggcggcgccccttttgtagaccgccgttcataggccggatatagagatgtcgctgggttcccacagggggtcccacagggtgttgcccgcgctttgttgcttgtgcacccacttgggattatttcacccccccccggatgatttaggtttctgaaagaaattgttggcgcgattcctgccaatatttcttgggggaaccacacccctttttggcccacattacaatttatcccaaagggtttttttcctcaggagaaatggtgtagttcttcaacatcttgctgaagaagatgtttctatctgcccctttggggcgctgtcccaagggttcaaaaccccttgggtgtccacatgtttggccacggcaatcccaccaatcccgttgtgttcaagaaaggtcaccccaagtttccaatggttcgtcctgccatcgcagctggcgcccttcgttgaattcaatcccttcaaaaatgttggtttttgagaggtcccttcccaaccaagggcccgcaagtgttttttcaagcttcccgaagtttccaggccgcgccctcctttcccgaccgaatggctgtccaagctgccccccctgagagggttgttaatcttctctgttctgaaacaaccggcgtccaccaggttttttgcccttaccaaggtgttggggcccctggtcctcccaacagccggggccacttgggggcccaaaccctggttccccccccttttttttttttttttttttaaagttttattggaacacagcaacacccattcctttctgcattgccttgtgctctggggctgcaggtgaagagtagctgccacaaaccacctggcccataaagctcaaaatagttgccatctggccctttacagacagctagctgactcctaatctagggcaaacgcaggtgcctaaaaaggaccagaaaggagaccagaatgaagggcaggggggtggcagggcctgtggcaactggagagtaggcgtcctgtgccacgggaatgttgccaggtccgtttttctagggaaagcagaaatctggatttttatgtggaatctcactgtaggggtggggaaatctcattttaaaaatgtaatcaggccaggcacagtggctcacacctgtaatcccagcgctttgggaggccaagataggaggatgagttgagcccatgagttggagaccagcctgggcaacatagtgagaccccatctctactaaaaagtattaaaaagtagcagggtgaccaggcatggtggctcacacctgtaatcccagcactttgggaggctgaggcaggcagatcacaaggtcaagagatcgagactatcctggcaaacatggtgaaaccctgtctctactaaaaataca

SEQ ID NO: 296426 - DNA, 700 bp, Homo sapiens
ccaggcgcacttctgcacccaggcgcacttctgcacccaggcgcacttctgcacccaggcgcacttctgcacccaggcgcacttctgcacccaggcgcacttctgcattgccttgtgctctggggctgcaggtgaagagtagctgccacaaaccacctggcccataaagctcaaaatagttgccatctggccctttacagacagctagctgactcctaatctagggcaaacgcaggtgcctaaaaaggaccagaaaggagaccagaatgaagggcaggggggtggcagggcctgtggcaactggagagtaggcgtcctgtgccacgggaatgttgccaggtccgtttttctagggaaagcagaaatctggatttttatgtggaatctcactgtaggggtggggaaatctcattttaaaaatgtaatcaggccaggcacagtggctcacacctgtaatcccagcgctttgggaggccaagataggaggatgagttgagcccatgagttggagaccagcctgggcaacatagtgagaccccatctctactaaaaagtattaaaaagtagcagggtgaccaggcatggtggctcacacctgtaatcccagcactttgggaggctgaggcaggcagatcacaaggtcaagagatcgagactatcctggcaaacatggtgaaaccctgtctctactaaaaataca

SEQ ID NO: 296427 - DNA, 475 bp, Homo sapiens
gaatcccaccagctacgacaacgtcctcatcaaggtgaggccggcctcctgggtggtggccccacatctgggcccggccgcacccctgatcccgcctcctccctccacagtggttccctgaggtcacgcatttctgccgcgggatccccatggtgctcatcggctgcaagacagacctgaggaaggacaaggagcagctgcggaagctccgggccgcccagctggagcccatcacctacatgcaggtgggccggggccaagaccctggggcacagccgtggctgtgaagcctcccggacctttggcctctgcaactggggtgccttagtggcctttcagggagctgagggaagcaagattctaagaataatttttaactattagtattgatggcctgtggacctgagcactttacacgactactcccaatccttaggactcggaggcaggcgctgttcacatcccccagtttaca

SEQ ID NO: 296428 - DNA, 439 bp, Homo sapiens
gcggccgcgggcggctctgaggagcccggagggaaccggcgacgaggggaccatgtaccgggacccggaggcggccagcccaggggcgccctcgcgcgacgtcctgctggtctctgccatcatcaccgtcagccttagcgtcactgtcgtcctctgcggcctctgccactggtgtcagcgcaaactgggcaaacgctacaagaattccttggagacggtgggcacgccagactcagggcgtgggcgcagtgagaagaaggctatcaatgatctagacagagacttttggaataacaatgagagcacagtgcagcagaaatggagctcctaccctcccaaggagtttattctaaacatttcaccctacgccccttatggcgacccacgactgtccctcaatggcaccctcctgtcgggcgccaaagtggccgccgcggcg

SEQ ID NO: 296429 - DNA, 4576 bp, Homo sapiens
gcggccgcgggcggctctgaggagcccggagggaaccggcgacgaggggaccatgtaccgggacccggaggcggccagcccaggggcgccctcgcgcgacgtcctgctggtctctgccatcatcaccgtcagccttagcgtcactgtcgtcctctgcggcctctgccactggtgtcagcgcaaactgggcaaacgctacaagaattccttggagacggtgggcacgccagactcagggcgtgggcgcagtgagaagaaggctatcaagttgcctgcaggagggaaggcggtgaacacagcccccgtgccaggccagacaccccacgatgagtccgaccgccggaccgagccacgttcctccgtctcagacctcgtcaactccctcaccagcgagatgctcatgctctccccaggctccgaggaggatgaggcccacgagggttgcagccgagagaacctgggccggatccagttcagtgtcggctacaacttccaggagtccacgctcaccgtgaagatcatgaaggcccaggagctgccggccaaggacttcagcggcaccagcgaccccttcgtcaaagatctacctgctgcccgacaagaagcacaagctggagaccaaggtgaagcggaagaacctgaacccccactggaacgagaccttcctctttgaaggttttccctatgagaaggtggtgcagaggatcctctacctccaagtcctggactatgaccgcttcagccgcaacgaccccattggggaggtgtccatcccccttaacaaggtggacctgacccagatgcagaccttctggaaggatctgaagccatgcagcgatgggagtgggagccgaggggagctgctcttgtctctctgctacaacccctctgccaactccatcatcgtgaacatcatcaaagcccggaacctcaaagccatggacatcgggggcacatcagacccctacgtgaaggtatggctgatgtacaaggacaagcgggtggagaagaagaagacggtgacgatgaagaggaacctgaaccccatcttcaatgagtccttcgccttcgatatccccacggagaagctgagggagacgaccatcatcatcactgtcatggacaaggacaagctcagccgcaatgacgtcatcggcaagatctacctgtcctggaagagcgggccaggggaggtgaagcactggaaggacatgattgcccgtccccggcagcccgtggcccagtggcaccagctgaaggcctgagtggggccaagggaggcccagggggccgagggcccaggtccccatcatgccctcaccactttatgcacaacgcccggcctgagccccctgccatagggaggggaggaccctgagggctcagccagggaggggtcccaggactcaactgggccccgtttctaggaagtaccagccccatcccccacagtccagctccggggaaggggctctgggaggcattttcctgctttgccccttttcttcctgacttactaatactaaagaagttgggggagctcgagagccagacggccagacaggcagacccctccagaggcccgccaggtgggcatggtcccccattttctttaaggcagcacctggagtggagagaggccactccctctccagcccccgatgtggacccggggaggggaggctgaggcgtttggccccggcctggccaggagaggcccatccccagggcagtttcaggtgccggctgggccctgaatgtcgaggatagtatatagcccgctcctgggtcctggagctgtggccctttgtactcgtgttgtgtccattgtgtgtgtgcgtggggacagaggcctggaaatgcggaggactatacagagaaggcaggttttgtgaaggccaggcagggttggaggccgggggtgtgagaggagaggcccatagggctgagtggggtcgggtgaggcagaggtcagaaacagaagagctgcagttgctggagctgggctgagaactgggctgcctcctgccatccccccgtctcctccccttctccccttggtgcccccctctgctcagaatctgaagtagttccctcctcagcaatttcatctcttgaacactgactcacaccttttaggcacctactgtgtgcatagcattccaccaggactcatctcccttccttctcagggggtcccgagccccgactagctttgccctaactccttcatcaaaagaccccccgccagcttcccacacctcatacgcagccacatctgccctattctccatgctttccagcttgcctgcccttcctcatctctccctgcctgtgcagacctccacccttctttcctccacccctccatcccccaatgcttgtagaccttccattcattccgtctcatcgtgcgtggtctctgatcgtccatcacctgaccttctccaggactgtcttctcacccttccccactccctggtccccgggagcagctccttctgcccgactcactcacagtgcagggaaaggaggcagggaaaagaccaggattctgtgagttctgaggttgccacacacaaagaagctgtggtttctctgcctcggccactgatgagactaaaactggcttccccttggagacggcagatttcaggctgatccctgcttaagccctctcatccccacgctggtcctggtattgatacaagacccagctggtgacaaagcctccaatcctgggggtccacgagcctgggcctgacattcccagaactaccgccagtggcgccaggcccccacagtctgtggccgtggtcttagcccccagttccactctggatgggcctgtgacaccccaaagagaagaaggggactctggatagggtccccacatccagggcgtggggagaccattggcatttgggaaccattttccttcgaacggcttccccttgagctgagcattctgcttgctgcagtagacgggtcgccttttgcccataccgaaattttctgaaattaaatcgcacacccccaccatttcctctccctgggatctggaggaacatcatacatagtaggtgaatcgttttgtagagtgaagaatgctaatgtaaagcaaatagtcacccacgttccttgtaaatccaaatgtttctatattgtagctttgcttaaaatggggtcggccccaactgcatcctcctctttggcgggctggggagcggcccccagccgggacgggagggcagcgaccccgaggcctcgtggacgtgggagagagtgtggtgggaagtcttgagcggaggaggggatctgcccttctccactcctctcttggatccgcctcggtttcctgtccccccaccacccgcctgccccgcggaagaccgcccagtgagccagcccccaccttccaggcgccttcgccctggggatccaaccaacttgtatcgagtgggcggggcaacggctccccatttttcccgagccccgcccacagagctcttagccaatcctatgcagagagcatctcctggcaggggtctcttcccaaccagaccccacccaggcacattagcgaccaggcttgggcttccccagcgccccaccaccaccacgtgcaggtggagctctgggatgctatgttggggcggcaagcggtgggccgagggccgggtaggctagcacgggaggtaagggtggtatgggatggggcgggggcggtctagggcaataggagagcagagaatgggggaacttgagggtggggggagggcaccggagccttgccaccatcccaggactttgggcaagtcacccgcactccctgggcctcggtttccccatctgtaaaatgatggtaataatacttcacctacctcataggggaggttgtgaggccaccatcacctgacctgggggtcaaggcaggaggactccgaaggtgctacccgtgagcaaagtgtaattaccgaatcctgactgcaaggcccacctgcccctcccccacagagcctccagagctagctgaggccaacgcaggcccatccgtctcttcactctgtcgcaggccctttcatgggcttcgtctgccatctttgtgggtgccctagacttagtccttatcttgtcctggtttcctttcttgtgaccatctccccatgaaagtgctgtacaaattccacccgccccaggacccccgcacctgccctctggcaccagatgccagggaagggacagaggaaaacagccacaaacaagccaggggggctccccggagccccaggggtggggattggtggccactgtttgtatgttcttgagtgcaagtgttttataaaaaataaaacaaaaacccaccatcacaaaaaaaaaaattttgcagcgaagagaaatgaagaaaaactgaagaaaaaaaaaaaacaggaaaaaaagaaccatacaaaatttttccaccacacataccctctaagccagcaagatttcctctttgcaaaatcatatttttgtgggaatgggccctgctttttgtggcaaggcctgttctgattaataaaggatcgtgaaaaag

SEQ ID NO: 296430 - DNA, 4763 bp, Homo sapiens
gcggccgcgggcggctctgaggagcccggagggaaccggcgacgaggggaccatgtaccgggacccggaggcggccagcccaggggcgccctcgcgcgacgtcctgctggtctctgccatcatcaccgtcagccttagcgtcactgtcgtcctctgcggcctctgccactggtgtcagcgcaaactgggcaaacgctacaagaattccttggagacggtgggcacgccagactcagggcgtgggcgcagtgagaagaaggctatcaagttgcctgcaggagggaaggcggtgaacacagcccccgtgccaggccagacaccccacgatgagtccgaccgccggaccgagccacgttcctccgtctcagacctcgtcaactccctcaccagcgagatgctcatgctctccccaggctccgaggaggatgaggcccacgagggttgcagccgagagaacctgggccggatccagttcagtgtcggctacaacttccaggagtccacgctcaccgtgaagatcatgaaggcccaggagctgccggccaaggacttcagcggcaccagcgaccccttcgtcaaagatctacctgctgcccgacaagaagcacaagctggagaccaaggtgaagcggaagaacctgaacccccactggaacgagaccttcctctttgaaggttttccctatgagaaggtggtgcagaggatcctctacctccaagtcctggactatgaccgcttcagccgcaacgaccccattggggaggtgtccatcccccttaacaaggtggacctgacccagatgcagaccttctggaaggatctgaagccatgcagcgatgggagtgggagccgaggggagctgctcttgtctctctgctacaacccctctgccaactccatcatcgtgaacatcatcaaagcccggaacctcaaagccatggacatcgggggcacatcagacccctacgtgaaggtatggctgatgtacaaggacaagcgggtggagaagaagaagacggtgacgatgaagaggaacctgaaccccatcttcaatgagtccttcgccttcgatatccccacggagaagctgagggagacgaccatcatcatcactgtcatggacaaggacaagctcagccgcaatgacgtcatcggcaagatctacctgtcctggaagagcgggccaggggaggtgaagcactggaaggacatgattgcccgtccccggcagcccgtggcccagtggcaccagctgaaggcctgagtggggccaagggaggcccagggggccgagggcccaggtccccatcatgccctcaccactttatgcacaacgcccggcctgagccccctgccatagggaggggaggaccctgagggctcagccagggaggggtcccaggactcaactgggccccgtttctaggaagtaccagccccatcccccacagtccagctccggggaaggggctctgggaggcattttcctgctttgccccttttcttcctgacttactaatactaaagaagttgggggagctcgagagccagacggccagacaggcagacccctccagaggcccgccaggtgggcatggtcccccattttctttaaggcagcacctggagtggagagaggccactccctctccagcccccgatgtggacccggggaggggaggctgaggcgtttggccccggcctggccaggagaggcccatccccagggcagtttcaggtgccggctgggccctgaatgtcgaggatagtatatagcccgctcctgggtcctggagctgtggccctttgtactcgtgttgtgtccattgtgtgtgtgcgtggggacagaggcctggaaatgcggaggactatacagagaaggcaggttttgtgaaggccaggcagggttggaggccgggggtgtgagaggagaggcccatagggctgagtggggtcgggtgaggcagaggtcagaaacagaagagctgcagttgctggagctgggctgagaactgggctgcctcctgccatccccccgtctcctccccttctccccttggtgcccccctctgctcagaatctgaagtagttccctcctcagcaatttcatctcttgaacactgactcacaccttttaggcacctactgtgtgcatagcattccaccaggactcatctcccttccttctcagggggtcccgagccccgactagctttgccctaactccttcatcaaaagaccccccgccagcttcccacacctcatacgcagccacatctgccctattctccatgctttccagcttgcctgcccttcctcatctctccctgcctgtgcagacctccacccttctttcctccacccctccatcccccaatgcttgtagaccttccattcattccgtctcatcgtgcgtggtctctgatcgtccatcacctgaccttctccaggactgtcttctcacccttccccactccctggtccccgggagcagctccttctgcccgactcactcacagtgcagggaaaggaggcagggaaaagaccaggattctgtgagttctgaggttgccacacacaaagaagctgtggtttctctgcctcggccactgatgagactaaaactggcttccccttggagacggcagatttcaggctgatccctgcttaagccctctcatccccacgctggtcctggtattgatacaagacccagctggtgacaaagcctccaatcctgggggtccacgagcctgggcctgacattcccagaactaccgccagtggcgccaggcccccacagtctgtggccgtggtcttagcccccagttccactctggatgggcctgtgacaccccaaagagaagaaggggactctggatagggtccccacatccagggcgtggggagaccattggcatttgggaaccattttccttcgaacggcttccccttgagctgagcattctgcttgctgcagtagacgggtcgccttttgcccataccgaaattttctgaaattaaatcgcacacccccaccatttcctctccctgggatctggaggaacatcatacatagtaggtgaatcgttttgtagagtgaagaatgctaatgtaaagcaaatagtcacccacgttccttgtaaatccaaatgtttctatattgtagctttgcttaaaatggggtcggccccaactgcatcctcctctttggcgggctggggagcggcccccagccgggacgggagggcagcgaccccgaggcctcgtggacgtgggagagagtgtggtgggaagtcttgagcggaggaggggatctgcccttctccactcctctcttggatccgcctcggtttcctgtccccccaccacccgcctgccccgcggaagaccgcccagtgagccagcccccaccttccaggcgccttcgccctggggatccaaccaacttgtatcgagtgggcggggcaacggctccccatttttcccgagccccgcccacagagctcttagccaatcctatgcagagagcatctcctggcaggggtctcttcccaaccagaccccacccaggcacattagcgaccaggcttgggcttccccagcgccccaccaccaccacgtgcaggtggagctctgggatgctatgttggggcggcaagcggtgggccgagggccgggtaggctagcacgggaggtaagggtggtatgggatggggcgggggcggtctagggcaataggagagcagagaatgggggaacttgagggtggggggagggcaccggagccttgccaccatcccaggactttgggcaagtcacccgcactccctgggcctcggtttccccatctgtaaaatgatggtaataatacttcacctacctcataggggaggttgtgaggccaccatcacctgacctgggggtcaaggcaggaggactccgaaggtgctacccgtgagcaaagtgtaattaccgaatcctgactgcaaggcccacctgcccctcccccacagagcctccagagctagctgaggccaacgcaggcccatccgtctcttcactctgtcgcaggccctttcatgggcttcgtctgccatctttgtgggtgccctagacttagtccttatcttgtcctggtttcctttcttgtgaccatctccccatgaaagtgctgtacaaattccacccgccccaggacccccgcacctgccctctggcaccagatgccagggaagggacagaggaaaacagccacaaacaagccaggggggctccccggagccccaggggtggggattggtggccactgtttgtatgttcttgagtgcaagtgttttataaaaaataaaacaaaaacccaccatcacaaaaaaaaaaattttgcagcgaagagaaatgaagaaaaactgaagaaaaaaaaaaaacaggaaaaaaagaaccatacaaaatttttccaccacacataccctctaagccagcaagatttcctctttgcaaaatcatatttttgtgggaatgggccctgctttttgtggcaaggcctgttctgattaataaaggatcgtgaaaaagtagggccttggctgtttcctccgtgggtcccagccctccctcacctccctgggggcagaggcagtggggtgaaggggatgggggccccggggctgagcctcccctcagtgtgtcacctttgggatttgacttcactggtgaccaggcccttcccgagtgtccagccatcctcagatctctatagaat

SEQ ID NO: 296431 - DNA, 4440 bp, Homo sapiens
gcggccgcgggcggctctgaggagcccggagggaaccggcgacgaggggaccatgtaccgggacccggaggcggccagcccaggggcgccctcgcgcgacgtcctgctggtctctgccatcatcaccgtcagccttagcgtcactgtcgtcctctgcggcctctgccactggtgtcagcgcaaactgggcaaacgctacaagaattccttggagacggtgggcacgccagactcagggcgtgggcgcagtgagaagaaggctatcaagttgcctgcaggagggaaggcggtgaacacagcccccgtgccaggccagacaccccacgatgagtccgaccgccggaccgagccacgttcctccgtctcagacctcgtcaactccctcaccagcgagatgctcatgctctccccaggctccgaggaggatgaggcccacgagggttgcagccgagagaacctgggccggatccagttcagtgtcggctacaacttccaggagtccacgctcaccgtgaagatcatgaaggcccaggagctgccggccaaggacttcagcggcaccagcgaccccttcgtcaaagatctacctgctgcccgacaagaagcacaagctggagaccaaggtgaagcggaagaacctgaacccccactggaacgagaccttcctctttgaaggttttccctatgagaaggtggtgcagaggatcctctacctccaagtcctggactatgaccgcttcagccgcaacgaccccattggggaggtgtccatcccccttaacaaggtggacctgacccagatgcagaccttctggaaggatctgaagccatgcagcgatgggagtgggagccgaggggagctgctcttgtctctctgctacaacccctctgccaactccatcatcgtgaacatcatcaaagcccggaacctcaaagccatggacatcgggggcacatcagacccctacgtgaaggtatggctgatgtacaaggacaagcgggtggagaagaagaagacggtgacgatgaagaggaacctgaaccccatcttcaatgagtccttcgccttcgatatccccacggagaagctgagggagacgaccatcatcatcactgtcatggacaaggacaagctcagccgcaatgacgtcatcggcaagatctacctgtcctggaagagcgggccaggggaggtgaagcactggaaggacatgattgcccgtccccggcagcccgtggcccagtggcaccagctgaaggcctgagtggggccaagggaggcccagggggccgagggcccaggtccccatcatgccctcaccactttatgcacaacgcccggcctgagccccctgccatagggaggggaggaccctgagggctcagccagggaggggtcccaggactcaactgggccccgtttctaggaagtaccagccccatcccccacagtccagctccggggaaggggctctgggaggcattttcctgctttgccccttttcttcctgacttactaatactaaagaagttgggggagctcgagagccagacggccagacaggcagacccctccagaggcccgccaggtgggcatggtcccccattttctttaaggcagcacctggagtggagagaggccactccctctccagcccccgatgtggacccggggaggggaggctgaggcgtttggccccggcctggccaggagaggcccatccccagggcagtttcaggtgccggctgggccctgaatgtcgaggatagtatatagcccgctcctgggtcctggagctgtggccctttgtactcgtgttgtgtccattgtgtgtgtgcgtggggacagaggcctggaaatgcggaggactatacagagaaggcaggttttgtgaaggccaggcagggttggaggccgggggtgtgagaggagaggcccatagggctgagtggggtcgggtgaggcagaggtcagaaacagaagagctgcagttgctggagctgggctgagaactgggctgcctcctgccatccccccgtctcctccccttctccccttggtgcccccctctgctcagaatctgaagtagttccctcctcagcaatttcatctcttgaacactgactcacaccttttaggcacctactgtgtgcatagcattccaccaggactcatctcccttccttctcagggggtcccgagccccgactagctttgccctaactccttcatcaaaagaccccccgccagcttcccacacctcatacgcagccacatctgccctattctccatgctttccagcttgcctgcccttcctcatctctccctgcctgtgcagacctccacccttctttcctccacccctccatcccccaatgcttgtagaccttccattcattccgtctcatcgtgcgtggtctctgatcgtccatcacctgaccttctccaggactgtcttctcacccttccccactccctggtccccgggagcagctccttctgcccgactcactcacagtgcagggaaaggaggcagggaaaagaccaggattctgtgagttctgaggttgccacacacaaagaagctgtggtttctctgcctcggccactgatgagactaaaactggcttccccttggagacggcagatttcaggctgatccctgcttaagccctctcatccccacgctggtcctggtattgatacaagacccagctggtgacaaagcctccaatcctgggggtccacgagcctgggcctgacattcccagaactaccgccagtggcgccaggcccccacagtctgtggccgtggtcttagcccccagttccactctggatgggcctgtgacaccccaaagagaagaaggggactctggatagggtccccacatccagggcgtggggagaccattggcatttgggaaccattttccttcgaacggcttccccttgagctgagcattctgcttgctgcagtagacgggtcgccttttgcccataccgaaattttctgaaattaaatcgcacacccccaccatttcctctccctgggatctggaggaacatcatacatagtaggtgaatcgttttgtagagtgaagaatgctaatgtaaagcaaatagtcacccacgttccttgtaaatccaaatgtttctatattgtagctttgcttaaaatggggtcggccccaactgcatcctcctctttggcgggctggggagcggcccccagccgggacgggagggcagcgaccccgaggcctcgtggacgtgggagagagtgtggtgggaagtcttgagcggaggaggggatctgcccttctccactcctctcttggatccgcctcggtttcctgtccccccaccacccgcctgccccgcggaagaccgcccagtgagccagcccccaccttccaggcgccttcgccctggggatccaaccaacttgtatcgagtgggcggggcaacggctccccatttttcccgagccccgcccacagagctcttagccaatcctatgcagagagcatctcctggcaggggtctcttcccaaccagaccccacccaggcacattagcgaccaggcttgggcttccccagcgccccaccaccaccacgtgcaggtggagctctgggatgctatgttggggcggcaagcggtgggccgagggccgggtaggctagcacgggaggtaagggtggtatgggatggggcgggggcggtctagggcaataggagagcagagaatgggggaacttgagggtggggggagggcaccggagccttgccaccatcccaggactttgggcaagtcacccgcactccctgggcctcggtttccccatctgtaaaatgatggtaataatacttcacctacctcataggggaggttgtgaggccaccatcacctgacctgggggtcaaggcaggaggactccgaaggtgctacccgtgagcaaagtgtaattaccgaatcctgactgcaaggcccacctgcccctcccccacagagcctccagagctagctgaggccaacgcaggcccatccgtctcttcactctgtcgcaggcccctctggcaccagatgccagggaagggacagaggaaaacagccacaaacaagccaggggggctccccggagccccaggggtggggattggtggccactgtttgtatgttcttgagtgcaagtgttttataaaaaataaaacaaaaacccaccatcacaaaaaaaaaaattttgcagcgaagagaaatgaagaaaaactgaagaaaaaaaaaaaacaggaaaaaaagaaccatacaaaatttttccaccacacataccctctaagccagcaagatttcctctttgcaaaatcatatttttgtgggaatgggccctgctttttgtggcaaggcctgttctgattaataaaggatcgtgaaaaag

SEQ ID NO: 296432 - DNA, 4323 bp, Homo sapiens
tgattgagaagaagcgcttccggcggtcttagatcactaatcaacaaaccagctttcggggtctgacgcgatccttgcctcaggcctctcgaggtccagacagccgcccagcccgctctgcgacgcagcagtgaatagtgtggtacctccttgtctcggttcaggtccagacctccccgtcttccggctgccctgaacgtcaggcgacctcaggaccctgtgattggcgcctgcgccggcggaccgtgaccgaggaaacccctggagggacttgggcattccttgggctccgtgcctgttcttcgtgctcctttcgggcaaggatctcacattatcagtctttgaccgacacagaatgcctggcatttgataaatgtttgttgaacttgaagagacatatggacaatgaatctgcaaagatactggggagagataccaatatcatcaagccagaccaacagaagttccttcgatttgctcccacgggagttccgtctggtggaagtccatgacccacccctgcaccaaccctcagccaacaagccgaagccccccactatgctggacatcccctcagagccatgtagtctcaccatccatacgattcagttgattcagcacaaccgacgtcttcgcaaccttattgccacagctcaggcccagaatcagcagcagacagaaggtgtaaaaactgaagagagtgaacctcttccctcgtgccctgggtcacctcctctccctgatgacctcctgcctttagattgtaagaatcccaatgcaccattccagatccggcacagtgacccagagagtgacttttatcgtgggaaaggggaacctgtgactgaactcagctggcactcctgtcggcagctcctctaccaggcagtggccacaatcctggcccacgcgggctttgactgtgctaatgagagtgtcctggagaccctaactgatgtggcacatgagtattgccttaagtttaccaagttgctgcgttttgctgtggaccgggaggcccggctgggacagactccttttcctgatgtgatggagcaggtattccatgaagtgggtattggcagtgtgctctccctccagaagttctggcagcaccgcatcaaggactatcacagttacatgctacagattagtaagcaactctctgaagaatatgaaaggattgtcaatcctgagaaggccacagaggacgctaaacctgtgaagatcaaggaggaacctgtgagcgacatcacttttcctgtcagtgaggagctggaggctgaccttgcttctggagaccagtcactgcctatgggagtgcttggggctcagagcgaacgcttcccatctaacctggaggttgaagcttcaccacaggcttcaagtgcagaggtaaatgcttctcctctttggaatctggcccatgtgaaaatggagcctcaagaaagtgaagaaggcaatgtctctgggcatggtgtgctgggcagtgatgtcttcgaggagcctatgtcaggcatgagtgaagctgggattcctcagagccctgatgactcagatagcagctatggttcccactccactgacagcctcatggggtcctcccctgttttcaaccagcgctgcaagaagaggatgaggaaaatataaaaggaaaagagggagatgttttgtccagacctactagacccaacagaaaaggtttttgtattagaatctgtttccttaaaaattgatttgactcctgttcttaaacacaagtggtttttcctaattccagaggaactggacgtcaccaaacaaggttgcattttacttttgcatccagtttttatagttttccacaaccaagccacccttcacagataaaatatgatgctggcatggcaatcagaccaaagcactgtccccaattgttgtcttaactatgactagacatgttatacagccatttatcttgtacaactgagaagaatcatactttgacctaccttgtagagatgtgaggatttagatgtttgctaacttcaaaactgtgcttgaatagactaataatatatgctcatatcagatgtcagttttcatttaacttgattcatttttggctcaggtcattgggaacccattactaatacctaacaggaaatagctaaacacaacacaccttatctattagtcaccttcttaaaactgtttttgctacttttgaagtgtcttatttataagatcagaggtctgacaccttttttgcttagacagctctctatctcatccatttattttcttctctagacttactccatctctcctcatccttttgcctttgttatttctgctcggactcacatactttcaccatatacatattttcaattgtttctttccttttctcctttgtgagcaaagcaaacaagtactgtccaaggacagccttgtgcatatttcatttgttgcatttgcttggtcatcagaggacagcagtccattaagcacactttgctgcttctactgtaaaggcagcctttaaaacatagcaatatgcacctttcaactttacatcatgtcctgaacaacatcactgtggttactcatccatcagactatctgtatatataagtactgaatcagtatttattaagtaaatgatgtagcactgtagtgattaggaatcattagcaaatgtgttgcttcatgccttggtgatggatgccagcatgttaaactgctgaagtttgattttctgatgcaaaatatatcttgtaaaatttagaccactcctttaatgcagaccaaaataaggcacagctttaattcattattgaatgccttaaatgtcccaggtattgagaataaatgaatatgatacaaatgaggttatagtttaacatataattttaaatttgccaattgtaactctttagcacatttctctaaaccctttctgtcacagtctttttttaaatttatttatttatttatttatttttgagatggagtcttgctctgtcacccaggctggagtgcaatggtgcaatttcgactcactgcaacctctgcctcccaggttcgggcgattctcctgcctcagccacctgagtagctgggattacacgcacatgccaccacacccagctaatttttgcatttttagtagagatgaggtttcaccgtgttggccaggctggtctcaaaactcctgacctcaagtgatctgcccgcctcgggctcccaaagtgctgggattacaggcgtgagccactgcacctggcctctgttgcagtcttatcttcattttcctttgtttataatgaaagtggcgattaggcagttagtttccataaagtggccgtatgggaatttagttcattcatccagcaaacattgagtaccaattatttgctaggtcctgtgcaaggaatacaaaaatgattaagacttcttccttacccttttggagcttgaagcataaggaagacaagttattctgtaaggaagataaagcattcaaaagtactacagagaaaaaccaagtatgcttgagttttgcgaatgttctcctcttaaagaatagcttcaaattttgagaccagtggttcccactaagtatagaacattaaaattaatactttataataaaacacttttattgctgcagaatgttaaactgcataacaggcaccagatggtcaagacgagggaaatatgagaaggcaaatgatgtgaggattagtatcttgagattcacctggtctggaattatgtcataggctactatgcatcagaatcacatggagggctttctaaaacagactgctcagcccacccccagggtttctgagttcataggttataagaggtaagttgaacaattccccagatgatgctgatgctcctggtccacaatgtgagaaccactaagttggagtactgactcatagagataaaattctttgaaagaaatgtactgttttaagatactgtaaaatgtggaggcagggcaaacgtttataagggctgttatgtatgaaatgtgcctctgacccaaatccacggactttgcgaaaatcaccaaggagactttgcattaagttcagagtacaatacaaactgggcctagctctgtatttagtcagtatgtgcacgtgggaaactttagtaaaatatcacctccttattgagacaagtttggacatctggccttaagcctctgttgaacaggagaagtgaagctgtttgcaattatataattttctaatttgaaatcatgacaagcagtcttagaacaaagttaaaattaaaaagtctttatccaagtcaccaatg

SEQ ID NO: 296433 - DNA, 2072 bp, Homo sapiens
tgattgagaagaagcgcttccggcggtcttagatcactaatcaacaaaccagctttcggggtctgacgcgatccttgcctcaggcctctcgaggtccagacagccgcccagcccgctctgcgacgcagcagtgaatagtgtggtacctccttgtctcggttcaggtccagacctccccgtcttccggctgccctgaacgtcaggcgacctcaggaccctgtgattggcgcctgcgccggcggaccgtgaccgaggaaacccctggagggacttgggcattccttgggctccgtgcctgttcttcgtgctcctttcgggcaaggatctcacattatcagtctttgaccgacacagaatgcctggcatttgataaatgtttgttgaacttgaagagacatatggacaatgaatctgcaaagatactggggagagataccaatatcatcaagccagaccaacagaagttccttcgatttgctcccacgggagttccgtctggtggaagtccatgacccacccctgcaccaaccctcagccaacaagccgaagccccccactatgctggacatcccctcagagccatgtagtctcaccatccatacgattcagttgattcagcacaaccgacgtcttcgcaaccttattgccacagctcaggcccagaatcagcagcagacagaaggtgtaaaaactgaagagagtgaacctcttccctcgtgccctgggtcacctcctctccctgatgacctcctgcctttagattgtaagaatcccaatgcaccattccagatccggcacagtgacccagagagtgacttttatcgtgggaaaggggaacctgtgactgaactcagctggcactcctgtcggcagctcctctaccaggcagtggccacaatcctggcccacgcgggctttgactgtgctaatgagagtgtcctggagaccctaactgatgtggcacatgagtattgccttaagtttaccaagttgctgcgttttgctgtggaccgggaggcccggctgggacagactccttttcctgatgtgatggagcaggtattccatgaagtgggtattggcagtgtgctctccctccagaagttctggcagcaccgcatcaaggactatcacagttacatgctacagattagtaagcaactctctgaagaatatgaaaggattgtcaatcctgagaaggccacagaggacgctaaacctgtgaagatcaaggaggaacctgtgagcgacatcacttttcctgtcagtgaggagctggaggctgaccttgcttctggagaccagtcactgcctatgggagtgcttggggctcagagcgaacgcttcccatctaacctggaggttgaagcttcaccacaggcttcaagtgcagaggtaaatgcttctcctctttggaatctggcccatgtgaaaatggagcctcaagaaagtgaagaaggcaatgtctctgggcatggtgtgctgggcagtgatgtcttcgaggagcctatgtcaggcatgagtgaagctgggattcctcagagccctgatgactcagatagcagctatggttcccactccactgacagcctcatggggtcctcccctgttttcaaccagcgctgcaagaagaggatgaggaaaatataaaaggaaaagagggagatgttttgtccagacctactagacccaacagaaaaggtttttgtattagaatctgtttccttaaaaattgatttgactcctgttcttaaacacaagtggtttttcctaattccagaggaactggacgtcaccaaacaaggttgcattttacttttgcatccagtttttatagttttccacaaccaagccacccttcacagataaaatatgatgctggcatggcaatcagaccaaagcactgtccccaattgttgtcttaactatgactagacatgttatacagccatttatcttgtacaactgagaagaatcatactttgacctaccttgtagagatgtgaggatttagatgtttgctaacttcaaaactgtgcttgaatagactaataatatatgctcatatcaga

SEQ ID NO: 296434 - DNA, 2862 bp, Homo sapiens
tgattgagaagaagcgcttccggcggtcttagatcactaatcaacaaaccagctttcggggtctgacgcgatccttgcctcaggcctctcgaggtccagacagccgcccagcccgctctgcgacgcagcagtgaatagtgtggtacctccttgtctcggttcaggtccagacctccccgtcttccggctgccctgaacgtcaggcgacctcaggaccctgtgattggcgcctgcgccggcggaccgtgaccgaggaaacccctggagggacttgggcattccttgggctccgtgcctgttcttcgtgctcctttcgggcaaggatctcacattatcagtctttgaccgacacagaatgcctggcatttgataaatgtttgttgaacttgaagagacatatggacaatgaatctgcaaaggtgagttgaaaccagattgtgaattttgttgaatggtaagccaaggaattctgactttttccaataggcaatgggaagccatttgatttaagttttaaaaagagtaagtctagcagcagtgtagagaatagatgacatacaaagagagattggaggaagggataccaattagaaggcagcagaaatctctcacgttctatatgtcaaaagttgaaagcataatgccatttagattaatggttcataaatttttccaccaggatcatgcctaagacacacagagtaagaaccacttcttattatctttaaccctactagtttttctcctattgatccagcacagatgtatcaagataccttatcatgccttgcttattgttcaggattgagcgtgatggtagttctggtaatgagttagtgagtgagatgggaaatagggatactagagctccagatgctgttgtagctattggtccactaatgacccaaattctaccctgtggttcagtgtagtaggaattgtcatagtatgacaataaccagcatctaacagttacatttctcttaatttatttagggagaacacctttggtcctacagttttgctgacactgacatttttctaagtggtcacaaatagcctactttttacataaataactggctagacctcgtatttttcactacagaagcctataatctaaagttgccaggatttaaacacattacttttaggttattgtctacatttatcctgagacctcttctcttcttattccaaaatgttgagatactggggagagataccaatatcatcaagccagaccaacagaagttccttcgatttgctcccacgggagttccgtctggtggaagtccatgacccacccctgcaccaaccctcagccaacaagccgaagccccccactatgctggacatcccctcagagccatgtagtctcaccatccatacgattcagttgattcagcacaaccgacgtcttcgcaaccttattgccacagctcaggcccagaatcagcagcagacagaaggtgtaaaaactgaagagagtgaacctcttccctcgtgccctgggtcacctcctctccctgatgacctcctgcctttagattgtaagaatcccaatgcaccattccagatccggcacagtgacccagagagtgacttttatcgtgggaaaggggaacctgtgactgaactcagctggcactcctgtcggcagctcctctaccaggcagtggccacaatcctggcccacgcgggctttgactgtgctaatgagagtgtcctggagaccctaactgatgtggcacatgagtattgccttaagtttaccaagttgctgcgttttgctgtggaccgggaggcccggctgggacagactccttttcctgatgtgatggagcaggtattccatgaagtgggtattggcagtgtgctctccctccagaagttctggcagcaccgcatcaaggactatcacagttacatgctacagattagtaagcaactctctgaagaatatgaaaggattgtcaatcctgagaaggccacagaggacgctaaacctgtgaagatcaaggaggaacctgtgagcgacatcacttttcctgtcagtgaggagctggaggctgaccttgcttctggagaccagtcactgcctatgggagtgcttggggctcagagcgaacgcttcccatctaacctggaggttgaagcttcaccacaggcttcaagtgcagaggtaaatgcttctcctctttggaatctggcccatgtgaaaatggagcctcaagaaagtgaagaaggcaatgtctctgggcatggtgtgctgggcagtgatgtcttcgaggagcctatgtcaggcatgagtgaagctgggattcctcagagccctgatgactcagatagcagctatggttcccactccactgacagcctcatggggtcctcccctgttttcaaccagcgctgcaagaagaggatgaggaaaatataaaaggaaaagagggagatgttttgtccagacctactagacccaacagaaaaggtttttgtattagaatctgtttccttaaaaattgatttgactcctgttcttaaacacaagtggtttttcctaattccagaggaactggacgtcaccaaacaaggttgcattttacttttgcatccagtttttatagttttccacaaccaagccacccttcacagataaaatatgatgctggcatggcaatcagaccaaagcactgtccccaattgttgtcttaactatgactagacatgttatacagccatttatcttgtacaactgagaagaatcatactttgacctaccttgtagagatgtgaggatttagatgtttgctaacttcaaaactgtgcttgaatagactaataatatatgctcatatcaga

SEQ ID NO: 296435 - DNA, 880 bp, Homo sapiens
tgattgagaagaagcgcttccggcggtcttagatcactaatcaacaaaccagctttcggggtctgacgcgatccttgcctcaggcctctcgaggtccagacagccgcccagcccgctctgcgacgcagcagtgaatagtgtggtacctccttgtctcggttcaggtccagacctccccgtcttccggctgccctgaacgtcaggcgacctcaggaccctgtgattggcgcctgcgccggcggaccgtgaccgaggaaacccctggagggacttgggcattccttgggctccgtgcctgttcttcgtgctcctttcgggcaaggatctcacattatcagtctttgaccgacacagaatgcctggcatttgataaatgtttgttgaacttgaagagacatatggacaatgaatctgcaaagatactggggagagataccaatatcatcaagccagaccaacagaagttccttcgatttgctcccacgggagttccgtctggtggaagtccatgacccacccctgcaccaaccctcagccaacaagccgaagccccccactatgctggacatcccctcagagccatgtagtctcaccatccatacgattcagttgattcagcacaaccgacgtcttcgcaaccttattgccacagctcaggcccagaatcagcagcagacagaaggtgtaaaaactgaagagagtgaacctcttccctcgtgccctgggtcacctcctctccctgatgacctcctgcctttagattgtaagaatcccaatgcaccattccagatccggcacagtgacccagagagtgacttttatcggtaaggcaaggctttgctgtatcttacttttctcaagtcatcttcccaacaaccct

SEQ ID NO: 296436 - DNA, 207 bp, Homo sapiens
  misc_feature (33)..(34): n is a, c, g, or t
  misc_feature (186)..(186): n is a, c, g, or t
  misc_feature (191)..(191): n is a, c, g, or t
  misc_feature (206)..(206): n is a, c, g, or t
attcctatgttcccttggctagccaaagaggcnntctgtcatttgtccaggagctgtagtgattaggaatcattagcaaatgtgttgcttcatgccttggtgatggatgccagcatgttaaactgctgaagtttgattttctgatgcaaaatatatcttgtaaaatttaaaaaaaaaaagaaaacnaacgnattcaagccgggacnc

SEQ ID NO: 296437 - DNA, 3463 bp, Homo sapiens
tgattgagaagaagcgcttccggcggtcttagatcactaatcaacaaaccagctttcggggtctgacgcgatccttgcctcaggcctctcgaggtccagacagccgcccagcccgctctgcgacgcagcagtgaatagtgtggtacctccttgtctcggttcaggtccagacctccccgtcttccggctgccctgaacgtcaggcgacctcaggaccctgtgattggcgcctgcgccggcggaccgtgaccgaggaaacccctggagggacttgggcattccttgggctccgtgcctgttcttcgtgctcctttcgggcaaggatctcacattatcagtctttgaccgacacagaatgcctggcatttgataaatgtttgttgaacttgaagagacatatggacaatgaatctgcaaagatactggggagagataccaatatcatcaagccagaccaacagaagttccttcgatttgctcccacgggagttccgtctggtggaagtccatgacccacccctgcaccaaccctcagccaacaagccgaagccccccactatgctggacatcccctcagagccatgtagtctcaccatccatacgattcagttgattcagcacaaccgacgtcttcgcaaccttattgccacagctcaggcccagaatcagcagcagacagaaggtgtaaaaactgaagagagtgaacctcttccctcgtgccctgggtcacctcctctccctgatgacctcctgcctttagattgtaagaatcccaatgcaccattccagatccggcacagtgacccagagagtgacttttatcgtgggaaaggggaacctgtgactgaactcagctggcactcctgtcggcagctcctctaccaggcagtggccacaatcctggcccacgcgggctttgactgtgctaatgagagtgtcctggagaccctaactgatgtggcacatgagtattgccttaagtttaccaagttgctgcgttttgctgtggaccgggaggcccggctgggacagactccttttcctgatgtgatggagcaggtattccatgaagtgggtattggcagtgtgctctccctccagaagttctggcagcaccgcatcaaggactatcacagttacatgctacagattagtaagcaactctctgaagaatatgaaaggattgtcaatcctgagaaggccacagaggacgctaaacctgtgaagatcaaggaggaacctgtgagcgacatcacttttcctgtcagtgaggagctggaggctgaccttgcttctggagaccagtcactgcctatgggagtgcttggggctcagagcgaacgcttcccatctaacctggaggttgaagcttcaccacaggcttcaagtgcagaggtaaatgcttctcctctttggaatctggcccatgtgaaaatggagcctcaagaaagtgaagaaggcaatgtctctgggcatggtgtgctgggcagtgatgtcttcgaggagcctatgtcaggcatgagtgaagctgggattcctcagagccctgatgactcagatagcagctatggttcccactccactgacagcctcatggggtcctcccctgttttcaaccagcgctgcaagaagaggatgaggaaaatataaaaggaaaagagggagatgttttgtccagacctactagacccaacagaaaaggtttttgtattagaatctgtttccttaaaaattgatttgactcctgttcttaaacacaagtggtttttcctaattccagaggaactggacgtcaccaaacaaggttgcattttacttttgcatccagtttttatagttttccacaaccaagccacccttcacagataaaatatgatgctggcatggcaatcagaccaaagcactgtccccaattgttgtcttaactatgactagacatgttatacagccatttatcttgtacaactgagaagaatcatactttgacctaccttgtagagatgtgaggatttagatgtttgctaacttcaaaactgtgcttgaatagactaataatatatgctcatatcagatgtcagttttcatttaacttgattcatttttggctcaggtcattgggaacccattactaatacctaacaggaaatagctaaacacaacacaccttatctattagtcaccttcttaaaactgtttttgctacttttgaagtgtcttatttataagatcagaggtctgacaccttttttgcttagacagctctctatctcatccatttattttcttctctagacttactccatctctcctcatccttttgcctttgttatttctgctcggactcacatactttcaccatatacatattttcaattgtttctttccttttctcctttgtgagcaaagcaaacaagtactgtccaaggacagccttgtgcatatttcatttgttgcatttgcttggtcatcagaggacagcagtccattaagcacactttgctgcttctactgtaaaggcagcctttaaaacatagcaatatgcacctttcaactttacatcatgtcctgaacaacatcactgtggttactcatccatcagactatctgtatatataagtactgaatcagtatttattaagtaaatgatgtagcactgtagtgattaggaatcattagcaaatgtgttgcttcatgccttggtgatggatgccagcatgttaaactgctgaagtttgattttctgatgcaaaatatatcttgtaaaatttagaccactcctttaatgcagaccaaaataaggcacagctttaattcattattgaatgccttaaatgtcccaggtattgagaataaatgaatatgatacaaatgaggttatagtttaacatataattttaaatttgccaattgtaactctttagcacatttctctaaaccctttctgtcacagtctttttttaaatttatttatttatttatttatttttgagatggagtcttgctctgtcacccaggctggagtgcaatggtgcaatttcgactcactgcaacctctgcctcccaggttcgggcgattctcctgcctcagccacctgagtagctgggattacacgcacatgccaccacacccagctaatttttgcatttttagtagagatgaggtttcaccgtgttggccaggctggtctcaaaactcctgacctcaagtgatctgcccgcctcgggctcccaaagtgctgggattacaggcgtgagccactgcacctggcctctgttgcagtcttatcttcattttcctttgtttataatgaaagtggcgattaggcagttagtttccataaagtggccgtatgggaatttagttcattcatccagcaaacattgagtaccaattatttgctaggtcctgtgcaaggaagaagtcttactcatttttgtattccttgcacaggacctgtcgagc

SEQ ID NO: 296438 - DNA, 2110 bp, Homo sapiens
  misc_feature (2082)..(2082): n is a, c, g, or t
  misc_feature (2085)..(2085): n is a, c, g, or t
tgattgagaagaagcgcttccggcggtcttagatcactaatcaacaaaccagctttcggggtctgacgcgatccttgcctcaggcctctcgaggtccagacagccgcccagcccgctctgcgacgcagcagtgaatagtgtggtacctccttgtctcggttcaggtccagacctccccgtcttccggctgccctgaacgtcaggcgacctcaggaccctgtgattggcgcctgcgccggcggaccgtgaccgaggaaacccctggagggacttgggcattccttgggctccgtgcctgttcttcgtgctcctttcgggcaaggatctcacattatcagtctttgaccgacacagaatgcctggcatttgataaatgtttgttgaacttgaagagacatatggacaatgaatctgcaaagatactggggagagataccaatatcatcaagccagaccaacagaagttccttcgatttgctcccacgggagttccgtctggtggaagtccatgacccacccctgcaccaaccctcagccaacaagccgaagccccccactatgctggacatcccctcagagccatgtagtctcaccatccatacgattcagttgattcagcacaaccgacgtcttcgcaaccttattgccacagctcaggcccagaatcagcagcagacagaaggtgtaaaaactgaagagagtgaacctcttccctcgtgccctgggtcacctcctctccctgatgacctcctgcctttagattgtaagaatcccaatgcaccattccagatccggcacagtgacccagagagtgacttttatcgtgggaaaggggaacctgtgactgaactcagctggcactcctgtcggcagctcctctaccaggcagtggccacaatcctggcccacgcgggctttgactgtgctaatgagagtgtcctggagaccctaactgatgtggcacatgagtattgccttaagtttaccaagttgctgcgttttgctgtggaccgggaggcccggctgggacagactccttttcctgatgtgatggagcaggtattccatgaagtgggtattggcagtgtgctctccctccagaagttctggcagcaccgcatcaaggactatcacagttacatgctacagattagtaagcaactctctgaagaatatgaaaggattgtcaatcctgagaaggccacagaggacgctaaacctgtgaagatcaaggaggaacctgtgagcgacatcacttttcctgtcagtgaggagctggaggctgaccttgcttctggagaccagtcactgcctatgggagtgcttggggctcagagcgaacgcttcccatctaacctggaggttgaagcttcaccacaggcttcaagtgcagaggtaaatgcttctcctctttggaatctggcccatgtgaaaatggagcctcaagaaagtgaagaaggcaatgtctctgggcatggtgtgctgggcagtgatgtcttcgaggagcctatgtcaggcatgagtgaagctgggattcctcagagccctgatgactcagatagcagctatggttcccactccactgacagcctcatggggtcctcccctgttttcaaccagcgctgcaagaagaggatgaggaaaatataaaaggaaaagagggagatgttttgtccagacctactagacccaacagaaaaggtttttgtattagaatctgtttccttaaaaattgatttgactcctgttcttaaacacaagtggtttttcctaattccagaggaactggacgtcaccaaacaaggttgcattttacttttgcatccagtttttatagttttccacaaccaagccacccttcacagataaaatatgatgctggcatggcaatcagaccaaagcactgtccccaattgttgtcttaactatgactagacatgttatacagccatttatcttgtacaactgagaagaatcatactttgacctaccttgtagagatgtgaggatttagatgtttgctaacttcaaaactgtgcttgaatagactaataatatatgctcatatcagaaaaaaaaaanaanaaagggcgccgctcgcgatctagaa

SEQ ID NO: 296439 - DNA, 2127 bp, Homo sapiens
tgattgagaagaagcgcttccggcggtcttagatcactaatcaacaaaccagctttcggggtctgacgcgatccttgcctcaggcctctcgaggtccagacagccgcccagcccgctctgcgacgcagcagtgaatagtgtggtacctccttgtctcggttcaggtccagacctccccgtcttccggctgccctgaacgtcaggcgacctcaggaccctgtgattggcgcctgcgccggcggaccgtgaccgaggaaacccctggagggacttgggcattccttgggctccgtgcctgttcttcgtgctcctttcgggcaaggatctcacattatcagtctttgaccgacacagaatgcctggcatttgataaatgtttgttgaacttgaagagacatatggacaatgaatctgcaaaggttattgtctacatttatcctgagacctcttctcttcttattccaaaatgttgagatactggggagagataccaatatcatcaagccagaccaacagaagttccttcgatttgctcccacgggagttccgtctggtggaagtccatgacccacccctgcaccaaccctcagccaacaagccgaagccccccactatgctggacatcccctcagagccatgtagtctcaccatccatacgattcagttgattcagcacaaccgacgtcttcgcaaccttattgccacagctcaggcccagaatcagcagcagacagaaggtgtaaaaactgaagagagtgaacctcttccctcgtgccctgggtcacctcctctccctgatgacctcctgcctttagattgtaagaatcccaatgcaccattccagatccggcacagtgacccagagagtgacttttatcgtgggaaaggggaacctgtgactgaactcagctggcactcctgtcggcagctcctctaccaggcagtggccacaatcctggcccacgcgggctttgactgtgctaatgagagtgtcctggagaccctaactgatgtggcacatgagtattgccttaagtttaccaagttgctgcgttttgctgtggaccgggaggcccggctgggacagactccttttcctgatgtgatggagcaggtattccatgaagtgggtattggcagtgtgctctccctccagaagttctggcagcaccgcatcaaggactatcacagttacatgctacagattagtaagcaactctctgaagaatatgaaaggattgtcaatcctgagaaggccacagaggacgctaaacctgtgaagatcaaggaggaacctgtgagcgacatcacttttcctgtcagtgaggagctggaggctgaccttgcttctggagaccagtcactgcctatgggagtgcttggggctcagagcgaacgcttcccatctaacctggaggttgaagcttcaccacaggcttcaagtgcagaggtaaatgcttctcctctttggaatctggcccatgtgaaaatggagcctcaagaaagtgaagaaggcaatgtctctgggcatggtgtgctgggcagtgatgtcttcgaggagcctatgtcaggcatgagtgaagctgggattcctcagagccctgatgactcagatagcagctatggttcccactccactgacagcctcatggggtcctcccctgttttcaaccagcgctgcaagaagaggatgaggaaaatataaaaggaaaagagggagatgttttgtccagacctactagacccaacagaaaaggtttttgtattagaatctgtttccttaaaaattgatttgactcctgttcttaaacacaagtggtttttcctaattccagaggaactggacgtcaccaaacaaggttgcattttacttttgcatccagtttttatagttttccacaaccaagccacccttcacagataaaatatgatgctggcatggcaatcagaccaaagcactgtccccaattgttgtcttaactatgactagacatgttatacagccatttatcttgtacaactgagaagaatcatactttgacctaccttgtagagatgtgaggatttagatgtttgctaacttcaaaactgtgcttgaatagactaataatatatgctcatatcaga

SEQ ID NO: 296440 - DNA, 2285 bp, Homo sapiens
tgattgagaagaagcgcttccggcggtcttagatcactaatcaacaaaccagctttcggggtctgacgcgatccttgcctcaggcctctcgaggtccagacagccgcccagcccgctctgcgacgcagcagtgaatagtgtggtacctccttgtctcggttcaggtccagacctccccgtcttccggctgccctgaacgtcaggcgacctcaggaccctgtgattggcgcctgcgccggcggaccgtgaccgaggaaacccctggagggacttgggcattccttgggctccgtgcctgttcttcgtgctcctttcgggcaaggatctcacattatcagtctttgaccgacacagaatgcctggcatttgataaatgtttgttgaacttgaagagacatatggacaatgaatctgcaaagggagaacacctttggtcctacagttttgctgacactgacatttttctaagtggtcacaaatagcctactttttacataaataactggctagacctcgtatttttcactacagaagcctataatctaaagttgccaggatttaaacacattacttttaggttattgtctacatttatcctgagacctcttctcttcttattccaaaatgttgagatactggggagagataccaatatcatcaagccagaccaacagaagttccttcgatttgctcccacgggagttccgtctggtggaagtccatgacccacccctgcaccaaccctcagccaacaagccgaagccccccactatgctggacatcccctcagagccatgtagtctcaccatccatacgattcagttgattcagcacaaccgacgtcttcgcaaccttattgccacagctcaggcccagaatcagcagcagacagaaggtgtaaaaactgaagagagtgaacctcttccctcgtgccctgggtcacctcctctccctgatgacctcctgcctttagattgtaagaatcccaatgcaccattccagatccggcacagtgacccagagagtgacttttatcgtgggaaaggggaacctgtgactgaactcagctggcactcctgtcggcagctcctctaccaggcagtggccacaatcctggcccacgcgggctttgactgtgctaatgagagtgtcctggagaccctaactgatgtggcacatgagtattgccttaagtttaccaagttgctgcgttttgctgtggaccgggaggcccggctgggacagactccttttcctgatgtgatggagcaggtattccatgaagtgggtattggcagtgtgctctccctccagaagttctggcagcaccgcatcaaggactatcacagttacatgctacagattagtaagcaactctctgaagaatatgaaaggattgtcaatcctgagaaggccacagaggacgctaaacctgtgaagatcaaggaggaacctgtgagcgacatcacttttcctgtcagtgaggagctggaggctgaccttgcttctggagaccagtcactgcctatgggagtgcttggggctcagagcgaacgcttcccatctaacctggaggttgaagcttcaccacaggcttcaagtgcagaggtaaatgcttctcctctttggaatctggcccatgtgaaaatggagcctcaagaaagtgaagaaggcaatgtctctgggcatggtgtgctgggcagtgatgtcttcgaggagcctatgtcaggcatgagtgaagctgggattcctcagagccctgatgactcagatagcagctatggttcccactccactgacagcctcatggggtcctcccctgttttcaaccagcgctgcaagaagaggatgaggaaaatataaaaggaaaagagggagatgttttgtccagacctactagacccaacagaaaaggtttttgtattagaatctgtttccttaaaaattgatttgactcctgttcttaaacacaagtggtttttcctaattccagaggaactggacgtcaccaaacaaggttgcattttacttttgcatccagtttttatagttttccacaaccaagccacccttcacagataaaatatgatgctggcatggcaatcagaccaaagcactgtccccaattgttgtcttaactatgactagacatgttatacagccatttatcttgtacaactgagaagaatcatactttgacctaccttgtagagatgtgaggatttagatgtttgctaacttcaaaactgtgcttgaatagactaataatatatgctcatatcaga

SEQ ID NO: 296441 - DNA, 1839 bp, Homo sapiens
tgattgagaagaagcgcttccggcggtcttagatcactaatcaacaaaccagctttcggggtctgacgcgatccttgcctcaggcctctcgaggtccagacagccgcccagcccgctctgcgacgcagcagtgaatagtgtggtacctccttgtctcggttcaggtccagacctccccgtcttccggctgccctgaacgtcaggcgacctcaggaccctgtgattggcgcctgcgccggcggaccgtgaccgaggaaacccctggagggacttgggcattccttgggctccgtgcctgttcttcgtgctcctttcgggcaaggatctcacattatcagtctttgaccgacacagaatgcctggcatttgataaatgtttgttgaacttgaagagacatatggacaatgaatctgcaaagctcaggcccagaatcagcagcagacagaaggtgtaaaaactgaagagagtgaacctcttccctcgtgccctgggtcacctcctctccctgatgacctcctgcctttagattgtaagaatcccaatgcaccattccagatccggcacagtgacccagagagtgacttttatcgtgggaaaggggaacctgtgactgaactcagctggcactcctgtcggcagctcctctaccaggcagtggccacaatcctggcccacgcgggctttgactgtgctaatgagagtgtcctggagaccctaactgatgtggcacatgagtattgccttaagtttaccaagttgctgcgttttgctgtggaccgggaggcccggctgggacagactccttttcctgatgtgatggagcaggtattccatgaagtgggtattggcagtgtgctctccctccagaagttctggcagcaccgcatcaaggactatcacagttacatgctacagattagtaagcaactctctgaagaatatgaaaggattgtcaatcctgagaaggccacagaggacgctaaacctgtgaagatcaaggaggaacctgtgagcgacatcacttttcctgtcagtgaggagctggaggctgaccttgcttctggagaccagtcactgcctatgggagtgcttggggctcagagcgaacgcttcccatctaacctggaggttgaagcttcaccacaggcttcaagtgcagaggtaaatgcttctcctctttggaatctggcccatgtgaaaatggagcctcaagaaagtgaagaaggcaatgtctctgggcatggtgtgctgggcagtgatgtcttcgaggagcctatgtcaggcatgagtgaagctgggattcctcagagccctgatgactcagatagcagctatggttcccactccactgacagcctcatggggtcctcccctgttttcaaccagcgctgcaagaagaggatgaggaaaatataaaaggaaaagagggagatgttttgtccagacctactagacccaacagaaaaggtttttgtattagaatctgtttccttaaaaattgatttgactcctgttcttaaacacaagtggtttttcctaattccagaggaactggacgtcaccaaacaaggttgcattttacttttgcatccagtttttatagttttccacaaccaagccacccttcacagataaaatatgatgctggcatggcaatcagaccaaagcactgtccccaattgttgtcttaactatgactagacatgttatacagccatttatcttgtacaactgagaagaatcatactttgacctaccttgtagagatgtgaggatttagatgtttgctaacttcaaaactgtgcttgaatagactaataatatatgctcatatcaga

SEQ ID NO: 296442 - DNA, 1332 bp, Homo sapiens
taagctagtacgaggctggtggtggtagaatcccaatgcaccattccagatccggcacagtgacccagagagtgacttttatcgtgggaaaggggaacctgtgactgaactcagctggcactcctgtcggcagctcctctaccaggcagtggccacaatcctggcccacgcgggctttgactgtgctaatgagagtgtcctggagaccctaactgatgtggcacatgagtattgccttaagtttaccaagttgctgcgttttgctgtggaccgggaggcccggctgggacagactccttttcctgatgtgatggagcaggtattccatgaagtgggtattggcagtgtgctctccctccagaagttctggcagcaccgcatcaaggactatcacagttacatgctacagattagtaagcaactctctgaagaatatgaaaggattgtcaatcctgagaaggccacagaggacgctaaacctgtgaagatcaaggaggaacctgtgagcgacatcacttttcctgtcagtgaggagctggaggctgaccttgcttctggagaccagtcactgcctatgggagtgcttggggctcagagcgaacgcttcccatctaacctggaggttgaagcttcaccacaggcttcaagtgcagaggtaaatgcttctcctctttggaatctggcccatgtgaaaatggagcctcaagaaagtgaagaaggcaatgtctctgggcatggtgtgctgggcagtgatgtcttcgaggagcctatgtcaggcatgagtgaagctgggattcctcagagccctgatgactcagatagcagctatggttcccactccactgacagcctcatggggtcctcccctgttttcaaccagcgctgcaagaagaggatgaggaaaatataaaaggaaaagagggagatgttttgtccagacctactagacccaacagaaaaggtttttgtattagaatctgtttccttaaaaattgatttgactcctgttcttaaacacaagtggtttttcctaattccagaggaactggacgtcaccaaacaaggttgcattttacttttgcatccagtttttatagttttccacaaccaagccacccttcacagataaaatatgatgctggcatggcaatcagaccaaagcactgtccccaattgttgtcttaactatgactagacatgttatacagccatttatcttgtacaactgagaagaatcatactttgacctaccttgtagagatgtgaggatttagatgtttgctaacttcaaaactgtgcttgaatagactaataatatatgctcatatcaga

SEQ ID NO: 296443 - DNA, 1707 bp, Homo sapiens
tgattgagaagaagcgcttccggcggtcttagatcactaatcaacaaaccagctttcggggtctgacgcgatccttgcctcaggcctctcgaggtccagacagccgcccagcccgctctgcgacgcagcagtgaatagtgtggtacctccttgtctcggttcaggtccagacctccccgtcttccggctgccctgaacgtcaggcgacctcaggaccctgtgattggcgcctgcgccggcggaccgtgaccgaggaaacccctggagggacttgggcattccttgggctccgtgcctgttcttcgtgctcctttcgggcaaggatctcacattatcagtctttgaccgacacagaatgcctggcatttgataaatgtttgttgaacttgaagagacatatggacaatgaatctgcaaagatactggggagagataccaatatcatcaagccagaccaacagaagttccttcgatttgctcccacgggagttccgtctggtggaagtccatgacccacccctgcaccaaccctcagccaacaagccgaagccccccactatgctggacatcccctcagagccatgtagtctcaccatccatacgattcagttgattcagcacaaccgacgtcttcgcaaccttattgccacagctcaggcccagaatcagcagcagacagaaggtgtaaaaactgaagagagtgaacctcttccctcgtgccctgggtcacctcctctccctgatgacctcctgcctttagattgtaagaatcccaatgcaccattccagatccggcacagtgacccagagagtgacttttatcgtgggaaaggggaacctgtgactgaactcagctggcactcctgtcggcagctcctctaccaggcagtggccacaatcctggcccacgcgggctttgactgtgctaatgagagtgtcctggagaccctaactgatgtggcacatgagtattgccttaagtttaccaagttgctgcgttttgctgtggaccgggaggcccggctgggacagactccttttcctgatgtgatggagcaggtattccatgaagtgggtattggcagtgtgctctccctccagaagttctggcagcaccgcatcaaggactatcacagttacatgctacagattagtaagcaactctctgaagaatatgaaaggattgtcaatcctgagaaggccacagaggacgctaaacctgtgaagatcaaggaggaacctgtgagcgacatcacttttcctgtcagtgaggagctggaggctgaccttgcttctggagaccagtcactgcctatgggagtgcttggggctcagagcgaacgcttcccatctaacctggaggttgaagcttcaccacaggcttcaagtgcagaggtaaatgcttctcctctttggaatctggcccatgtgaaaatggagcctcaagaaagtgaagaaggcaatgtctctgggcatggtgtgctgggcagtgatgtcttcgaggagcctatgtcaggcatgagtgaagctgggattcctcagagccctgatgactcagatagcagctatggttcccactccactgacagcctcatggggtcctcccctgttttcaaccagcgctgcagcctcgtcgccatgcctcggaaaatcgaggaaatcaaggacttcctgctcacagcccgacgaaaggatgccaaatctgtc

SEQ ID NO: 296444 - DNA, 2793 bp, Homo sapiens
agacccaacatctccctcttttccttttatattttcctcatcctcttcttgcagcgctggttgaaaacaggggaggaccccatgaggctgtcagtggagaagaggatgaggaaaatataaaaggaaaagagggagatgttttgtccagacctactagacccaacagaaaaggtttttgtattagaatctgtttccttaaaaattgatttgactcctgttcttaaacacaagtggtttttcctaattccagaggaactggacgtcaccaaacaaggttgcattttacttttgcatccagtttttatagttttccacaaccaagccacccttcacagataaaatatgatgctggcatggcaatcagaccaaagcactgtccccaattgttgtcttaactatgactagacatgttatacagccatttatcttgtacaactgagaagaatcatactttgacctaccttgtagagatgtgaggatttagatgtttgctaacttcaaaactgtgcttgaatagactaataatatatgctcatatcagatgtcagttttcatttaacttgattcatttttggctcaggtcattgggaacccattactaatacctaacaggaaatagctaaacacaacacaccttatctattagtcaccttcttaaaactgtttttgctacttttgaagtgtcttatttataagatcagaggtctgacaccttttttgcttagacagctctctatctcatccatttattttcttctctagacttactccatctctcctcatccttttgcctttgttatttctgctcggactcacatactttcaccatatacatattttcaattgtttctttccttttctcctttgtgagcaaagcaaacaagtactgtccaaggacagccttgtgcatatttcatttgttgcatttgcttggtcatcagaggacagcagtccattaagcacactttgctgcttctactgtaaaggcagcctttaaaacatagcaatatgcacctttcaactttacatcatgtcctgaacaacatcactgtggttactcatccatcagactatctgtatatataagtactgaatcagtatttattaagtaaatgatgtagcactgtagtgattaggaatcattagcaaatgtgttgcttcatgccttggtgatggatgccagcatgttaaactgctgaagtttgattttctgatgcaaaatatatcttgtaaaatttagaccactcctttaatgcagaccaaaataaggcacagctttaattcattattgaatgccttaaatgtcccaggtattgagaataaatgaatatgatacaaatgaggttatagtttaacatataattttaaatttgccaattgtaactctttagcacatttctctaaaccctttctgtcacagtctttttttaaatttatttatttatttatttatttttgagatggagtcttgctctgtcacccaggctggagtgcaatggtgcaatttcgactcactgcaacctctgcctcccaggttcgggcgattctcctgcctcagccacctgagtagctgggattacacgcacatgccaccacacccagctaatttttgcatttttagtagagatgaggtttcaccgtgttggccaggctggtctcaaaactcctgacctcaagtgatctgcccgcctcgggctcccaaagtgctgggattacaggcgtgagccactgcacctggcctctgttgcagtcttatcttcattttcctttgtttataatgaaagtggcgattaggcagttagtttccataaagtggccgtatgggaatttagttcattcatccagcaaacattgagtaccaattatttgctaggtcctgtgcaaggaatacaaaaatgattaagacttcttccttacccttttggagcttgaagcataaggaagacaagttattctgtaaggaagataaagcattcaaaagtactacagagaaaaaccaagtatgcttgagttttgcgaatgttctcctcttaaagaatagcttcaaattttgagaccagtggttcccactaagtatagaacattaaaattaatactttataataaaacacttttattgctgcagaatgttaaactgcataacaggcaccagatggtcaagacgagggaaatatgagaaggcaaatgatgtgaggattagtatcttgagattcacctggtctggaattatgtcataggctactatgcatcagaatcacatggagggctttctaaaacagactgctcagcccacccccagggtttctgagttcataggttataagaggtaagttgaacaattccccagatgatgctgatgctcctggtccacaatgtgagaaccactaagttggagtactgactcatagagataaaattctttgaaagaaatgtactgttttaagatactgtaaaatgtggaggcagggcaaacgtttataagggctgttatgtatgaaatgtgcctctgacccaaatccacggactttgcgaaaatcaccaaggagactttgcattaagttcagagtacaatacaaactgggcctagctctgtatttagtcagtatgtgcacgtgggaaactttagtaaaatatcacctccttattgagacaagtttggacatctggccttaagcctctgttgaacaggagaagtgaagctgtttgcaattatataattttctaatttgaaatcatgacaagcagtcttagaacaaagttaaaattaaaaagtctttatccaagtcaccaatg

SEQ ID NO: 296445 - DNA, 530 bp, Homo sapiens
agctttgttttgagaattaggacagtttattgtttgaccaacatgctgagtcttttccacattttacacagtttaatgtgaaatcaacatggcggctatgtcttctgagcccataacagatggaattgccaccctctgtgctcctcacagccaatcactttaaagggatgggtgaggggaaagtgaggggagaagtggacacacaccgcgagatgcaggctggccttcaatgctatggaggcttcccacctcctgaaggaaccatctaaacccctgctgcaaggatttcctgatgaaaccacacactgctgggagtgccaaccagacaggggtctggagtccaaggagtttgcacattgagatcccaaggttttggaacacctaaatagttcatgtcaaacaaaaattcaaagggtgtcctgatctgtgtgggtgcccatgacaatcaatcagagtagacttggggtacctgtgcccatctgtgtccaaggtaaaggtgaaagtcccccccccagaaattacccactcca

SEQ ID NO: 296446 - DNA, 605 bp, Homo sapiens
ctgcaggattcggcacgagcaaaagcttgttacaaacccttggagtcattcccagataatagaacttttaatgataaatcccctaatgccaagggtctagtgtgttcttagagggtatactgggaagagtgtggagatttaagtgctgctctgctgctctggatggctgcagcagacggacccaacgctgttgtcagtagtggtggcggttcttgcggtgctgctgacgctagtcttctggaagttaatccggagcagaaggagcagtcagagagctgttcttcttgttggcctttgtgattccgggaaaacgttgctctttgtcaggttgttaacaggcctttatagagacactcagacgtccattactgacagctgtgctgtatacagagtcaacaataacaggggcaatagtctgaccttgattgaccttcccggccatgagagtttgaggcttcagttcttagagcggtttaagtcttcagccagcttttgtttttgttgagaaacaaaccaagagaaacaagtttcttgtgaattctgaagggctattattggccccaaaaggccccaatctcccaataaagggggggccccgcccgccc

SEQ ID NO: 296447 - DNA, 276 bp, Homo sapiens
agctttgttttgagaattaggacagtttattgtttgaccaacatgctgagtcttttccacattttacacagtttaatgtgaaatcaacatggcggctatgtcttctgagcccataacagatggaattgccaccctctgtgctcctcacagccaatcactttaaagggatgggtgaggggaaagtgaggggagaagtggacacacaccctgggaagcagagttgccgccaaggtaatgggggttccccgccttctgcatgggccatctaaagcccca

SEQ ID NO: 296448 - DNA, 2927 bp, Homo sapiens
tgcttgagttcttcacaagtctcacgtcacttagcgacggtcgggaactcctcagtggtagtttcgggagccattcattcattttattcatttcatcattctttcaacagtcataacgtaggtgacgacgactgactcatctcttaaaagatgtgtgtgtccctcgacaaataacctgtctgcccctatcgttctgtaggaggacggagtcccagagaactacaactcccatcaagcacttgggggatcgccgcggctgagggagagactatggcttaggaaccaccattcgcgtgaggctctgctccccgcgcctgcgcagagtgcagggccacggtcgcttttgctgtaccggggaccacgcgtctcatccatggcttccgcggactcgcgccgggtggcagatggcggcggtgccgggggcaccttccagccctacctagacaccttgcggcaggagctgcagcagacggacccaacgctgttgtcagtagtggtggcggttcttgcggtgctgctgacgctagtcttctggaagttaatccggagcagaaggagcagtcagagagctgttcttcttgttggcctttgtgattccgggaaaacgttgctctttgtcaggttgttaacaggcctttatagagacactcagacgtccattactgacagctgtgctgtatacagagtcaacaataacaggggcaatagtctgaccttgattgaccttcccggccatgagagtttgaggcttcagttcttagagcggtttaagtcttcagccagggctattgtgttgttgtggatagtgcagcattccagcgagaggtgaaagatgtggctgagtttctgtatcaagtcctcattgacagtatgggtctgaagaatacaccatcattcttaatagcctgcaataagcaagatattgcaatggcaaaatcagcaaagttaattcaacagcagctggagaaagaactcaacaccttacgagttacccgttctgctgcccccagcacactggacagttccagcactgcccctgctcagctggggaagaaaggcaaagagtttgaattctcacagttgcccctcaaagtggagttcctggagtgcagtgccaagggtggaagaggggacgtgggctctgctgacatccaggacttggagaaatggctggctaaaattgcctgagaggcagctctaaagcacaagacctggatgtgtgacacacagttttggaaaaaggtctgtggtagtctggagttgatgaggaaggggtacaagatgtggttagaaacatttctttgttctggaaacaaagtactgttgaaaccagcttggaattttttttttttttttttttaagttcagttctcccttatggctgcctttcaaacaagtaccttttatctgatgcctgtatcttccctttgttaaggtgtaacttgatgtagggtcaaggtttttgtgacaacaggcagactccacacagagaggatatgatgagaatatggccatcacctgaaaagttttcttatcttctgtgcttttggtccctggaaacaaatccgcctatgtatgaagctagttgatttccagttgcactatttccagttgcctctgaagttcacaggcaatacattgtctagtcctttgcgaatttctctgatttgtgggcacagttatgaagtttccccacatgtgaagacaggtacaaaatagcagagccaagcagacagtgggtctattcttcattagctcagtgacttgtccacactcgtcttagcacttacgtttcaaaagcttgtcacaaacccttggagtcattcccagataatagaactggaaatgataaatcccctaatgccaagggtctagtgtgttcttagtggttatactgggaagtgtgtggagatttaggtgctgctctgctgctctggatggctgaaggctcctgggccatcttcatgtgctgcttgaagagctcctattttgtactcctggctagaatgctgtggaacaaatacaaagtgaaaaaagttctctgtagatttctgaagtgcatattcattgatgccaagaaaaaaaaaaagttgcctttttgaagtgatgttttttgctgtcttcttaaacacaaggcttttttgaatgattagtatatttcatggtaaagaaaacagcctgtctggctcaaagcaattaaatagaatgtaatggtgagtacaaatgagtgcacatgtcaggactcaggtctaactccttgtctcctgagcctaaagattgcaacatacacaagaacacactcctattcctaccccacacactcagggacaagcccaactaaagcttacaaggagaccagggtggctctgtccaggggagaagccagttatggaacagtgcattgagagccatggtaggagaggcccacagttctctggagcatgcagcaggggcaccccacctggccttgaggatcagggggagtcaaaggataaagcatggggctgatgacgtctgagggagtgtgatcctccatgtatggcctctgcctgctgtctcacatgtcccttctggtggtcacttgggctctaggagtatacgtcacctcagaccatctggcagaaatactccaggctcctaccccaaagcacatgtcagccttgctgctggagcacgaagacaatgtaaatgaaacatgaaatggaggagttgtgagaccctgaccctgagtccttacttgaaagctgctgctggtgttctgagtgtcttttggactcttatttcttgcccttttccttattaggcaagcagtaacttaggaagtaggtaagagcaataaatgtgacatgttatgtcatcatagtaggagctcatgggaataaaagtcagtggcttgatgcttctgttagaggcatgtgtccctctca

SEQ ID NO: 296449 - DNA, 2868 bp, Homo sapiens
tgcttgagttcttcacaagtctcacgtcacttagcgacggtcgggaactcctcagtggtagtttcgggagccattcattcattttattcatttcatcattctttcaacagtcataacgtaggtgacgacgactgactcatctcttaaaagatgtgtgtgtccctcgacaaataacctgtctgcccctatcgttctgtaggaggacggagtcccagagaactacaactcccatcaagcacttgggggatcgccgcggctgagggagagactatggcttaggaaccaccattcgcgtgaggctctgctccccgcgcctgcgcagagtgcagggccacggtcgcttttgctgtaccggggaccacgcgtctcatccatggcttccgcggactcgcgccgggtggcagatggcggcggtgccgggggcaccttccagccctacctagacaccttgcggcaggagctgcagcagacggacccaacgctgttgtcagtagtggtggcggttcttgcggtgctgctgacgctagtcttctggaagttaatccggagcagaaggagcagtcagagagctgttcttcttgttggcctttgtgattccgggaaaacgttgctctttgtcaggttgttaacaggcctttatagagacactcagacgtccattactgacagctgtgctgtatacagagtcaacaataacaggggcaatagtctgaccttgattgaccttcccggccatgagagtttgaggcttcagttcttagagcggtttaagtcttcagccagggctattgtgttgttgtggatagtgcagcattccagcgagaggtgaaagatgtggctgagtttctgtatcaagtcctcattgacagtatgggtctgaagaatacaccatcattcttaatagcctgcaataagcaagatattgcaatggcaaaatcagcaaagttaattcaacagcagctggagaaagaactcaacaccttacgagttacccgttctgctgcccccagcacactggacagttccagcactgcccctgctcagctggggaagaaaggcaaagagtttgaattctcacagttgcccctcaaagtggagttcctggagtgcagtgccaagggtggaagaggggacgtgggctctgctgacatccaggacttggagaaatggctggctaaaattgcctgagaggcagctctaaagcacaagacctggatgtgtgacacacagttttggaaaaaggtctgtggtagtctggagttgatgaggaaggggtacaagatgtggttagaaacatttctttgttctggaaacaaagtactgttgaaaccagcttggaattttttttttttttttttttaagttcagttctcccttatggctgcctttcaaacaagtaccttttatctgatgcctgtatcttccctttgttaaggtgtaacttgatgtagggtcaaggtttttgtgacaacaggcagactccacacagagaggatatgatgagaatatggccatcacctgaaaagttttcttatcttctgtgcttttggtccctggaaacaaatccgcctatgtatgaagctagttgatttccagttgcactatttccagttgcctctgaagttcacaggcaatacattgtctagtcctttgcgaatttctctgatttgtgggcacagttatgaagtttccccacatgtgaagacaggtacaaaatagcagagccaagcagacagtgggtctattcttcattagctcagtgacttgtccacactcgtcttagcacttacgtttcaaaagcttgtcacaaacccttggagtcattcccagataatagaactggaaatgataaatcccctaatgccaagggtctagtgtgttcttagtggttatactgggaagtgtgtggagatttaggtgctgctctgctgctctggatggctgaaggctcctgggccatcttcatgtgctgcttgaagagctcctattttgtactcctggctagaatgctgtggaacaaatacaaagtgaaaaaagttctctgtagatttctgaagtgcatattcattgatgccaagaaaaaaaaaaagttgcctttttgaagtgatgttttttgctgtcttcttaaacacaaggcttttttgaatgattagtatatttcatggtaaagaaaacagcctgtctggctcaaagcaattaaatagaatgtaatggtgagtacaaatgagtgcacatgtcaggactcaggtctaactccttgtctcctgagcctaaagattgcaacatacacaagaacacactcctattcctaccccacacactcagggacaagcccaactaaagcttacaaggagaccagggtggctctgtccaggggagaagccagttatggaacagtgcattgagagccatggtaggagaggcccacagttctctggagcatgcagcaggggcaccccacctggccttgaggatcagggggagtcaaaggataaagcatggggctgatgacgtctgagggagtgtgatcctccatgtatggcctctgcctgctgtctcacatgtcccttctggtggtcacttgggctctaggagtatacgtcacctcagaccatctggcagaaatactccaggctcctaccccaaagcacatgtcagccttgctgctggagcacgaagacaatgtaaatgaaacatgaaatggaggagttgtgagaccctgaccctgagtccttacttgaaagctgctgctggtgttctgagtgtcttttggactcttatttcttgcccttttccttattaggcaagcagtaacttaggaagtaggtaagagcaataaatgtgacatgttatgtcatcatagtagga

SEQ ID NO: 296450 - DNA, 2593 bp, Homo sapiens
  misc_feature (21)..(21): n is a, c, g, or t
  misc_feature (28)..(28): n is a, c, g, or t
atggcaggctggtactgtctngggttanggatctcatccatggcttccgcggactcgcgccgggtggcagatggcggcggtgccgggggcaccttccagccctacctagacaccttgcggcaggagctgcagcagacggacccaacgctgttgtcagtagtggtggcggttcttgcggtgctgctgacgctagtcttctggaagttaatccggagcagaaggagcagtcagagagctgttcttcttgttggcctttgtgattccgggaaaacgttgctctttgtcaggttgttaacaggcctttatagagacactcagacgtccattactgacagctgtgctgtatacagagtcaacaataacaggggcaatagtctgaccttgattgaccttcccggccatgagagtttgaggcttcagttcttagagcggtttaagtcttcagccagggctattgtgttgttgtggatagtgcagcattccagcgagaggtgaaagatgtggctgagtttctgtatcaagtcctcattgacagtatgggtctgaagaatacaccatcattcttaatagcctgcaataagcaagatattgcaatggcaaaatcagcaaagttaattcaacagcagctggagaaagaactcaacaccttacgagttacccgttctgctgcccccagcacactggacagttccagcactgcccctgctcagctggggaagaaaggcaaagagtttgaattctcacagttgcccctcaaagtggagttcctggagtgcagtgccaagggtggaagaggggacgtgggctctgctgacatccaggacttggagaaatggctggctaaaattgcctgagaggcagctctaaagcacaagacctggatgtgtgacacacagttttggaaaaaggtctgtggtagtctggagttgatgaggaaggggtacaagatgtggttagaaacatttctttgttctggaaacaaagtactgttgaaaccagcttggaattttttttttttttttttttaagttcagttctcccttatggctgcctttcaaacaagtaccttttatctgatgcctgtatcttccctttgttaaggtgtaacttgatgtagggtcaaggtttttgtgacaacaggcagactccacacagagaggatatgatgagaatatggccatcacctgaaaagttttcttatcttctgtgcttttggtccctggaaacaaatccgcctatgtatgaagctagttgatttccagttgcactatttccagttgcctctgaagttcacaggcaatacattgtctagtcctttgcgaatttctctgatttgtgggcacagttatgaagtttccccacatgtgaagacaggtacaaaatagcagagccaagcagacagtgggtctattcttcattagctcagtgacttgtccacactcgtcttagcacttacgtttcaaaagcttgtcacaaacccttggagtcattcccagataatagaactggaaatgataaatcccctaatgccaagggtctagtgtgttcttagtggttatactgggaagtgtgtggagatttaggtgctgctctgctgctctggatggctgaaggctcctgggccatcttcatgtgctgcttgaagagctcctattttgtactcctggctagaatgctgtggaacaaatacaaagtgaaaaaagttctctgtagatttctgaagtgcatattcattgatgccaagaaaaaaaaaaagttgcctttttgaagtgatgttttttgctgtcttcttaaacacaaggcttttttgaatgattagtatatttcatggtaaagaaaacagcctgtctggctcaaagcaattaaatagaatgtaatggtgagtacaaatgagtgcacatgtcaggactcaggtctaactccttgtctcctgagcctaaagattgcaacatacacaagaacacactcctattcctaccccacacactcagggacaagcccaactaaagcttacaaggagaccagggtggctctgtccaggggagaagccagttatggaacagtgcattgagagccatggtaggagaggcccacagttctctggagcatgcagcaggggcaccccacctggccttgaggatcagggggagtcaaaggataaagcatggggctgatgacgtctgagggagtgtgatcctccatgtatggcctctgcctgctgtctcacatgtcccttctggtggtcacttgggctctaggagtatacgtcacctcagaccatctggcagaaatactccaggctcctaccccaaagcacatgtcagccttgctgctggagcacgaagacaatgtaaatgaaacatgaaatggaggagttgtgagaccctgaccctgagtccttacttgaaagctgctgctggtgttctgagtgtcttttggactcttatttcttgcccttttccttattaggcaagcagtaacttaggaagtaggtaagagcaataaatgtgacatgttatgtcatcatagtaggagctcatgggaataaaagtcagtggcttgatgcttctgttagaggcatgtgtccctctca

SEQ ID NO: 296451 - DNA, 2593 bp, Homo sapiens
ggctagtcgaggccggtgttaatcggccgaggctcatccatggcttccgcggactcgcgccgggtggcagatggcggcggtgccgggggcaccttccagccctacctagacaccttgcggcaggagctgcagcagacggacccaacgctgttgtcagtagtggtggcggttcttgcggtgctgctgacgctagtcttctggaagttaatccggagcagaaggagcagtcagagagctgttcttcttgttggcctttgtgattccgggaaaacgttgctctttgtcaggttgttaacaggcctttatagagacactcagacgtccattactgacagctgtgctgtatacagagtcaacaataacaggggcaatagtctgaccttgattgaccttcccggccatgagagtttgaggcttcagttcttagagcggtttaagtcttcagccagggctattgtgttgttgtggatagtgcagcattccagcgagaggtgaaagatgtggctgagtttctgtatcaagtcctcattgacagtatgggtctgaagaatacaccatcattcttaatagcctgcaataagcaagatattgcaatggcaaaatcagcaaagttaattcaacagcagctggagaaagaactcaacaccttacgagttacccgttctgctgcccccagcacactggacagttccagcactgcccctgctcagctggggaagaaaggcaaagagtttgaattctcacagttgcccctcaaagtggagttcctggagtgcagtgccaagggtggaagaggggacgtgggctctgctgacatccaggacttggagaaatggctggctaaaattgcctgagaggcagctctaaagcacaagacctggatgtgtgacacacagttttggaaaaaggtctgtggtagtctggagttgatgaggaaggggtacaagatgtggttagaaacatttctttgttctggaaacaaagtactgttgaaaccagcttggaattttttttttttttttttttaagttcagttctcccttatggctgcctttcaaacaagtaccttttatctgatgcctgtatcttccctttgttaaggtgtaacttgatgtagggtcaaggtttttgtgacaacaggcagactccacacagagaggatatgatgagaatatggccatcacctgaaaagttttcttatcttctgtgcttttggtccctggaaacaaatccgcctatgtatgaagctagttgatttccagttgcactatttccagttgcctctgaagttcacaggcaatacattgtctagtcctttgcgaatttctctgatttgtgggcacagttatgaagtttccccacatgtgaagacaggtacaaaatagcagagccaagcagacagtgggtctattcttcattagctcagtgacttgtccacactcgtcttagcacttacgtttcaaaagcttgtcacaaacccttggagtcattcccagataatagaactggaaatgataaatcccctaatgccaagggtctagtgtgttcttagtggttatactgggaagtgtgtggagatttaggtgctgctctgctgctctggatggctgaaggctcctgggccatcttcatgtgctgcttgaagagctcctattttgtactcctggctagaatgctgtggaacaaatacaaagtgaaaaaagttctctgtagatttctgaagtgcatattcattgatgccaagaaaaaaaaaaagttgcctttttgaagtgatgttttttgctgtcttcttaaacacaaggcttttttgaatgattagtatatttcatggtaaagaaaacagcctgtctggctcaaagcaattaaatagaatgtaatggtgagtacaaatgagtgcacatgtcaggactcaggtctaactccttgtctcctgagcctaaagattgcaacatacacaagaacacactcctattcctaccccacacactcagggacaagcccaactaaagcttacaaggagaccagggtggctctgtccaggggagaagccagttatggaacagtgcattgagagccatggtaggagaggcccacagttctctggagcatgcagcaggggcaccccacctggccttgaggatcagggggagtcaaaggataaagcatggggctgatgacgtctgagggagtgtgatcctccatgtatggcctctgcctgctgtctcacatgtcccttctggtggtcacttgggctctaggagtatacgtcacctcagaccatctggcagaaatactccaggctcctaccccaaagcacatgtcagccttgctgctggagcacgaagacaatgtaaatgaaacatgaaatggaggagttgtgagaccctgaccctgagtccttacttgaaagctgctgctggtgttctgagtgtcttttggactcttatttcttgcccttttccttattaggcaagcagtaacttaggaagtaggtaagagcaataaatgtgacatgttatgtcatcatagtaggagctcatgggaataaaagtcagtggcttgatgcttctgttagaggcatgtgtccctctca

SEQ ID NO: 296452 - DNA, 2680 bp, Homo sapiens
tgcttgagttcttcacaagtctcacgtcacttagcgacggtcgggaactcctcagtggtagtttcgggagccattcattcattttattcatttcatcattctttcaacagtcataacgtaggtgacgacgactgactcatctcttaaaagatgtgtgtgtccctcgacaaataacctgtctgcccctatcgttctgtaggaggacggagtcccagagaactacaactcccatcaagcacttgggggatcgccgcggctgagggagagactatggcttaggaaccaccattcgcgtgaggctctgctccccgcgcctgcgcagagtgcagggccacggtcgcttttgctgtaccggggaccacgcgtctcatccatggcttccgcggactcgcgccgggtggcagatggcggcggtgccgggggcaccttccagccctacctagacaccttgcggcaggagctgcagcagacggacccaacgctgttgtcagtagtggtggcggttcttgcggtgctgctgacgctagtcttctggaagttaatccggagcagaaggagcagtcagagagctgttcttcttgttggcctttgtgattccgggaaaacgttgctctttgtcaggttgttaacaggcctttatagagacactcagacgtccattactgacagctgtgctgtatacagagtcaacaataacaggggcaatagtctgaccttgattgaccttcccggccatgagagtttgaggcttcagttcttagagcggtttaagtcttcagccagggctattgtgttgttgtggatagtgcagcattccagcgagaggtgaaagatgtggctgagtttctgtatcaagtcctcattgacagtatgggtctgaagaatacaccatcattcttaatagcctgcaataagcaagatattgcaatggcaaaatcagcaaagttaattcaacagcagctggagaaagaactcaacaccttacgagttacccgttctgctgcccccagcacactggacagttccagcactgcccctgctcagctggggaagaaaggcaaagagtttgaattctcacagttgcccctcaaagtggagttcctggagtgcagtgccaagggtggaagaggggacgtgggctctgctgacatccaggacttggagaaatggctggctaaaattgcctgagaggcagctctaaagcacaagacctggatgtgtgacacacagttttggaaaaaggtctgtggtagtctggagttgatgaggaaggggtacaagatgtggttagaaacatttctttgttctggaaacaaagtactgttgaaaccagcttggaattttttttttttttttttttaagttcagttctcccttatggctgcctttcaaacaagtaccttttatctgatgcctgtatcttccctttgttaaggtgtaacttgatgtagggtcaaggtttttgtgacaacaggcagactccacacagtgggtctattcttcattagctcagtgacttgtccacactcgtcttagcacttacgtttcaaaagcttgtcacaaacccttggagtcattcccagataatagaactggaaatgataaatcccctaatgccaagggtctagtgtgttcttagtggttatactgggaagtgtgtggagatttaggtgctgctctgctgctctggatggctgaaggctcctgggccatcttcatgtgctgcttgaagagctcctattttgtactcctggctagaatgctgtggaacaaatacaaagtgaaaaaagttctctgtagatttctgaagtgcatattcattgatgccaagaaaaaaaaaaagttgcctttttgaagtgatgttttttgctgtcttcttaaacacaaggcttttttgaatgattagtatatttcatggtaaagaaaacagcctgtctggctcaaagcaattaaatagaatgtaatggtgagtacaaatgagtgcacatgtcaggactcaggtctaactccttgtctcctgagcctaaagattgcaacatacacaagaacacactcctattcctaccccacacactcagggacaagcccaactaaagcttacaaggagaccagggtggctctgtccaggggagaagccagttatggaacagtgcattgagagccatggtaggagaggcccacagttctctggagcatgcagcaggggcaccccacctggccttgaggatcagggggagtcaaaggataaagcatggggctgatgacgtctgagggagtgtgatcctccatgtatggcctctgcctgctgtctcacatgtcccttctggtggtcacttgggctctaggagtatacgtcacctcagaccatctggcagaaatactccaggctcctaccccaaagcacatgtcagccttgctgctggagcacgaagacaatgtaaatgaaacatgaaatggaggagttgtgagaccctgaccctgagtccttacttgaaagctgctgctggtgttctgagtgtcttttggactcttatttcttgcccttttccttattaggcaagcagtaacttaggaagtaggtaagagcaataaatgtgacatgttatgtcatcatagtaggagctcatgggaataaaagtcagtggcttgatgcttctgttagaggcatgtgtccctctca

SEQ ID NO: 296453 - DNA, 2892 bp, Homo sapiens
tgcttgagttcttcacaagtctcacgtcacttagcgacggtcgggaactcctcagtggtagtttcgggagccattcattcattttattcatttcatcattctttcaacagtcataacgtaggtgacgacgactgactcatctcttaaaagatgtgtgtgtccctcgacaaataacctgtctgcccctatcgttctgtaggaggacggagtcccagagaactacaactcccatcaagcacttgggggatcgccgcggctgagggagagactatggcttaggaaccaccattcgcgtgaggctctgctccccgcgcctgcgcagagtgcagggccacggtcgcttttgctgtaccggggaccacgcgtctcatccatggcttccgcggactcgcgccgggtggcagatggcggcggtgccgggggcaccttccagccctacctagacaccttgcggcaggagctgcagcagacggacccaacgctgttgtcagtagtggtggcggttcttgcggtgctgctgacgctagtcttctggaagttaatccggagcagaaggagcagtcagagagctgttcttcttgttggcctttgtgattccgggaaaacgttgctctttgtcaggttgttaacaggcctttatagagacactcagacgtccattactgacagctgtgctgtatacagagtcaacaataacaggggcaatagtctgaccttgattgaccttcccggccatgagagtttgaggcttcagttcttagagcggtttaagtcttcagccagggctattgtgttgttgtggatagtgcagcattccagcgagaggtgaaagatgtggctgagtttctgtatcaagtcctcattgacagtatgggtctgaagaatacaccatcattcttaatagcctgcaataagcaagatattgcaatggcaaaatcagcaaagttaattcaacagcagctggagaaagaactcaacaccttacgagttacccgttctgctgcccccagcacactggacagttccagcactgcccctgctcagctggggaagaaaggcaaagagtttgaattctcacagttgcccctcaaagtggagttcctggagtgcagtgccaagggtggaagaggggacgtgggctctgctgacatccaggacttggagaaatggctggctaaaattgcctgagaggcagctctaaagcacaagacctggatgtgtgacacacagttttggaaaaaggtctgtggtagtctggagttgatgaggaaggggtacaagatgtggttagaaacatttctttgttctggaaacaaagtactgttgaaaccagcttggaattttttttttttttttttttaagttcagttctcccttatggctgcctttcaaacaagtaccttttatctgatgcctgtatcttccctttgttaaggtgtaacttgatgtagggtcaaggtttttgtgacaacaggcagactccacacagagaggatatgatgagaatatggccatcacctgaaaagttttcttatcttctgtgcttttggtccctggaaacaaatccgcctatgtatgaagctagttgatttccagttgcactatttccagttgcctctgaagttcacaggcaatacattgtctagtcctttgcgaatttctctgatttgtgggcacagttatgaagtttccccacatgtgaagacaggtacaaaatagcagagccaagcagacagtgggtctattcttcattagctcagtgacttgtccacactcgtcttagcacttacgtttcaaaagcttgtcacaaacccttggagtcattcccagataatagaactggaaatgataaatcccctaatgccaagggtctagtgtgttcttagtggttatactctctggatggctgaaggctcctgggccatcttcatgtgctgcttgaagagctcctattttgtactcctggctagaatgctgtggaacaaatacaaagtgaaaaaagttctctgtagatttctgaagtgcatattcattgatgccaagaaaaaaaaaaagttgcctttttgaagtgatgttttttgctgtcttcttaaacacaaggcttttttgaatgattagtatatttcatggtaaagaaaacagcctgtctggctcaaagcaattaaatagaatgtaatggtgagtacaaatgagtgcacatgtcaggactcaggtctaactccttgtctcctgagcctaaagattgcaacatacacaagaacacactcctattcctaccccacacactcagggacaagcccaactaaagcttacaaggagaccagggtggctctgtccaggggagaagccagttatggaacagtgcattgagagccatggtaggagaggcccacagttctctggagcatgcagcaggggcaccccacctggccttgaggatcagggggagtcaaaggataaagcatggggctgatgacgtctgagggagtgtgatcctccatgtatggcctctgcctgctgtctcacatgtcccttctggtggtcacttgggctctaggagtatacgtcacctcagaccatctggcagaaatactccaggctcctaccccaaagcacatgtcagccttgctgctggagcacgaagacaatgtaaatgaaacatgaaatggaggagttgtgagaccctgaccctgagtccttacttgaaagctgctgctggtgttctgagtgtcttttggactcttatttcttgcccttttccttattaggcaagcagtaacttaggaagtaggtaagagcaataaatgtgacatgttatgtcatcatagtaggagctcatgggaataaaagtcagtggcttgatgcttctgttagaggcatgtgtccctctca

SEQ ID NO: 296454 - DNA, 3140 bp, Homo sapiens
tgcttgagttcttcacaagtctcacgtcacttagcgacggtcgggaactcctcagtggtagtttcgggagccattcattcattttattcatttcatcattctttcaacagtcataacgtaggtgacgacgactgactcatctcttaaaagatgtgtgtgtccctcgacaaataacctgtctgcccctatcgttctgtaggaggacggagtcccagagaactacaactcccatcaagcacttgggggatcgccgcggctgagggagagactatggcttaggaaccaccattcgcgtgaggctctgctccccgcgcctgcgcagagtgcagggccacggtcgcttttgctgtaccggggaccacgcgtctcatccatggcttccgcggactcgcgccgggtggcagatggcggcggtgccgggggcaccttccagccctacctagacaccttgcggcaggagctgcagcagacggacccaacgctgttgtcagtagtggtggcggttcttgcggtgctgctgacgctagtcttctggaagttaatccggagcagaaggagcagtcagagagctgttcttcttgttggcctttgtgattccgggaaaacgttgctctttgtcaggttgttaacaggcctttatagagacactcagacgtccattactgacagctgtgctgtatacagagtcaacaataacaggggcaatagtctgaccttgattgaccttcccggccatgagagtttgaggcttcagttcttagagcggtttaagtcttcagccagggctattgtgttgttgtggatagtgcagcattccagcgagaggtgaaagatgtggctgagtttctgtatcaagtcctcattgacagtatgggtctgaagaatacaccatcattcttaatagcctgcaataagcaagatattgcaatggcaaaatcagcaaagttaattcaacagcagctggagaaagaactcaacaccttacgagttacccgttctgctgcccccagcacactggacagttccagcactgcccctgctcagctggggaagaaaggcaaagagtttgaattctcacagttgcccctcaaagtggagttcctggagtgcagtgccaagggtggaagaggggacgtgggctctgctgacatccaggacttggagaaatggctggctaaaattgcctgagaggcagctctaaagcacaagacctggatgtgtgacacacagttttggaaaaagagatactgaaactggtctggccattgctcccctcagacctgggaacatgactgaatgtttaaggatgacaagaagagagcagcgatagatagcaaggaggcctctgaccaagggaaactgctgccaacagctaccaagccaactagccttggatcacacaactgcagccatggtgctcatgattctgatgtcacaccttcatgttgatgtatgtatgatcacccagcaagttaggagtgatcagaaccaatgtgtttccacttgtaaataggctgtttgctttttccatcttacactcaactttcctgatgcctgcagaacaggagctttgttgataagcttttaagattcacccccttcactcccaccatccccaaaaaagaaggccaagaggatcctgctaatctgccaggtcacgtctagtctttggggagagggactgaattgctcaattgagaacatttcctcaaaggaatcctccaatttgccctctgctaacccatctggattcagcaaagatgcaatgctcttgctggggtgctgaggcaatgccatgacatcttcttcaagagcacctaacagtttattatggaaccttaactctgtgccaattctacctgcaagcaaggggacagggatggtgcctgctcaagacaaaaatcagggaaccaacaacttctgaaaaagaggtctggctgcctttccacaccccaggaagggaggggcggaaaccgcacgtgccgaagggagcgccatggaaccactgagatgggaggatgggaggaagccaccctcagcctcagaggccaaggggctggggagaacccaaactcaaagagaggatgttgtgtgcatgctaggaaaggcaggactcactaaggccatgtcaaaccaaatgctatcttttactgctcctctaggccaggatggaaacacagtccacggtgccttggatgtgtgtgcccctgagaagggaactgagtttctactgttttatgggatgtttttttaaaaaagctaatctttagtgccaagaaaataaaaatctaccatacgttcattcactgagacccagtgcagattcctgtaaatggggcggtctcagaggccacaggtgatggcccccgctgccaaccaggcaggacactgtcatgtggactcctgtaaattctctcgaggtaagtaagcactcttccaacaagcaccacttgggggtgtgcccatggtggggggacactggcccacacaggcatgcacacccgtgcatataaagtacatagagaaatggtggagatattcccgtgggctatgtttgcctgtagtttaacacaactatgcattattttattgatggcaagacaatcacaagttatttgacaatattaagtatttcttatttcaacacgttgcagtacttttgaatttccaaaacttatcacaatgcaagttccaacttgagagcaggagaaacaagaatatacattgagcacatgtatctccgtgaggatgtgtttgtggaaggtgtatacacaagtctatctctatatataattatgtacacacatataaaaactaaacacatgacatctgaaacacgttcaaacattggtccttgccttctgcaagaggtgctcagtgggatcctgcttcctctcttcttcacctgaagataaattccttgctagagatgagctctggcatacagcctcctaggcagagggtgtgtggcaggcccactgcacaaatatcagtcctgccagattctgctgcacttactgcctgccatttcagattaatttctgagaagtttcaaaattcattccaacgaccttgtggagttcagcccaccataccccagatggtcattcatcccatctatgacatgcccagcagcagcc

SEQ ID NO: 296455 - DNA, 1952 bp, Homo sapiens
tgcttgagttcttcacaagtctcacgtcacttagcgacggtcgggaactcctcagtggtagtttcgggagccattcattcattttattcatttcatcattctttcaacagtcataacgtaggtgacgacgactgactcatctcttaaaagatgtgtgtgtccctcgacaaataacctgtctgcccctatcgttctgtaggaggacggagtcccagagaactacaactcccatcaagcacttgggggatcgccgcggctgagggagagactatggcttaggaaccaccattcgcgtgaggctctgctccccgcgcctgcgcagagtgcagggccacggtcgcttttgctgtaccggggaccacgcgtctcatccatggcttccgcggactcgcgccgggtggcagatggcggcggtgccgggggcaccttccagccctacctagacaccttgcggcaggagctgcagcagacggacccaacgctgttgtcagtagtggtggcggttcttgcggtgctgctgacgctagtcttctggaagttaatccggagcagaaggagcagtcagagagctgttcttcttgttggcctttgtgattccgggaaaacgttgctctttgtcaggttgttaacaggcctttatagagacactcagacgtccattactgacagctgtgctgtatacagagtcaacaataacaggggcaatagtctgaccttgattgaccttcccggccatgagagtttgaggcttcagttcttagagcggtttaagtcttcagccagggctattgtgttgttgtggatagtgcagcattccagcgagaggtgaaagatgtggctgagtttctgtatcaagtcctcattgacagtatgggtctgaagaatacaccatcattcttaatagcctgcaataagcaagatattgcaatggcaaaatcagcaaagttaattcaacagcagctggagaaagaactcaacaccttacgagttacccgttctgctgcccccagcacactggacagttccagcactgcccctgctcagctggggaagaaaggcaaagagtttgaattctcacagttgcccctcaaagtggagttcctggagtgcagtgccaagggtggaagaggggacgtgggctctgctgacatccaggacttggagaaatggctggctaaaattgcctgagaggcagctctaaagcacaagacctggatgtgtgacacacagttttggaaaaaggtctgtggtagtctggagttgatgaggaaggggtacaagatgtggttagaaacatttctttgttctggaaacaaagtactgttgaaaccagcttggaattttttttttttttttttttaagttcagttctcccttatggctgcctttcaaacaagtaccttttatctgatgcctgtatcttccctttgttaaggtgtaacttgatgtagggtcaaggtttttgtgacaacaggcagactccacacagagaggatatgatgagaatatggccatcacctgaaaagttttcttatcttctgtgcttttggtccctggaaacaaatccgcctatgtatgaagctagttgatttccagttgcactatttccagttgcctctgaagttcacaggcaatacattgtctagtcctttgcgaatttctctgatttgtgggcacagttatgaagtttccccacatgtgaagacaggtacaaaatagcagagccaagcagacagtgggtctattcttcattagctcagtgacttgtccacactcgtcttagcacttacgtttcaaaagcttgtcacaaacccttggagtcattcccagataatagaactggaaatgataaatcccctaatgccaagggtctagtgtgttcttagtggttatactcacagggggggaatttaagagctgatattataatatggataagcttacgggctcaa

SEQ ID NO: 296456 - DNA, 3082 bp, Homo sapiens
  misc_feature (489)..(489): n is a, c, g, or t
aaatctgtgcaggatactgattgcctgcttctgaactgtgggtatggttggctgtggataatgtagaacatgtaagaaatgatggtctgctgcatgtaccaggccacatctaagagtcttattgttgagcacagccacgtttacactgaatataaactttattcaccattccaggccttgaccttatattcaggaatggcagcctggcatggtgaatagaacttattagggtgcatcgtagatttgctcagtaggggctcaggaattgacacaaatgctgacggagttggaacaagtaaattatatgtctggaagataaatatttaaataattagattaagggtggaaatgataaaagtgtactttgttataaagattggagatcccagtaagagtaatatgctctatgaaaaattgtaagttcttatattacattattagtttatgagtacttgttactgttttcacatttttgcttatactcatacngtactcctactttgctatactcacactggtttatctcccaagcctcaggtagatcatgcttccctgactcccccagacaggtttttcctgtaccctcaaaacatttatcagtgttctcattttatatttatgtgtaattttacattatgttcacctttctcataaattttgccagatcaggaaccgtgtctttggccactgttacatccccagaacgttgactagtgttttatgagtagaagatgctttgtgaacatttgtttggttaattaggtaccagtttggtagccaatatatgatactaaaggtttatattgtgaacgtggaactgtattgaaacgttaatgttattgctgccatccccagggcaatagtctgaccttgattgaccttcccggccatgagagtttgaggcttcagttcttagagcggtttaagtcttcagccagggctattgtgttgttgtggatagtgcagcattccagcgagaggtgaaagatgtggctgagtttctgtatcaagtcctcattgacagtatgggtctgaagaatacaccatcattcttaatagcctgcaataagcaagatattgcaatggcaaaatcagcaaagttaattcaacagcagctggagaaagaactcaacaccttacgagttacccgttctgctgcccccagcacactggacagttccagcactgcccctgctcagctggggaagaaaggcaaagagtttgaattctcacagttgcccctcaaagtggagttcctggagtgcagtgccaagggtggaagaggggacgtgggctctgctgacatccaggacttggagaaatggctggctaaaattgcctgagaggcagctctaaagcacaagacctggatgtgtgacacacagttttggaaaaaggtctgtggtagtctggagttgatgaggaaggggtacaagatgtggttagaaacatttctttgttctggaaacaaagtactgttgaaaccagcttggaattttttttttttttttttttaagttcagttctcccttatggctgcctttcaaacaagtaccttttatctgatgcctgtatcttccctttgttaaggtgtaacttgatgtagggtcaaggtttttgtgacaacaggcagactccacacagagaggatatgatgagaatatggccatcacctgaaaagttttcttatcttctgtgcttttggtccctggaaacaaatccgcctatgtatgaagctagttgatttccagttgcactatttccagttgcctctgaagttcacaggcaatacattgtctagtcctttgcgaatttctctgatttgtgggcacagttatgaagtttccccacatgtgaagacaggtacaaaatagcagagccaagcagacagtgggtctattcttcattagctcagtgacttgtccacactcgtcttagcacttacgtttcaaaagcttgtcacaaacccttggagtcattcccagataatagaactggaaatgataaatcccctaatgccaagggtctagtgtgttcttagtggttatactgggaagtgtgtggagatttaggtgctgctctgctgctctggatggctgaaggctcctgggccatcttcatgtgctgcttgaagagctcctattttgtactcctggctagaatgctgtggaacaaatacaaagtgaaaaaagttctctgtagatttctgaagtgcatattcattgatgccaagaaaaaaaaaaagttgcctttttgaagtgatgttttttgctgtcttcttaaacacaaggcttttttgaatgattagtatatttcatggtaaagaaaacagcctgtctggctcaaagcaattaaatagaatgtaatggtgagtacaaatgagtgcacatgtcaggactcaggtctaactccttgtctcctgagcctaaagattgcaacatacacaagaacacactcctattcctaccccacacactcagggacaagcccaactaaagcttacaaggagaccagggtggctctgtccaggggagaagccagttatggaacagtgcattgagagccatggtaggagaggcccacagttctctggagcatgcagcaggggcaccccacctggccttgaggatcagggggagtcaaaggataaagcatggggctgatgacgtctgagggagtgtgatcctccatgtatggcctctgcctgctgtctcacatgtcccttctggtggtcacttgggctctaggagtatacgtcacctcagaccatctggcagaaatactccaggctcctaccccaaagcacatgtcagccttgctgctggagcacgaagacaatgtaaatgaaacatgaaatggaggagttgtgagaccctgaccctgagtccttacttgaaagctgctgctggtgttctgagtgtcttttggactcttatttcttgcccttttccttattaggcaagcagtaacttaggaagtaggtaagagcaataaatgtgacatgttatgtcatcatagtaggagctcatgggaataaaagtcagtggcttgatgcttctgttagaggcatgtgtccctctca

SEQ ID NO: 296457 - DNA, 1769 bp, Homo sapiens
tgcttgagttcttcacaagtctcacgtcacttagcgacggtcgggaactcctcagtggtagtttcgggagccattcattcattttattcatttcatcattctttcaacagtcataacgtaggtgacgacgactgactcatctcttaaaagatgtgtgtgtccctcgacaaataacctgtctgcccctatcgttctgtaggaggacggagtcccagagaactacaactcccatcaagcacttgggggatcgccgcggctgagggagagactatggcttaggaaccaccattcgcgtgaggctctgctccccgcgcctgcgcagagtgcagggccacggtcgcttttgctgtaccggggaccacgcgtctcatccatggcttccgcggactcgcgccgggtggcagatggcggcggtgccgggggcaccttccagccctacctagacaccttgcggcaggagctgcagcagacggacccaacgctgttgtcagtagtggtggcggttcttgcggtgctgctgacgctagtcttctggaagttaatccggagcagaaggagcagtcagagagctgttcttcttgttggcctttgtgattccgggaaaacgttgctctttgtcaggttgttaacaggcctttatagagacactcagacgtccattactgacagctgtgctgtatacagagtcaacaataacaggggcaatagtctgaccttgattgaccttcccggccatgagagtttgaggcttcagttcttagagcggtttaagtcttcagccagggctattgtgttgttgtggatagtgcagcattccagcgagaggtgaaagatgtggctgagtttctgtatcaagtcctcattgacagtatgggtctgaagaatacaccatcattcttaatagcctgcaataagcaagatattgcaatggcaaaatcagcaaagttaattcaacagcagctggagaaagaactcaacaccttacgagttacccgttctgctgcccccagcacactggacagttccagcactgcccctgctcagctggggaagaaaggcaaagagtttgaattctcacagttgcccctcaaagtggagttcctggagtgcagtgccaagggtggaagaggggacgtgggctctgctgacatccaggacttggagaaatggctggctaaaattgcctgagaggcagctctaaagcacaagacctggatgtgtgacacacagttttggaaaaaggtctgtggtagtctggagttgatgaggaaggggtacaagatgtggttagaaacatttctttgttctggaaacaaagtactgttgaaaccagcttggaattttttttttttttttttttaagttcagttctcccttatggctgcctttcaaacaagtaccttttatctgatgcctgtatcttccctttgttaaggtgtaacttgatgtagggtcaaggtttttgtgacaacaggcagactccacacagagaggatatgatgagaatatggccatcacctgaaaagttttcttatcttctgtgcttttggtccctggaaacaaatccgcctatgtatgaagctagttgatttccagttgcactatttccagttgcctctgaagttcacaggcaatacattgtctagtcctttgcgaatttctctgatttgtgggcacagttatgaagtttccccacatgtgatagagtaaggaaacaactcactacggcgttttccccagacagaaggtaaaatcctgttcccgtgaaa

SEQ ID NO: 296458 - DNA, 3116 bp, Homo sapiens
tgcttgagttcttcacaagtctcacgtcacttagcgacggtcgggaactcctcagtggtagtttcgggagccattcattcattttattcatttcatcattctttcaacagtcataacgtaggtgacgacgactgactcatctcttaaaagatgtgtgtgtccctcgacaaataacctgtctgcccctatcgttctgtaggaggacggagtcccagagaactacaactcccatcaagcacttgggggatcgccgcggctgagggagagactatggcttaggaaccaccattcgcgtgaggctctgctccccgcgcctgcgcagagtgcagggccacggtcgcttttgctgtaccggggaccacgcgtctcatccatggcttccgcggactcgcgccgggtggcagatggcggcggtgccgggggcaccttccagccctacctagacaccttgcggcaggagctgcagcagacggacccaacgctgttgtcagtagtggtggcggttcttgcggtgctgctgacgctagtcttctggaagttaatccggagcagaaggagcagtcagagagctgttcttcttgttggcctttgtgattccgggaaaacgttgctctttgtcaggttgttaacaggcctttatagagacactcagacgtccattactgacagctgtgctgtatacagagtcaacaataacaggggcaatagtctgaccttgattgaccttcccggccatgagagtttgaggcttcagttcttagagcggtttaagtcttcagccagggctattgtgttgttgtggatagtgcagcattccagcgagaggtgaaagatgtggctgagtttctgtatcaagtcctcattgacagtatgggtctgaagaatacaccatcattcttaatagcctgcaataagcaagatattgcaatggcaaaatcagcaaagttaattcaacagcagctggagaaagaactcaacaccttacgagttacccgttctgctgcccccagcacactggacagttccagcactgcccctgctcagctggggaagaaaggcaaagagtttgaattctcacagttgcccctcaaagtggagttcctggagtgcagtgccaagggtggaagaggggacgtgggctctgctgacatccaggacttggagaaatggctggctaaaattgcctgagaggcagctctaaagcacaagacctggatgtgtgacacacagttttggaaaaagagatactgaaactggtctggccattgctcccctcagacctgggaacatgactgaatgtttaaggatgacaagaagagagcagcgatagatagcaaggaggcctctgaccaagggaaactgctgccaacagctaccaagccaactagccttggatcacacaactgcagccatggtgctcatgattctgatgtcacaccttcatgttgatgtatgtatgatcacccagcaagttaggagtgatcagaaccaatgtgtttccacttgtaaataggctgtttgctttttccatcttacactcaactttcctgatgcctgcagaacaggagctttgttgataagcttttaagattcacccccttcactcccaccatccccaaaaaagaaggccaagaggatcctgctaatctgccaggtcacgtctagtctttggggagagggactgaattgctcaattgagaacatttcctcaaaggaatcctccaatttgccctctgctaacccatctggattcagcaaagatgcaatgctcttgctggggtgctgaggcaatgccatgacatcttcttcaagagcacctaacagtttattatggaaccttaactctgtgccaattctacctgcaagcaaggggacagggatggtgcctgctcaagacaaaaatcagggaaccaacaacttctgaaaaagaggtctggctgcctttccacaccccaggaagggaggggcggaaaccgcacgtgccgaagggagcgccatggaaccactgagatgggaggatgggaggaagccaccctcagcctcagaggccaaggggctggggagaacccaaactcaaagagaggatgttgtgtgcatgctaggaaaggcaggactcactaaggccatgtcaaaccaaatgctatcttttactgctcctctaggccaggatggaaacacagtccacggtgccttggatgtgtgtgcccctgagaagggaactgagtttctactgttttatgggatgtttttttaaaaaagctaatctttagtgccaagaaaataaaaatctaccatacgttcattcactgagacccagtgcagattcctgtaaatggggcggtctcagaggccacaggtgatggcccccgctgccaaccaggcaggacactgtcatgtggactcctgtaaattctctcgaggtaagtaagcactcttccaacaagcaccacttgggggtgtgcccatggtggggggacactggcccacacaggcatgcacacccgtgcatataaagtacatagagaaatggtggagatattcccgtgggctatgtttgcctgtagtttaacacaactatgcattattttattgatggcaagacaatcacaagttatttgacaatattaagtatttcttatttcaacacgttgcagtacttttgaatttccaaaacttatcacaatgcaagttccaacttgagagcaggagaaacaagaatatacattgagcacatgtatctccgtgaggatgtgtttgtggaaggtgtatacacaagtctatatataaaaactaaacacatgacatctgaaacacgttcaaacattggtccttgccttctgcaagaggtgctcagtgggatcctgcttcctctcttcttcacctgaagataaattccttgctagagatgagctctggcatacagcctcctaggcagagggtgtgtggcaggcccactgcacaaatatcagtcctgccagattctgctgcacttactgcctgccatttcagattaatttctgagaagtttcaaaattcattccaacgaccttgtggagttcagcccaccataccccagatggtcattcatcccatctatgacatgcccagcagcagcc

SEQ ID NO: 296459 - DNA, 2310 bp, Homo sapiens
tgcttgagttcttcacaagtctcacgtcacttagcgacggtcgggaactcctcagtggtagtttcgggagccattcattcattttattcatttcatcattctttcaacagtcataacgtaggtgacgacgactgactcatctcttaaaagatgtgtgtgtccctcgacaaataacctgtctgcccctatcgttctgtaggaggacggagtcccagagaactacaactcccatcaagcacttgggggatcgccgcggctgagggagagactatggcttaggaaccaccattcgcgtgaggctctgctccccgcgcctgcgcagagtgcagggccacggtcgcttttgctgtaccggggaccacgcgtctcatccatggcttccgcggactcgcgccgggtggcagatggcggcggtgccgggggcaccttccagccctacctagacaccttgcggcaggagctgcagcagacggacccaacgctgttgtcagtagtggtggcggttcttgcggtgctgctgacgctagtcttctggaagttaatccggagcagaaggagcagtcagagagctgttcttcttgttggcctttgtgattccgggaaaacgttgctctttgtcaggttgttaacaggcctttatagagacactcagacgtccattactgacagctgtgctgtatacagagtcaacaataacaggggcaatagtctgaccttgattgaccttcccggccatgagagtttgaggcttcagttcttagagcggtttaagtcttcagccagggctattgtgttgttgtggatagtgcagcattccagcgagaggtgaaagatgtggctgagtttctgtatcaagtcctcattgacagtatgggtctgaagaatacaccatcattcttaatagcctgcaataagcaagatattgcaatggcaaaatcagcaaagttaattcaacagcagctggagaaagaactcaacaccttacgagttacccgttctgctgcccccagcacactggacagttccagcactgcccctgctcagctggggaagaaaggcaaagagtttgaattctcacagttgcccctcaaagtggagttcctggagtgcagtgccaagggtggaagaggggacgtgggctctgctgacatccaggacttggagaaatggctggctaaaattgcctgagaggcagctctaaagcacaagacctggatgtgtgacacacagttttggaaaaagagatactgaaactggtctggccattgctcccctcagacctgggaacatgactgaatgtttaaggatgacaagaagagagcagcgatagatagcaaggaggcctctgaccaagggaaactgctgccaacagctaccaagccaactagccttggatcacacaactgcagccatggtgctcatgattctgatgtcacaccttcatgttgatgtatgtatgatcacccagcaagttaggagtgatcagaaccaatgtgtttccacttgtaaataggctgtttgctttttccatcttacactcaactttcctgatgcctgcagaacaggagctttgttgataagcttttaagattcacccccttcactcccaccatccccaaaaaagaaggccaagaggatcctgctaatctgccaggtcacgtctagtctttggggagagggactgaattgctcaattgagaacatttcctcaaaggaatcctccaatttgccctctgctaacccatctggattcagcaaagatgcaatgctcttgctggggtgctgaggcaatgccatgacatcttcttcaagagcacctaacagtttattatggaaccttaactctgtgccaattctacctgcaagcaaggggacagggatggtgcctgctcaagacaaaaatcagggaaccaacaacttctgaaaaagaggtctggctgcctttccacaccccaggaagggaggggcggaaaccgcacgtgccgaagggagcgccatggaaccactgagatgggaggatgggaggaagccaccctcagcctcagaggccaaggggctggggagaacccaaactcaaagagaggatgttgtgtgcatgctaggaaaggcaggactcactaaggccatgtcaaaccaaatgctatcttttactgctcctctaggccaggatggaaacacagtccacggtgccttggatgtgtgtgcccctgagaagggaactgagtttctactgttttatgggatgtttttttaaaaaaaaaataatttgtgcagggaaaaataaaactaccaactgttaaaacataaaaa

SEQ ID NO: 296460 - DNA, 2066 bp, Homo sapiens
tgcttgagttcttcacaagtctcacgtcacttagcgacggtcgggaactcctcagtggtagtttcgggagccattcattcattttattcatttcatcattctttcaacagtcataacgtaggtgacgacgactgactcatctcttaaaagatgtgtgtgtccctcgacaaataacctgtctgcccctatcgttctgtaggaggacggagtcccagagaactacaactcccatcaagcacttgggggatcgccgcggctgagggagagactatggcttaggaaccaccattcgcgtgaggctctgctccccgcgcctgcgcagagtgcagggccacggtcgcttttgctgtaccggggaccacgcgtctcatccatggcttccgcggactcgcgccgggtggcagatggcggcggtgccgggggcaccttccagccctacctagacaccttgcggcaggagctgcagcagacggacccaacgctgttgtcagtagtggtggcggttcttgcggtgctgctgacgctagtcttctggaagttaatccggagcagaaggagcagtcagagagctgttcttcttgttggcctttgtgattccgggaaaacgttgctctttgtcaggttgttaacaggcctttatagagacactcagacgtccattactgacagctgtgctgtatacagagtcaacaataacaggggcaatagtctgaccttgattgaccttcccggccatgagagtttgaggcttcagttcttagagcggtttaagtcttcagccagggctattgtgttgttgtggatagtgcagcattccagcgagaggtgaaagatgtggctgagtttctgtatcaagtcctcattgacagtatgggtctgaagaatacaccatcattcttaatagcctgcaataagcaagatattgcaatggcaaaatcagcaaagttaattcaacagcagctggagaaagaactcaacaccttacgagttacccgttctgctgcccccagcacactggacagttccagcactgcccctgctcagctggggaagaaaggcaaagagtttgaattctcacagttgcccctcaaagtggagttcctggagtgcagtgccaagggtggaagaggggacgtgggctctgctgacatccaggacttggagaaatggctggctaaaattgcctgagaggcagctctaaagcacaagacctggatgtgtgacacacagttttggaaaaagagatactgaaactggtctggccattgctcccctcagacctgggaacatgactgaatgtttaaggatgacaagaagagagcagcgatagatagcaaggaggcctctgaccaagggaaactgctgccaacagctaccaagccaactagccttggatcacacaactgcagccatggtgctcatgattctgatgtcacaccttcatgttgatgtatgtatgatcacccagcaagttaggagtgatcagaaccaatgtgtttccacttgtaaataggctgtttgctttttccatcttacactcaactttcctgatgcctgcagaacaggagctttgttgataagcttttaagattcacccccttcactcccaccatccccaaaaaagaaggccaagaggatcctgctaatctgccaggtcacgtctagtctttggggagagggactgaattgctcaattgagaacatttcctcaaaggaatcctccaatttgccctctgctaacccatctggattcagcaaagatgcaatgctcttgctggggtgctgaggcaatgccatgacatcttcttcaagagcacctaacagtttattatggaaccttaactctgtgccaattctacctgcaagcaaggggacagggatggtgcctgctcaagacaaaaatcagggaaccaacaacttctgaaaaagaggtctggctgcctttccacaccccaggaagggaggggcggaaaccgcacgtgccgaagggagcgccatggaaccactgagatgggaggatgggagttaccaccataatcatagttaacgggggggtcctctagatc

SEQ ID NO: 296461 - DNA, 3058 bp, Homo sapiens
agctttgttttgagaattaggacagtttattgtttgaccaacatgctgagtcttttccacattttacacagtttaatgtgaaatcaacatggcggctatgtcttctgagcccataacagatggaattgccaccctctgtgctcctcacagccaatcactttaaagggatgggtgaggggaaagtgaggggagaagtggacacacaccgcgagatgcaggctggccttcaatgctatggaggcttcccacctcctgaaggaaccatctaaacccctgctgcaaggatttcctgatgaaaccacacactgctgggagtgccaaccagacaggggtctggagtccaaggagtttgcacattgagatcccaaggttttggaacacctaaatagttcatgtcaaacaaaaattcaaagggtgtcctgatctgtgtgggtgcccatgacaatcaatcagagtagacttggggactggcccttgtgcagtagaggagcccaaaataccaccaatattctcactcatatgctgggaagaacctagtgtcctaaccaaaaagagtagagatggtctgaggaacacacccacacacagcagtccttgctgtgtaataaatatggagtcacatttgttcacacacagggcagcaatggatgaaaaatggaaacttcactggttctgatcactcctaacttgctgggtgatcttaataagcaagttgcccttctccatcctggttttcctgcctgtagacaggaaaagttgtgacagctctgcttcacatagctgtaacaaggtgacaatgcctcacattctttggggagaggcagttcggaaacgagtgtgcgcacaatctgctcggttgatgcacacagacatccttctgttcagctgcccctcaagtggctcagacatgcctcactgtcctcggctacctggtcccatctcatcctgacatcctcacctgccttccatcttgtgaaggaatgaggctgctctacctgcaggatgctgaagccaggagggccatccctttattgtcacaactggtatcccagggcagggcctccccgcactggctagccaccaggatgatgcagacgttgcaccccagatgtgtctgcactcttaactaccaccatttcaatccttgtttctgttgccagagatactgaaactggtctggccattgctcccctcagacctgggaacatgactgaatgtttaaggatgacaagaagagagcagcgatagatagcaaggaggcctctgaccaagggaaactgctgccaacagctaccaagccaactagccttggatcacacaactgcagccatggtgctcatgattctgatgtcacaccttcatgttgatgtatgtatgatcacccagcaagttaggagtgatcagaaccaatgtgtttccacttgtaaataggctgtttgctttttccatcttacactcaactttcctgatgcctgcagaacaggagctttgttgataagcttttaagattcacccccttcactcccaccatccccaaaaaagaaggccaagaggatcctgctaatctgccaggtcacgtctagtctttggggagagggactgaattgctcaattgagaacatttcctcaaaggaatcctccaatttgccctctgctaacccatctggattcagcaaagatgcaatgctcttgctggggtgctgaggcaatgccatgacatcttcttcaagagcacctaacagtttattatggaaccttaactctgtgccaattctacctgcaagcaaggggacagggatggtgcctgctcaagacaaaaatcagggaaccaacaacttctgaaaaagaggtctggctgcctttccacaccccaggaagggaggggcggaaaccgcacgtgccgaagggagcgccatggaaccactgagatgggaggatgggaggaagccaccctcagcctcagaggccaaggggctggggagaacccaaactcaaagagaggatgttgtgtgcatgctaggaaaggcaggactcactaaggccatgtcaaaccaaatgctatcttttactgctcctctaggccaggatggaaacacagtccacggtgccttggatgtgtgtgcccctgagaagggaactgagtttctactgttttatgggatgtttttttaaaaaagctaatctttagtgccaagaaaataaaaatctaccatacgttcattcactgagacccagtgcagattcctgtaaatggggcggtctcagaggccacaggtgatggcccccgctgccaaccaggcaggacactgtcatgtggactcctgtaaattctctcgaggtaagtaagcactcttccaacaagcaccacttgggggtgtgcccatggtggggggacactggcccacacaggcatgcacacccgtgcatataaagtacatagagaaatggtggagatattcccgtgggctatgtttgcctgtagtttaacacaactatgcattattttattgatggcaagacaatcacaagttatttgacaatattaagtatttcttatttcaacacgttgcagtacttttgaatttccaaaacttatcacaatgcaagttccaacttgagagcaggagaaacaagaatatacattgagcacatgtatctccgtgaggatgtgtttgtggaaggtgtatacacaagtctatctctatatataattatgtacacacatataaaaactaaacacatgacatctgaaacacgttcaaacattggtccttgccttctgcaagaggtgctcagtgggatcctgcttcctctcttcttcacctgaagataaattccttgctagagatgagctctggcatacagcctcctaggcagagggtgtgtggcaggcccactgcacaaatatcagtcctgccagattctgctgcacttactgcctgccatttcagattaatttctgagaagtttcaaaattcattccaacgaccttgtggagttcagcccaccataccccagatggtcattcatcccatctatgacatgcccagcagcagcc

SEQ ID NO: 296462 - DNA, 2754 bp, Homo sapiens
agctttgttttgagaattaggacagtttattgtttgaccaacatgctgagtcttttccacattttacacagtttaatgtgaaatcaacatgtcaaacaaaaattcaaagggtgtcctgatctgtgtgggtgcccatgacaatcaatcagagtagacttggggactggcccttgtgcagtagaggagcccaaaataccaccaatattctcactcatatgctgggaagaacctagtgtcctaaccaaaaagagtagagatggtctgaggaacacacccacacacagcagtccttgctgtgtaataaatatggagtcacatttgttcacacacagggcagcaatggatgaaaaatggaaacttcactggttctgatcactcctaacttgctgggtgatcttaataagcaagttgcccttctccatcctggttttcctgcctgtagacaggaaaagttgtgacagctctgcttcacatagctgtaacaaggtgacaatgcctcacattctttggggagaggcagttcggaaacgagtgtgcgcacaatctgctcggttgatgcacacagacatccttctgttcagctgcccctcaagtggctcagacatgcctcactgtcctcggctacctggtcccatctcatcctgacatcctcacctgccttccatcttgtgaaggaatgaggctgctctacctgcaggatgctgaagccaggagggccatccctttattgtcacaactggtatcccagggcagggcctccccgcactggctagccaccaggatgatgcagacgttgcaccccagatgtgtctgcactcttaactaccaccatttcaatccttgtttctgttgccagagatactgaaactggtctggccattgctcccctcagacctgggaacatgactgaatgtttaaggatgacaagaagagagcagcgatagatagcaaggaggcctctgaccaagggaaactgctgccaacagctaccaagccaactagccttggatcacacaactgcagccatggtgctcatgattctgatgtcacaccttcatgttgatgtatgtatgatcacccagcaagttaggagtgatcagaaccaatgtgtttccacttgtaaataggctgtttgctttttccatcttacactcaactttcctgatgcctgcagaacaggagctttgttgataagcttttaagattcacccccttcactcccaccatccccaaaaaagaaggccaagaggatcctgctaatctgccaggtcacgtctagtctttggggagagggactgaattgctcaattgagaacatttcctcaaaggaatcctccaatttgccctctgctaacccatctggattcagcaaagatgcaatgctcttgctggggtgctgaggcaatgccatgacatcttcttcaagagcacctaacagtttattatggaaccttaactctgtgccaattctacctgcaagcaaggggacagggatggtgcctgctcaagacaaaaatcagggaaccaacaacttctgaaaaagaggtctggctgcctttccacaccccaggaagggaggggcggaaaccgcacgtgccgaagggagcgccatggaaccactgagatgggaggatgggaggaagccaccctcagcctcagaggccaaggggctggggagaacccaaactcaaagagaggatgttgtgtgcatgctaggaaaggcaggactcactaaggccatgtcaaaccaaatgctatcttttactgctcctctaggccaggatggaaacacagtccacggtgccttggatgtgtgtgcccctgagaagggaactgagtttctactgttttatgggatgtttttttaaaaaagctaatctttagtgccaagaaaataaaaatctaccatacgttcattcactgagacccagtgcagattcctgtaaatggggcggtctcagaggccacaggtgatggcccccgctgccaaccaggcaggacactgtcatgtggactcctgtaaattctctcgaggtaagtaagcactcttccaacaagcaccacttgggggtgtgcccatggtggggggacactggcccacacaggcatgcacacccgtgcatataaagtacatagagaaatggtggagatattcccgtgggctatgtttgcctgtagtttaacacaactatgcattattttattgatggcaagacaatcacaagttatttgacaatattaagtatttcttatttcaacacgttgcagtacttttgaatttccaaaacttatcacaatgcaagttccaacttgagagcaggagaaacaagaatatacattgagcacatgtatctccgtgaggatgtgtttgtggaaggtgtatacacaagtctatctctatatataattatgtacacacatataaaaactaaacacatgacatctgaaacacgttcaaacattggtccttgccttctgcaagaggtgctcagtgggatcctgcttcctctcttcttcacctgaagataaattccttgctagagatgagctctggcatacagcctcctaggcagagggtgtgtggcaggcccactgcacaaatatcagtcctgccagattctgctgcacttactgcctgccatttcagattaatttctgagaagtttcaaaattcattccaacgaccttgtggagttcagcccaccataccccagatggtcattcatcccatctatgacatgcccagcagcagcc

SEQ ID NO: 296463 - DNA, 2363 bp, Homo sapiens
gtgtcatcccccttcgtgtgtcatcccccttcgtggttttcctgcctgtagacaggaaaagttgtgacagctctgcttcacatagctgtaacaaggtgacaatgcctcacattctttggggagaggcagttcggaaacgagtgtgcgcacaatctgctcggttgatgcacacagacatccttctgttcagctgcccctcaagtggctcagacatgcctcactgtcctcggctacctggtcccatctcatcctgacatcctcacctgccttccatcttgtgaaggaatgaggctgctctacctgcaggatgctgaagccaggagggccatccctttattgtcacaactggtatcccagggcagggcctccccgcactggctagccaccaggatgatgcagacgttgcaccccagatgtgtctgcactcttaactaccaccatttcaatccttgtttctgttgccagagatactgaaactggtctggccattgctcccctcagacctgggaacatgactgaatgtttaaggatgacaagaagagagcagcgatagatagcaaggaggcctctgaccaagggaaactgctgccaacagctaccaagccaactagccttggatcacacaactgcagccatggtgctcatgattctgatgtcacaccttcatgttgatgtatgtatgatcacccagcaagttaggagtgatcagaaccaatgtgtttccacttgtaaataggctgtttgctttttccatcttacactcaactttcctgatgcctgcagaacaggagctttgttgataagcttttaagattcacccccttcactcccaccatccccaaaaaagaaggccaagaggatcctgctaatctgccaggtcacgtctagtctttggggagagggactgaattgctcaattgagaacatttcctcaaaggaatcctccaatttgccctctgctaacccatctggattcagcaaagatgcaatgctcttgctggggtgctgaggcaatgccatgacatcttcttcaagagcacctaacagtttattatggaaccttaactctgtgccaattctacctgcaagcaaggggacagggatggtgcctgctcaagacaaaaatcagggaaccaacaacttctgaaaaagaggtctggctgcctttccacaccccaggaagggaggggcggaaaccgcacgtgccgaagggagcgccatggaaccactgagatgggaggatgggaggaagccaccctcagcctcagaggccaaggggctggggagaacccaaactcaaagagaggatgttgtgtgcatgctaggaaaggcaggactcactaaggccatgtcaaaccaaatgctatcttttactgctcctctaggccaggatggaaacacagtccacggtgccttggatgtgtgtgcccctgagaagggaactgagtttctactgttttatgggatgtttttttaaaaaagctaatctttagtgccaagaaaataaaaatctaccatacgttcattcactgagacccagtgcagattcctgtaaatggggcggtctcagaggccacaggtgatggcccccgctgccaaccaggcaggacactgtcatgtggactcctgtaaattctctcgaggtaagtaagcactcttccaacaagcaccacttgggggtgtgcccatggtggggggacactggcccacacaggcatgcacacccgtgcatataaagtacatagagaaatggtggagatattcccgtgggctatgtttgcctgtagtttaacacaactatgcattattttattgatggcaagacaatcacaagttatttgacaatattaagtatttcttatttcaacacgttgcagtacttttgaatttccaaaacttatcacaatgcaagttccaacttgagagcaggagaaacaagaatatacattgagcacatgtatctccgtgaggatgtgtttgtggaaggtgtatacacaagtctatctctatatataattatgtacacacatataaaaactaaacacatgacatctgaaacacgttcaaacattggtccttgccttctgcaagaggtgctcagtgggatcctgcttcctctcttcttcacctgaagataaattccttgctagagatgagctctggcatacagcctcctaggcagagggtgtgtggcaggcccactgcacaaatatcagtcctgccagattctgctgcacttactgcctgccatttcagattaatttctgagaagtttcaaaattcattccaacgaccttgtggagttcagcccaccataccccagatggtcattcatcccatctatgacatgcccagcagcagcc

SEQ ID NO: 296464 - DNA, 2410 bp, Homo sapiens
aaataaaaatctaccatacgttcattcactgagacccagtgcagattcctgtaaatggggcggtctcagaggccacaggtgatggcccccgctgccaaccaggaaaagttgtgacagctctgcttcacatagctgtaacaaggtgacaatgcctcacattctttggggagaggcagttcggaaacgagtgtgcgcacaatctgctcggttgatgcacacagacatccttctgttcagctgcccctcaagtggctcagacatgcctcactgtcctcggctacctggtcccatctcatcctgacatcctcacctgccttccatcttgtgaaggaatgaggctgctctacctgcaggatgctgaagccaggagggccatccctttattgtcacaactggtatcccagggcagggcctccccgcactggctagccaccaggatgatgcagacgttgcaccccagatgtgtctgcactcttaactaccaccatttcaatccttgtttctgttgccagagatactgaaactggtctggccattgctcccctcagacctgggaacatgactgaatgtttaaggatgacaagaagagagcagcgatagatagcaaggaggcctctgaccaagggaaactgctgccaacagctaccaagccaactagccttggatcacacaactgcagccatggtgctcatgattctgatgtcacaccttcatgttgatgtatgtatgatcacccagcaagttaggagtgatcagaaccaatgtgtttccacttgtaaataggctgtttgctttttccatcttacactcaactttcctgatgcctgcagaacaggagctttgttgataagcttttaagattcacccccttcactcccaccatccccaaaaaagaaggccaagaggatcctgctaatctgccaggtcacgtctagtctttggggagagggactgaattgctcaattgagaacatttcctcaaaggaatcctccaatttgccctctgctaacccatctggattcagcaaagatgcaatgctcttgctggggtgctgaggcaatgccatgacatcttcttcaagagcacctaacagtttattatggaaccttaactctgtgccaattctacctgcaagcaaggggacagggatggtgcctgctcaagacaaaaatcagggaaccaacaacttctgaaaaagaggtctggctgcctttccacaccccaggaagggaggggcggaaaccgcacgtgccgaagggagcgccatggaaccactgagatgggaggatgggaggaagccaccctcagcctcagaggccaaggggctggggagaacccaaactcaaagagaggatgttgtgtgcatgctaggaaaggcaggactcactaaggccatgtcaaaccaaatgctatcttttactgctcctctaggccaggatggaaacacagtccacggtgccttggatgtgtgtgcccctgagaagggaactgagtttctactgttttatgggatgtttttttaaaaaagctaatctttagtgccaagaaaataaaaatctaccatacgttcattcactgagacccagtgcagattcctgtaaatggggcggtctcagaggccacaggtgatggcccccgctgccaaccaggcaggacactgtcatgtggactcctgtaaattctctcgaggtaagtaagcactcttccaacaagcaccacttgggggtgtgcccatggtggggggacactggcccacacaggcatgcacacccgtgcatataaagtacatagagaaatggtggagatattcccgtgggctatgtttgcctgtagtttaacacaactatgcattattttattgatggcaagacaatcacaagttatttgacaatattaagtatttcttatttcaacacgttgcagtacttttgaatttccaaaacttatcacaatgcaagttccaacttgagagcaggagaaacaagaatatacattgagcacatgtatctccgtgaggatgtgtttgtggaaggtgtatacacaagtctatctctatatataattatgtacacacatataaaaactaaacacatgacatctgaaacacgttcaaacattggtccttgccttctgcaagaggtgctcagtgggatcctgcttcctctcttcttcacctgaagataaattccttgctagagatgagctctggcatacagcctcctaggcagagggtgtgtggcaggcccactgcacaaatatcagtcctgccagattctgctgcacttactgcctgccatttcagattaatttctgagaagtttcaaaattcattccaacgaccttgtggagttcagcccaccataccccagatggtcattcatcccatctatgacatgcccagcagcagcc

SEQ ID NO: 296465 - DNA, 1421 bp, Homo sapiens
aaaggacggcgctcgcgatctagaacggacgcgtgggtcgacgatatcggggaatccggacgtctacataccggttctggtacaagatcgtctagtagtgtaccagttgggtctgaggtcactggttgtcaattgtctagtcctttgcgaatttctctgatttgtgggcacagttatgaagtttccccacatgtgaagacaggtacaaaatagcagagccaagcagacagtgggtctattcttcattagctcagtgacttgtccacactcgtcttagcacttacgtttcaaaagcttgtcacaaacccttggagtcattcccagataatagaactggaaatgataaatcccctaatgccaagggtctagtgtgttcttagtggttatactgggaagtgtgtggagatttaggtgctgctctgctgctctggatggctgaaggctcctgggccatcttcatgtgctgcttgaagagctcctattttgtactcctggctagaatgctgtggaacaaatacaaagtgaaaaaagttctctgtagatttctgaagtgcatattcattgatgccaagaaaaaaaaaaagttgcctttttgaagtgatgttttttgctgtcttcttaaacacaaggcttttttgaatgattagtatatttcatggtaaagaaaacagcctgtctggctcaaagcaattaaatagaatgtaatggtgagtacaaatgagtgcacatgtcaggactcaggtctaactccttgtctcctgagcctaaagattgcaacatacacaagaacacactcctattcctaccccacacactcagggacaagcccaactaaagcttacaaggagaccagggtggctctgtccaggggagaagccagttatggaacagtgcattgagagccatggtaggagaggcccacagttctctggagcatgcagcaggggcaccccacctggccttgaggatcagggggagtcaaaggataaagcatggggctgatgacgtctgagggagtgtgatcctccatgtatggcctctgcctgctgtctcacatgtcccttctggtggtcacttgggctctaggagtatacgtcacctcagaccatctggcagaaatactccaggctcctaccccaaagcacatgtcagccttgctgctggagcacgaagacaatgtaaatgaaacatgaaatggaggagttgtgagaccctgaccctgagtccttacttgaaagctgctgctggtgttctgagtgtcttttggactcttatttcttgcccttttccttattaggcaagcagtaacttaggaagtaggtaagagcaataaatgtgacatgttatgtcatcatagtaggagctcatgggaataaaagtcagtggcttgatgcttctgttagaggcatgtgtccctctca

SEQ ID NO: 296466 - DNA, 1631 bp, Homo sapiens
tctagaggagtctaggcgcacatttacactcaactttcctgatgcctgcagaacaggagctttgttgataagcttttaagattcacccccttcactcccaccatccccaaaaaagaaggccaagaggatcctgctaatctgccaggtcacgtctagtctttggggagagggactgaattgctcaattgagaacatttcctcaaaggaatcctccaatttgccctctgctaacccatctggattcagcaaagatgcaatgctcttgctggggtgctgaggcaatgccatgacatcttcttcaagagcacctaacagtttattatggaaccttaactctgtgccaattctacctgcaagcaaggggacagggatggtgcctgctcaagacaaaaatcagggaaccaacaacttctgaaaaagaggtctggctgcctttccacaccccaggaagggaggggcggaaaccgcacgtgccgaagggagcgccatggaaccactgagatgggaggatgggaggaagccaccctcagcctcagaggccaaggggctggggagaacccaaactcaaagagaggatgttgtgtgcatgctaggaaaggcaggactcactaaggccatgtcaaaccaaatgctatcttttactgctcctctaggccaggatggaaacacagtccacggtgccttggatgtgtgtgcccctgagaagggaactgagtttctactgttttatgggatgtttttttaaaaaagctaatctttagtgccaagaaaataaaaatctaccatacgttcattcactgagacccagtgcagattcctgtaaatggggcggtctcagaggccacaggtgatggcccccgctgccaaccaggcaggacactgtcatgtggactcctgtaaattctctcgaggtaagtaagcactcttccaacaagcaccacttgggggtgtgcccatggtggggggacactggcccacacaggcatgcacacccgtgcatataaagtacatagagaaatggtggagatattcccgtgggctatgtttgcctgtagtttaacacaactatgcattattttattgatggcaagacaatcacaagttatttgacaatattaagtatttcttatttcaacacgttgcagtacttttgaatttccaaaacttatcacaatgcaagttccaacttgagagcaggagaaacaagaatatacattgagcacatgtatctccgtgaggatgtgtttgtggaaggtgtatacacaagtctatctctatatataattatgtacacacatataaaaactaaacacatgacatctgaaacacgttcaaacattggtccttgccttctgcaagaggtgctcagtgggatcctgcttcctctcttcttcacctgaagataaattccttgctagagatgagctctggcatacagcctcctaggcagagggtgtgtggcaggcccactgcacaaatatcagtcctgccagattctgctgcacttactgcctgccatttcagattaatttctgagaagtttcaaaattcattccaacgaccttgtggagttcagcccaccataccccagatggtcattcatcccatctatgacatgcccagcagcagcc

SEQ ID NO: 296467 - DNA, 1523 bp, Homo sapiens
tgcttgagttcttcacaagtctcacgtcacttagcgacggtcgggaactcctcagtggtagtttcgggagccattcattcattttattcatttcatcattctttcaacagtcataacgtaggtgacgacgactgactcatctcttaaaagatgtgtgtgtccctcgacaaataacctgtctgcccctatcgttctgtaggaggacggagtcccagagaactacaactcccatcaagcacttgggggatcgccgcggctgagggagagactatggcttaggaaccaccattcgcgtgaggctctgctccccgcgcctgcgcagagtgcagggccacggtcgcttttgctgtaccggggaccacgcgtctcatccatggcttccgcggactcgcgccgggtggcagatggcggcggtgccgggggcaccttccagccctacctagacaccttgcggcaggagctgcagcagacggacccaacgctgttgtcagtagtggtggcggttcttgcggtgctgctgacgctagctctggatggctgaaggctcctgggccatcttcatgtgctgcttgaagagctcctattttgtactcctggctagaatgctgtggaacaaatacaaagtgaaaaaagttctctgtagatttctgaagtgcatattcattgatgccaagaaaaaaaaaaagttgcctttttgaagtgatgttttttgctgtcttcttaaacacaaggcttttttgaatgattagtatatttcatggtaaagaaaacagcctgtctggctcaaagcaattaaatagaatgtaatggtgagtacaaatgagtgcacatgtcaggactcaggtctaactccttgtctcctgagcctaaagattgcaacatacacaagaacacactcctattcctaccccacacactcagggacaagcccaactaaagcttacaaggagaccagggtggctctgtccaggggagaagccagttatggaacagtgcattgagagccatggtaggagaggcccacagttctctggagcatgcagcaggggcaccccacctggccttgaggatcagggggagtcaaaggataaagcatggggctgatgacgtctgagggagtgtgatcctccatgtatggcctctgcctgctgtctcacatgtcccttctggtggtcacttgggctctaggagtatacgtcacctcagaccatctggcagaaatactccaggctcctaccccaaagcacatgtcagccttgctgctggagcacgaagacaatgtaaatgaaacatgaaatggaggagttgtgagaccctgaccctgagtccttacttgaaagctgctgctggtgttctgagtgtcttttggactcttatttcttgcccttttccttattaggcaagcagtaacttaggaagtaggtaagagcaataaatgtgacatgttatgtcatcatagtaggagctcatgggaataaaagtcagtggcttgatgcttctgttagaggcatgtgtccctctca

SEQ ID NO: 296468 - DNA, 863 bp, Homo sapiens
gtcataacgtaggtgacgacgactgactcatctcttaaaagatgtgtgtgtccctcgacaaataacctgtctgcccctatcgttctgtaggaggacggagtcccagagaactacaactcccatcaagcacttgggggatcgccgcggctgagggagagactatggcttaggaaccaccattcgcgtgaggctctgctccccgcgcctgcgcagagtgcagggccacggtcgcttttgctgtaccggggaccacgcgtctcatccatggcttccgcggactcgcgccgggtggcagatggcggcggtgccgggggcaccttccagccctacctagacaccttgcggcaggagctgcagcagacggacccaacgctgttgtcagtagtggtggcggttcttgcggtgctgctgacgctaggtaaaaggcggccggtggtcatggcgggtttggggcgggcagaggtccgggctttggctgcaccgctgcaggccggggacgcggggctgagagggcgccttgagggcatcaggagggtgagacccacccagtctacaccccaccctctctcctgaagcagcggcagcagctgggcgttaagggggatgccgggcaacccccggagttaacgtcctggtccttggggcgcagattgctcttcgtcatctgccctgttacgcttgagcgcgctgttcctcgccttccgctgttctcactgcaaagactcagggtcttgacaccaactttcagcctcccgtgtttgcgtgcgggcgctgggataccaaggtagtgagatagcacctgagtcccagtcagagtaaggactgcaaagaaaagttgacagttgacagtgcctggctctcag

SEQ ID NO: 296469 - DNA, 1879 bp, Homo sapiens
accacagcgcgcttgcgcgcaggcccaagcaggcgcccacccagaggggagggaggacgccgtaccccgccctcactgaggcgcggagccggatccggaggcgccgagccgcatccggagccgcgcacgcgcaatctgcatgaacgaaggccagtgcttaaagacgtgccattcattgccagaactcggttctcattggagcggaggaagttcgtgggtggagctggttgtttggcgcctgcgtcttgcggcgagcgggctggcgtgcggcgccgttgcgggcgggagcggctgcaacgccggtgcctgaggagcgatgccgagggaaatcatcaccctacagttgggccagtgcggcaatcagattgggttcgagttctggaaacagctgtgcgccgagcatggtatcagccccgagggcatcgtggaggagttcgccaccgagggcactgaccgcaaggacgtctttttctaccaggcagacgatgagcactacatcccccgggccgtgctgctggacttggaaccccgggtgatccactccatcctcaactccccctatgccaagctctacaacccagagaacatctacctgtcggaacatggaggaggagctggcaacaactgggccagcggattctcccagggagaaaagatccatgaggacatttttgacatcatagaccgggaggcagatggtagtgacagtctagagggctttgtgctgtgtcactccattgctggggggacaggctctggactgggttcctacctcttagaacggctgaatgacaggtatcctaagaagctggtgcagacatactcagtgtttcccaaccaggacgagatgagcgatgtggtggtccagccttacaattcactcctcacactcaagaggctgacgcagaatgcagactgtgtggtggtgctggacaacacagccctgaaccggattgccacagaccgcctgcacatccagaacccatccttctcccagatcaaccagctggtgtctaccatcatgtcagccagcaccaccaccctgcgctaccctggctacatgaacaatgacctcatcggcctcatcgcctcgctcattcccaccccacggctccacttcctcatgaccggctacacccctctcactacggaccagtcagtggccagcgtgaggaagaccacggtcctggatgtcatgaggcggctgctgcagcccaagaacgtgatggtgtccacaggccgagaccgccagaccaaccactgctacatcgccatcctcaacatcatccagggagaggtggaccccacccaggtccacaagagcttgcagaggatccgggaacgcaagttggccaacttcatcccgtggggccccgccagcatccaggtggccctgtcgaggaagtctccctacctgccctcggcccaccgggtcagcgggctcatgatggccaaccacaccagcatctcctcgctcttcgagagaacctgtcgccagtatgacaagctgcgtaagcgggaggccttcctggagcagttccgcaaggaggacatgttcaaggacaactttgatgagatggacacatccagggagattgtgcagcagctcatcgatgagtaccatgcggccacacggccagactacatctcctggggcacccaggagcagtgagtcccccaggacagggaccctcatctgccttactggttggcccaagccctgcctgactgaccaccccctcagagcacagatcagggacctcacgcatctctttctcatatacatggactctctgttggcctgcaaacacatttacttctcctcttatgagactatttatctttaataaagcactggatataaatcaaaaaaaaaatc

SEQ ID NO: 296470 - DNA, 569 bp, Homo sapiens
ctggtacggtccgaaggtcctagatccgggaacgcaagttggccaacttcatcccgtggggccccgccagcatccaggtggccctgtcgaggaagtctccctacctgccctcggcccaccgggtcagcgggctcatgatggccaaccacaccagcatctcctcgctcttcgagagaacctgtcgccagtatgacaagctgcgtaagcgggaggccttcctggagcagttccgcaaggaggacatgttcaaggacaactttgatgagatggacacatccagggagattgtgcagcagctcatcgatgagtaccatgcggccacacggccagactacatctcctggggcacccaggagcagtgagtcccccaggacagggaccctcatctgccttactggttggcccaagccctgcctgactgaccaccccctcagagcacagatcagggacctcacgcatctctttctcatatacatggactctctgttggcctgcaaacacatttacttctcctcttatgagactatttatctttaataaagcactggatataaatcaaaaaaaaaatc

SEQ ID NO: 296471 - DNA, 1962 bp, Homo sapiens
accacagcgcgcttgcgcgcaggcccaagcaggcgcccacccagaggggagggaggacgccgtaccccgccctcactgaggcgcggagccggatccggaggcgccgagccgcatccggagccgcgcacgcgcaatctgcatgaacgaaggccagtgcttaaagacgtgccattcattgccagaactcggttctcattggagcggaggaagttcgtgggtggagctggttgtttggcgcctgcgtcttgcggcgagcgggctggcgtgcggcgccgttgcgggcgggagcggctgcaacgccggtgcctgaggagcgatgccgagggaaatcatcaccctacagttgggccagtgcggcaatcagattgggttcgagttctggaaacagctgtgcgccgagcatggtatcagccccgagggcatcgtggaggagttcgccaccgagggcactgaccgcaaggacgtctttttctaccaggcagacgatgagcactacatcccccgggccgtgctgctggacttggaaccccgggtgatccactccatcctcaactccccctatgccaagctctacaacccagagaacatctacctgtcggaacatggaggaggagctggcaacaactgggccagcggattctcccagggagaaaagatccatgaggacatttttgacatcatagaccgggaggcagatggtagtgacagtctagagggctttgtgctgtgtcactccattgctggggggacaggctctggactgggttcctacctcttagaacggctgaatgacaggtatcctaagaagctggtgcagacatactcagtgtttcccaaccaggacgagatgagcgatgtggtggtccagccttacaattcactcctcacactcaagaggctgacgcagaatgcagactgtgtggtggtgctggacaacacagccctgaaccggattgccacagaccgcctgcacatccagaacccatccttctcccagatcaaccagctggtgtctaccatcatgtcagccagcaccaccaccctgcgctaccctggctacatgaacaatgacctcatcggcctcatcgcctcgctcattcccaccccacggctccacttcctcatgaccggctacacccctctcactacggaccagtcagtggccagcgtgaggaagaccacggtcctggatgtcatgaggcggctgctgcagcccaagaacgtgatggtgtccacaggccgagaccgccagaccaaccactgctacatcgccatcctcaacatcatccagggagaggtggaccccacccaggtaggggaggccccttcatcccacaccctggacctgcaggggtagaggagaggccacctccactgctcctatgcccaccccaggtccacaagagcttgcagaggatccgggaacgcaagttggccaacttcatcccgtggggccccgccagcatccaggtggccctgtcgaggaagtctccctacctgccctcggcccaccgggtcagcgggctcatgatggccaaccacaccagcatctcctcgctcttcgagagaacctgtcgccagtatgacaagctgcgtaagcgggaggccttcctggagcagttccgcaaggaggacatgttcaaggacaactttgatgagatggacacatccagggagattgtgcagcagctcatcgatgagtaccatgcggccacacggccagactacatctcctggggcacccaggagcagtgagtcccccaggacagggaccctcatctgccttactggttggcccaagccctgcctgactgaccaccccctcagagcacagatcagggacctcacgcatctctttctcatatacatggactctctgttggcctgcaaacacatttacttctcctcttatgagactatttatctttaataaagcactggatataaatcaaaaaaaaaatc

SEQ ID NO: 296472 - DNA, 1814 bp, Homo sapiens
accacagcgcgcttgcgcgcaggcccaagcaggcgcccacccagaggggagggaggacgccgtaccccgccctcactgaggcgcggagccggatccggaggcgccgagccgcatccggagccgcgcacgcgcaatctgcatgaacgaaggccagtgcttaaagacgtgccattcattgccagaactcggttctcattggagcggaggaagttcgtgggtggagctggttgtttggcgcctgcgtcttgcggcgagcgggctggcgtgcggcgccgttgcgggcgggagcggctgcaacgccggtgcctgaggagcgatgccgagggaaatcatcaccctacagttgggccagtgcggcaatcagattgggttcgagttctggaaacagctgtgcgccgagcatggtatcagccccgagggcatcgtggaggagttcgccaccgagggcactgaccgcaaggacgtctttttctaccaggcagacgatgagcactacatcccccgggccgtgctgctggacttggaaccccgggtgatccactccatcctcaactccccctatgccaagctctacaacccagagaacatctacctgtcggaacatggaggaggagctggcaacaactgggccagcggattctcccagggagaaaagatccatgaggacatttttgacatcatagaccgggaggcagatggtagtgacagtctagagggctttgtgctgtgtcactccattgctggggggacaggctctggactgggttcctacctcttagaacggctgaatgacaggtatcctaagaagctggtgcagacatactcagtgtttcccaaccaggacgagatgagcgatgtggtggtccagccttacaattcactcctcacactcaagaggctgacgcagaatgcagactgtgtggtggtgctggacaacacagccctgaaccggattgccacagaccgcctgcacatccagaacccatccttctcccagatcaaccagctggtgtctaccatcatgtcagccagcaccaccaccctgcgctaccctggctacatgaacaatgacctctgtctcactgtcctatcaggtggccagcgtgaggaagaccacggtcctggatgtcatgaggcggctgctgcagcccaagaacgtgatggtgtccacaggccgagaccgccagaccaaccactgctacatcgccatcctcaacatcatccagggagaggtggaccccacccaggtccacaagagcttgcagaggatccgggaacgcaagttggccaacttcatcccgtggggccccgccagcatccaggtggccctgtcgaggaagtctccctacctgccctcggcccaccgggtcagcgggctcatgatggccaaccacaccagcatctcctcgctcttcgagagaacctgtcgccagtatgacaagctgcgtaagcgggaggccttcctggagcagttccgcaaggaggacatgttcaaggacaactttgatgagatggacacatccagggagattgtgcagcagctcatcgatgagtaccatgcggccacacggccagactacatctcctggggcacccaggagcagtgagtcccccaggacagggaccctcatctgccttactggttggcccaagccctgcctgactgaccaccccctcagagcacagatcagggacctcacgcatctctttctcatatacatggactctctgttggcctgcaaacacatttacttctcctcttatgagactatttatctttaataaagcactggatataaatcaaaaaaaaaatc

SEQ ID NO: 296473 - DNA, 1763 bp, Homo sapiens
accacagcgcgcttgcgcgcaggcccaagcaggcgcccacccagaggggagggaggacgccgtaccccgccctcactgaggcgcggagccggatccggaggcgccgagccgcatccggagccgcgcacgcgcaatctgcatgaacgaaggccagtgcttaaagacgtgccattcattgccagaactcggttctcattggagcggaggaagttcgtgggtggagctggttgtttggcgcctgcgtcttgcggcgagcgggctggcgtgcggcgccgttgcgggcgggagcggctgcaacgccggtgcctgaggagcgatgccgagggaaatcatcaccctacagttgggccagtgcggcaatcagattgggttcgagttctggaaacagctgtgcgccgagcatggtatcagccccgagggcatcgtggaggagttcgccaccgagggcactgaccgcaaggacgtctttttctaccaggcagacgatgagcactacatcccccgggccgtgctgctggacttggaaccccgggtgatccactccatcctcaactccccctatgccaagctctacaacccagagaacatctacctgtcggaacatggaggaggagctggcaacaactgggccagcggattctcccagggagaaaagatccatgaggacatttttgacatcatagaccgggaggcagatggtagtgacagtctagagggctttgtgctgtgtcactccattgctggggggacaggctctggactgggttcctacctcttagaacggctgaatgacaggtatcctaagaagctggtgcagacatactcagtgtttcccaaccaggacgagatgagcgatgtggtggtccagccttacaattcactcctcacactcaagaggctgacgcagaatgcagactgtgtggtggtgctggacaacacagccctgaaccggattgccacagaccgcctgcacatccagaacccatccttctcccagatcaaccagctggtgtctaccatcatgtcagccagcaccaccaccctgcgctaccctggctacatgaacaatgacctcatcggcctcatcgcctcgctcattcccaccccacggctccacttcctcatgaccggctacacccctctcactacggaccagtcagtggccagcgtgaggaagaccacggtcctggatgtcatgaggcggctgctgcagcccaagaacgtgatggtgtccacaggccgagaccgccagaccaaccactgctacatcgccatcctcaacatcatccagggagaggtggaccccacccaggtccacaagagcttgcagaggatccgggaacgcaagttggccaacttcatcccgtggggccccgccagcatccaggtggccctgtcgaggaagtctccctacctgccctcggcccaccgggtcagcgggctcatgatggccaaccacaccagcatctcctcgctcttcgagagaacctgtcgccagtatgacaagctgcgtaagcgggaggccttcctggagcagttccgcaaggaggacatgttcaaggacaactttgatgagatggacacatccagggagattgtgcagcagctcatcgatgagtaccatgcggccacacggccagactacatctcctggggcacccaggagcagtgagtcccccaggacagggaccctcatctgccttactggttggcccaagccgctgatctgtgctctgagggggtggtcagtcaggcagggcgtc

SEQ ID NO: 296474 - DNA, 1856 bp, Homo sapiens
accacagcgcgcttgcgcgcaggcccaagcaggcgcccacccagaggggagggaggacgccgtaccccgccctcactgaggcgcggagccggatccggaggcgccgagccgcatccggagccgcgcacgcgcaatctgcatgaacgaaggccagtgcttaaagacgtgccattcattgccagaactcggttctcattggagcggaggaagttcgtgggtggagctggttgtttggcgcctgcgtcttgcggcgagcgggctggcgtgcggcgccgttgcgggcgggagcggctgcaacgccggtgcctgaggagcgatgccgagggaaatcatcaccctacagttgggccagtgcggcaatcagattgggttcgagttctggaaacagctgtgcgccgagcatggtatcagccccgagggcatcgtggaggagttcgccaccgagggcactgaccgcaaggacgtctttttctaccaggcagacgatgagcactacatcccccgggccgtgctgctggacttggaaccccgggtgatccactccatcctcaactccccctatgccaagctctacaacccagagaacatctacctgtcggaacatggaggaggagctggcaacaactgggccagcggattctcccagggagaaaagatccatgaggacatttttgacatcatagaccgggaggcagatggtagtgacagtctagagggctttgtgctgtgtcactccattgctggggggacaggctctggactgggttcctacctcttagaacggctgaatgacaggtatcctaagaagctggtgcagacatactcagtgtttcccaaccaggacgagatgagcgatgtggtggtccagccttacaattcactcctcacactcaagaggctgacgcagaatgcagactgtgtggtggtgctggacaacacagccctgaaccggattgccacagaccgcctgcacatccagaacccatccttctcccagatcaaccagctgcaccaccaccctgcgctaccctggctacatgaacaatgacctcatcggcctcatcgcctcgctcattcccaccccacggctccacttcctcatgaccggctacacccctctcactacggaccagtcagtggccagcgtgaggaagaccacggtcctggatgtcatgaggcggctgctgcagcccaagaacgtgatggtgtccacaggccgagaccgccagaccaaccactgctacatcgccatcctcaacatcatccagggagaggtggaccccacccaggtccacaagagcttgcagaggatccgggaacgcaagttggccaacttcatcccgtggggccccgccagcatccaggtggccctgtcgaggaagtctccctacctgccctcggcccaccgggtcagcgggctcatgatggccaaccacaccagcatctcctcgctcttcgagagaacctgtcgccagtatgacaagctgcgtaagcgggaggccttcctggagcagttccgcaaggaggacatgttcaaggacaactttgatgagatggacacatccagggagattgtgcagcagctcatcgatgagtaccatgcggccacacggccagactacatctcctggggcacccaggagcagtgagtcccccaggacagggaccctcatctgccttactggttggcccaagccctgcctgactgaccaccccctcagagcacagatcagggacctcacgcatctctttctcatatacatggactctctgttggcctgcaaacacatttacttctcctcttatgagactatttatctttaataaagcactggatataaatcaaaaaaaaaatc

SEQ ID NO: 296475 - DNA, 1541 bp, Homo sapiens
cctaaagtggggcaattggggatcagattgggttcgagttctggaaacagctgtgcgccgagcatggtatcagccccgagggcatcgtggaggagttcgccaccgagggcactgaccgcaaggacgtctttttctaccaggcagacgatgagcactacatcccccgggccgtgctgctggacttggaaccccgggtgatccactccatcctcaactccccctatgccaagctctacaacccagagaacatctacctgtcggaacatggaggaggagctggcaacaactgggccagcggattctcccagggagaaaagatccatgaggacatttttgacatcatagaccgggaggcagatggtagtgacagtctagagggctttgtgctgtgtcactccattgctggggggacaggctctggactgggttcctacctcttagaacggctgaatgacaggtatcctaagaagctggtgcagacatactcagtgtttcccaaccaggacgagatgagcgatgtggtggtccagccttacaattcactcctcacactcaagaggctgacgcagaatgcagactgtgtggtggtgctggacaacacagccctgaaccggattgccacagaccgcctgcacatccagaacccatccttctcccagatcaaccagctggtgtctaccatcatgtcagccagcaccaccaccctgcgctaccctggctacatgaacaatgacctcatcggcctcatcgcctcgctcattcccaccccacggctccacttcctcatgaccggctacacccctctcactacggaccagtcagtggccagcgtgaggaagaccacggtcctggatgtcatgaggcggctgctgcagcccaagaacgtgatggtgtccacaggccgagaccgccagaccaaccactgctacatcgccatcctcaacatcatccagggagaggtggaccccacccaggtccacaagagcttgcagaggatccgggaacgcaagttggccaacttcatcccgtggggccccgccagcatccaggtggccctgtcgaggaagtctccctacctgccctcggcccaccgggtcagcgggctcatgatggccaaccacaccagcatctcctcgctcttcgagagaacctgtcgccagtatgacaagctgcgtaagcgggaggccttcctggagcagttccgcaaggaggacatgttcaaggacaactttgatgagatggacacatccagggagattgtgcagcagctcatcgatgagtaccatgcggccacacggccagactacatctcctggggcacccaggagcagtgagtcccccaggacagggaccctcatctgccttactggttggcccaagccctgcctgactgaccaccccctcagagcacagatcagggacctcacgcatctctttctcatatacatggactctctgttggcctgcaaacacatttacttctcctcttatgagactatttatctttaataaagcactggatataaatcaaaaaaaaaatc

SEQ ID NO: 296476 - DNA, 1918 bp, Homo sapiens
accacagcgcgcttgcgcgcaggcccaagcaggcgcccacccagaggggagggaggacgccgtaccccgccctcactgaggcgcggagccggatccggaggcgccgagccgcatccggagccgcgcacgcgcaatctgcatgaacgaaggccagtgcttaaagacgtgccattcattgccagaactcggttctcattggagcggaggaagttcgtgggtggagctggttgtttggcgcctgcgtcttgcggcgagcgggctggcgtgcggcgccgttgcgggcgggagcggctgcaacgccggtgcctgaggagcgatgccgagggaaatcatcaccctacagttgggccagtgcggcaatcagattgggttcgagttctggaaacagctgtgcgccgagcatggtatcagccccgagggcatcgtggaggagttcgccaccgagggcactgaccgcaaggacgtctttttctaccaggcagacgatgagcactacatcccccgggccgtgctgctggacttggaaccccgggtgatccactccatcctcaactccccctatgccaagctctacaacccagagaacatctacctgtcggaacatggaggaggagctggcaacaactgggccagcggattctcccaggtcgtttcctattccctggcagggcccacaactcgctggggagaaaagatccatgaggacatttttgacatcatagaccgggaggcagatggtagtgacagtctagagggctttgtgctgtgtcactccattgctggggggacaggctctggactgggttcctacctcttagaacggctgaatgacaggtatcctaagaagctggtgcagacatactcagtgtttcccaaccaggacgagatgagcgatgtggtggtccagccttacaattcactcctcacactcaagaggctgacgcagaatgcagactgtgtggtggtgctggacaacacagccctgaaccggattgccacagaccgcctgcacatccagaacccatccttctcccagatcaaccagctggtgtctaccatcatgtcagccagcaccaccaccctgcgctaccctggctacatgaacaatgacctcatcggcctcatcgcctcgctcattcccaccccacggctccacttcctcatgaccggctacacccctctcactacggaccagtcagtggccagcgtgaggaagaccacggtcctggatgtcatgaggcggctgctgcagcccaagaacgtgatggtgtccacaggccgagaccgccagaccaaccactgctacatcgccatcctcaacatcatccagggagaggtggaccccacccaggtccacaagagcttgcagaggatccgggaacgcaagttggccaacttcatcccgtggggccccgccagcatccaggtggccctgtcgaggaagtctccctacctgccctcggcccaccgggtcagcgggctcatgatggccaaccacaccagcatctcctcgctcttcgagagaacctgtcgccagtatgacaagctgcgtaagcgggaggccttcctggagcagttccgcaaggaggacatgttcaaggacaactttgatgagatggacacatccagggagattgtgcagcagctcatcgatgagtaccatgcggccacacggccagactacatctcctggggcacccaggagcagtgagtcccccaggacagggaccctcatctgccttactggttggcccaagccctgcctgactgaccaccccctcagagcacagatcagggacctcacgcatctctttctcatatacatggactctctgttggcctgcaaacacatttacttctcctcttatgagactatttatctttaataaagcactggatataaatcaaaaaaaaaatc

SEQ ID NO: 296477 - DNA, 1404 bp, Homo sapiens
cctgggagaatccgctggcccagttgttgccagctcctcctccatgttccgacaggtagatgttctctgggttgtagagcttggcatagggggagttgaggatggagtggatcacccggggttccaagtccagcagcacggcccgggggatgtagtgctcatcgtctgcctggagaaaagatccatgaggacatttttgacatcatagaccgggaggcagatggtagtgacagtctagagggctttgtgctgtgtcactccattgctggggggacaggctctggactgggttcctacctcttagaacggctgaatgacaggtatcctaagaagctggtgcagacatactcagtgtttcccaaccaggacgagatgagcgatgtggtggtccagccttacaattcactcctcacactcaagaggctgacgcagaatgcagactgtgtggtggtgctggacaacacagccctgaaccggattgccacagaccgcctgcacatccagaacccatccttctcccagatcaaccagctggtgtctaccatcatgtcagccagcaccaccaccctgcgctaccctggctacatgaacaatgacctcatcggcctcatcgcctcgctcattcccaccccacggctccacttcctcatgaccggctacacccctctcactacggaccagtcagtggccagcgtgaggaagaccacggtcctggatgtcatgaggcggctgctgcagcccaagaacgtgatggtgtccacaggccgagaccgccagaccaaccactgctacatcgccatcctcaacatcatccagggagaggtggaccccacccaggtccacaagagcttgcagaggatccgggaacgcaagttggccaacttcatcccgtggggccccgccagcatccaggtggccctgtcgaggaagtctccctacctgccctcggcccaccgggtcagcgggctcatgatggccaaccacaccagcatctcctcgctcttcgagagaacctgtcgccagtatgacaagctgcgtaagcgggaggccttcctggagcagttccgcaaggaggacatgttcaaggacaactttgatgagatggacacatccagggagattgtgcagcagctcatcgatgagtaccatgcggccacacggccagactacatctcctggggcacccaggagcagtgagtcccccaggacagggaccctcatctgccttactggttggcccaagccctgcctgactgaccaccccctcagagcacagatcagggacctcacgcatctctttctcatatacatggactctctgttggcctgcaaacacatttacttctcctcttatgagactatttatctttaataaagcactggatataaatcaaaaaaaaaatc

SEQ ID NO: 296478 - DNA, 1238 bp, Homo sapiens
ggcctttttaaatgaccccaggcgggggtattgacatcatagaccgggaggcagatggtagtgacagtctagagggctttgtgctgtgtcactccattgctggggggacaggctctggactgggttcctacctcttagaacggctgaatgacaggtatcctaagaagctggtgcagacatactcagtgtttcccaaccaggacgagatgagcgatgtggtggtccagccttacaattcactcctcacactcaagaggctgacgcagaatgcagactgtgtggtggtgctggacaacacagccctgaaccggattgccacagaccgcctgcacatccagaacccatccttctcccagatcaaccagctggtgtctaccatcatgtcagccagcaccaccaccctgcgctaccctggctacatgaacaatgacctcatcggcctcatcgcctcgctcattcccaccccacggctccacttcctcatgaccggctacacccctctcactacggaccagtcagtggccagcgtgaggaagaccacggtcctggatgtcatgaggcggctgctgcagcccaagaacgtgatggtgtccacaggccgagaccgccagaccaaccactgctacatcgccatcctcaacatcatccagggagaggtggaccccacccaggtccacaagagcttgcagaggatccgggaacgcaagttggccaacttcatcccgtggggccccgccagcatccaggtggccctgtcgaggaagtctccctacctgccctcggcccaccgggtcagcgggctcatgatggccaaccacaccagcatctcctcgctcttcgagagaacctgtcgccagtatgacaagctgcgtaagcgggaggccttcctggagcagttccgcaaggaggacatgttcaaggacaactttgatgagatggacacatccagggagattgtgcagcagctcatcgatgagtaccatgcggccacacggccagactacatctcctggggcacccaggagcagtgagtcccccaggacagggaccctcatctgccttactggttggcccaagccctgcctgactgaccaccccctcagagcacagatcagggacctcacgcatctctttctcatatacatggactctctgttggcctgcaaacacatttacttctcctcttatgagactatttatctttaataaagcactggatataaatcaaaaaaaaaatc

SEQ ID NO: 296479 - DNA, 1753 bp, Homo sapiens
accacagcgcgcttgcgcgcaggcccaagcaggcgcccacccagaggggagggaggacgccgtaccccgccctcactgaggcgcggagccggatccggaggcgccgagccgcatccggagccgcgcacgcgcaatctgcatgaacgaaggccagtgcttaaagacgtgccattcattgccagaactcggttctcattggagcggaggaagttcgtgggtggagctggttgtttggcgcctgcgtcttgcggcgagcgggctggcgtgcggcgccgttgcgggcgggagcggctgcaacgccggtgcctgaggagcgatgccgagggaaatcatcaccctacagttgggccagtgcggcaatcagattgggttcgagttctggaaacagctgtgcgccgagcatggtatcagccccgagggcatcgtggaggagttcgccaccgagggcactgaccgcaaggacgtctttttctaccaggcagacgatgagcactacatcccccgggccgtgctgctggacttggaaccccgggtgatccactccatcctcaactccccctatgccaagctctacaacccagagaacatctacctgtcggaacatggaggaggagctggcaacaactgggccagcggattctcccagggagaaaagatccatgaggacatttttgacatcatagaccgggaggcagatggtagtgacagtctagaggacgagatgagcgatgtggtggtccagccttacaattcactcctcacactcaagaggctgacgcagaatgcagactgtgtggtggtgctggacaacacagccctgaaccggattgccacagaccgcctgcacatccagaacccatccttctcccagatcaaccagctggtgtctaccatcatgtcagccagcaccaccaccctgcgctaccctggctacatgaacaatgacctcatcggcctcatcgcctcgctcattcccaccccacggctccacttcctcatgaccggctacacccctctcactacggaccagtcagtggccagcgtgaggaagaccacggtcctggatgtcatgaggcggctgctgcagcccaagaacgtgatggtgtccacaggccgagaccgccagaccaaccactgctacatcgccatcctcaacatcatccagggagaggtggaccccacccaggtccacaagagcttgcagaggatccgggaacgcaagttggccaacttcatcccgtggggccccgccagcatccaggtggccctgtcgaggaagtctccctacctgccctcggcccaccgggtcagcgggctcatgatggccaaccacaccagcatctcctcgctcttcgagagaacctgtcgccagtatgacaagctgcgtaagcgggaggccttcctggagcagttccgcaaggaggacatgttcaaggacaactttgatgagatggacacatccagggagattgtgcagcagctcatcgatgagtaccatgcggccacacggccagactacatctcctggggcacccaggagcagtgagtcccccaggacagggaccctcatctgccttactggttggcccaagccctgcctgactgaccaccccctcagagcacagatcagggacctcacgcatctctttctcatatacatggactctctgttggcctgcaaacacatttacttctcctcttatgagactatttatctttaataaagcactggatataaatcaaaaaaaaaatc

SEQ ID NO: 296480 - DNA, 1214 bp, Homo sapiens
cggtcccgacaaggatggggtgggaggcagatggtagtgacagtctagagggctttgtgctgtgtcactccattgctggggggacaggctctggactgggttcctacctcttagaacggctgaatgacaggtatcctaagaagctggtgcagacatactcagtgtttcccaaccaggacgagatgagcgatgtggtggtccagccttacaattcactcctcacactcaagaggctgacgcagaatgcagactgtgtggtggtgctggacaacacagccctgaaccggattgccacagaccgcctgcacatccagaacccatccttctcccagatcaaccagctggtgtctaccatcatgtcagccagcaccaccaccctgcgctaccctggctacatgaacaatgacctcatcggcctcatcgcctcgctcattcccaccccacggctccacttcctcatgaccggctacacccctctcactacggaccagtcagtggccagcgtgaggaagaccacggtcctggatgtcatgaggcggctgctgcagcccaagaacgtgatggtgtccacaggccgagaccgccagaccaaccactgctacatcgccatcctcaacatcatccagggagaggtggaccccacccaggtccacaagagcttgcagaggatccgggaacgcaagttggccaacttcatcccgtggggccccgccagcatccaggtggccctgtcgaggaagtctccctacctgccctcggcccaccgggtcagcgggctcatgatggccaaccacaccagcatctcctcgctcttcgagagaacctgtcgccagtatgacaagctgcgtaagcgggaggccttcctggagcagttccgcaaggaggacatgttcaaggacaactttgatgagatggacacatccagggagattgtgcagcagctcatcgatgagtaccatgcggccacacggccagactacatctcctggggcacccaggagcagtgagtcccccaggacagggaccctcatctgccttactggttggcccaagccctgcctgactgaccaccccctcagagcacagatcagggacctcacgcatctctttctcatatacatggactctctgttggcctgcaaacacatttacttctcctcttatgagactatttatctttaataaagcactggatataaatcaaaaaaaaaatc

SEQ ID NO: 296481 - DNA, 1388 bp, Homo sapiens
  misc_feature (1365)..(1365): n is a, c, g, or t
accacagcgcgcttgcgcgcaggcccaagcaggcgcccacccagaggggagggaggacgccgtaccccgccctcactgaggcgcggagccggatccggaggcgccgagccgcatccggagccgcgcacgcgcaatctgcatgaacgaaggccagtgcttaaagacgtgccattcattgccagaactcggttctcattggagcggaggaagttcgtgggtggagctggttgtttggcgcctgcgtcttgcggcgagcgggctggcgtgcggcgccgttgcgggcgggagcggctgcaacgccggtgcctgaggagcgatgccgagggaaatcatcaccctacagttgggccagtgcggcaatcagattgggttcgagttctggaaacagctgtgcgccgagcatggtatcagccccgagggcatcgtggaggagttcgccaccgagggcactgaccgcaaggacgtctttttctaccaggcagacgatgagcactacatcccccgggccgtgctgctggacttggaaccccgggtgatccactccatcctcaactccccctatgccaagctctacaacccagagaacatctacctgtcggaacatggaggaggagctggcaacaactgggccagcggattctcccagggagaaaagatccatgaggacatttttgacatcatagaccgggaggcagatggtagtgacagtctagagggctttgtgctgtgtcactccattgctggggggacaggctctggactgggttcctacctcttagaacggctgaatgacaggtatcctaagaagctggtgcagacatactcagtgtttcccaaccaggacgagatgagcgatgtggtggtccagccttacaattcactcctcacactcaagaggctgacgcagaatgcagactgtgtggtggtgctggacaacacagccctgaaccggattgccacagaccgcctgcacatccagaacccatccttctcccagatcaaccagctggtgtctaccatcatgtcagccagcaccaccaccctgcgctaccctggctacatgaacaatgacctcatcggcctcatcgcctcgctcattcccaccccacggctccacttcctcatgaccggctacacccctctcactacggaccagtcagtaagagcagccttcagtgtcccaggccaggccggccctgggcccaacaggccctgaacgagccaaccttgaagggagcccaaaaggatggtcagttccatgaggacagggccctcattcctcttgtgcactctgtccccagccacagcaatgaaggaacaaatgcagagaaagagagagggagggaggaaggcaggtagcgtggnttctcccagtagggatggccctg

SEQ ID NO: 296482 - DNA, 1135 bp, Homo sapiens
accacagcgcgcttgcgcgcaggcccaagcaggcgcccacccagaggggagggaggacgccgtaccccgccctcactgaggcgcggagccggatccggaggcgccgagccgcatccggagccgcgcacgcgcaatctgcatgaacgaaggccagtgcttaaagacgtgccattcattgccagaactcggttctcattggagcggaggaagttcgtgggtggagctggttgtttggcgcctgcgtcttgcggcgagcgggctggcgtgcggcgccgttgcgggcgggagcggctgcaacgccggtgcctgaggagcgatgccgagggaaatcatcaccctacagttgggccagtgcggcaatcagattgggttcgagttctggaaacagctgtgcgccgagcatggtatcagccccgagggcatcgtggaggagttcgccaccgagggcactgaccgcaaggacgtctttttctaccaggcagacgatgagcactacatcccccgggccgtgctgctggacttggaaccccgggtgatccactccatcctcaactccccctatgccaagctctacaacccagagaacatctacctgtcggaacatggaggaggagctggcaacaactgggccagcggattctcccagggagaaaagatccatgaggacatttttgacatcatagaccgggaggcagatggtagtgacagtctagagggctttgtgctgtgtcactccattgctggggggacaggctctggactgggttcctacctcttagaacggctgaatgacaggtatcctaagaagctggtgcagacatactcagtgtttcccaaccaggacgagatgagcgatgtggtggtccagccttacaattcactcctcacactcaagaggctgacgcagaatgcagactgtgtggtggtgctggacaacacagccctgaaccggattgccacagaccgcctgcacatccagaacccatccttctcccagatcaaccagctggtgtctaccatcatgtcagccagcaccaccaccctgcgctaccctggctacatgaacaatgacctcatcggcctcatcgcctcgctcattcccaccccgtacatgcaaggggtacggagctcgaat

SEQ ID NO: 296483 - DNA, 1366 bp, Homo sapiens
accacagcgcgcttgcgcgcaggcccaagcaggcgcccacccagaggggagggaggacgccgtaccccgccctcactgaggcgcggagccggatccggaggcgccgagccgcatccggagccgcgcacgcgcaatctgcatgaacgaaggccagtgcttaaagacgtgccattcattgccagaactcggttctcattggagcggaggaagttcgtgggtggagctggttgtttggcgcctgcgtcttgcggcgagcgggctggcgtgcggcgccgttgcgggcgggagcggctgcaacgccggtgcctgaggagcgatgccgagggaaatcatcaccctacagttgggccagtgcggcaatcagattgggttcgagttctggaaacagctgtgcgccgagcatggtatcagccccgagggcatcgtggaggagttcgccaccgagggcactgaccgcaaggacgtctttttctaccaggcagacgatgagcactacatcccccgggccgtgctgctggacaccaccaccctgcgctaccctggctacatgaacaatgacctcatcggcctcatcgcctcgctcattcccaccccacggctccacttcctcatgaccggctacacccctctcactacggaccagtcagtggccagcgtgaggaagaccacggtcctggatgtcatgaggcggctgctgcagcccaagaacgtgatggtgtccacaggccgagaccgccagaccaaccactgctacatcgccatcctcaacatcatccagggagaggtggaccccacccaggtccacaagagcttgcagaggatccgggaacgcaagttggccaacttcatcccgtggggccccgccagcatccaggtggccctgtcgaggaagtctccctacctgccctcggcccaccgggtcagcgggctcatgatggccaaccacaccagcatctcctcgctcttcgagagaacctgtcgccagtatgacaagctgcgtaagcgggaggccttcctggagcagttccgcaaggaggacatgttcaaggacaactttgatgagatggacacatccagggagattgtgcagcagctcatcgatgagtaccatgcggccacacggccagactacatctcctggggcacccaggagcagtgagtcccccaggacagggaccctcatctgccttactggttggcccaagccctgcctgactgaccaccccctcagagcacagatcagggacctcacgcatctctttctcatatacatggactctctgttggcctgcaaacacatttacttctcctcttatgagactatttatctttaataaagcactggatataaatcaaaaaaaaaatc

SEQ ID NO: 296484 - DNA, 1222 bp, Homo sapiens
accacagcgcgcttgcgcgcaggcccaagcaggcgcccacccagaggggagggaggacgccgtaccccgccctcactgaggcgcggagccggatccggaggcgccgagccgcatccggagccgcgcacgcgcaatctgcatgaacgaaggccagtgcttaaagacgtgccattcattgccagaactcggttctcattggagcggaggaagttcgtgggtggagctggttgtttggcgcctgcgtcttgcggcgagcgggctggcgtgcggcgccgttgcgggcgggagcggctgcaacgccggtgcctgaggagcgatgccgagggaaatcatcaccctacagttgggccagtgcggcaatcagattgggttcgagttctggaaacagctgtgcgccgagcatggtatcagccccgagggcatcgtggaggagttcgccaccgagggcactgaccgcaaggacgtctttttctaccaggcagacgatgagcactacatcccccgggccgtgctgctggacttggaaccccgggtgatccactccatcctcaactccccctatgccaagctctacaacccagagaacatctacctgtcggaacatggaggaggagctggcaacaactgggccagcggattctcccagggagaaaagatccatgaggacatttttgacatcatagaccgggaggcagatggtagtgacagtctagagggctttgtgctgtgtcactccattgctggggggacaggctctggactgggttcctacctcttagaacggctgaatgacaggtatcctaagaagctggtgcagacatactcagtgtttcccaaccagtatgacaagctgcgtaagcgggaggccttcctggagcagttccgcaaggaggacatgttcaaggacaactttgatgagatggacacatccagggagattgtgcagcagctcatcgatgagtaccatgcggccacacggccagactacatctcctggggcacccaggagcagtgagtcccccaggacagggaccctcatctgccttactggttggcccaagccctgcctgactgaccaccccctcagagcacagatcagggacctcacgcatctctttctcatatacatggactctctgttggcctgcaaacacatttacttctcctcttatgagactatttatctttaataaagcactggatataaatcaaaaaaaaaatc

SEQ ID NO: 296485 - DNA, 961 bp, Homo sapiens
accacagcgcgcttgcgcgcaggcccaagcaggcgcccacccagaggggagggaggacgccgtaccccgccctcactgaggcgcggagccggatccggaggcgccgagccgcatccggagccgcgcacgcgcaatctgcatgaacgaaggccagtgcttaaagacgtgccattcattgccagaactcggttctcattggagcggaggaagttcgtgggtggagctggttgtttggcgcctgcgtcttgcggcgagcgggctggcgtgcggcgccgttgcgggcgggagcggctgcaacgccggtgcctgaggagcgatgccgagggaaatcatcaccctacagttgggccagtgcggcaatcagattgggttcgagttctggaaacagctgtgcgccgagcatggtatcagccccgagggcatcgtggaggagttcgccaccgagggcactgaccgcaaggacgtctttttctaccaggcagacgatgagcactacatcccccgggccgtgctgctggacttggaaccccgggtgatccactccatcctcaactccccctatgccaagctctacaacccagagaacatctacctgtcggaacatggaggaggagctggcaacaactgggccagcggattctcccagggagaaaagatccatgaggacatttttgacatcatagaccgggaggcagatggtagtgacagtctagagggctttgtgctgtgtcactccattgctggggggacaggctctggactgggttcctacctcttagaacggctgaatgacaggtatcctaagaagctggtgcagacatactcagtgtttcccaaccaggacgagatgagcgatgtggtggtccagccttacaattcactcctcacactcaagaggctgacgcagaatgcagactgtgtgcaacacagcctgaaccgcgacctgcgtcttgtcccgagt

SEQ ID NO: 296486 - DNA, 1288 bp, Homo sapiens
accacagcgcgcttgcgcgcaggcccaagcaggcgcccacccagaggggagggaggacgccgtaccccgccctcactgaggcgcggagccggatccggaggcgccgagccgcatccggagccgcgcacgcgcaatctgcatgaacgaaggccagtgcttaaagacgtgccattcattgccagaactcggttctcattggagcggaggaagttcgtgggtggagctggttgtttggcgcctgcgtcttgcggcgagcgggctggcgtgcggcgccgttgcgggcgggagcggctgcaacgccggtgcctgaggagcgatgccgagggaaatcatcaccctacagttgggccagtgcggcaatcagattgggttcgagttctggaaacagctgtgcgccgagcatggtatcagccccgagggcatcgtggaggagttcgccaccgagggcactgaccgcaaggacgtctttttctaccaggcagacgatgagcactacatcccccgggccgtgctgctggacttggaaccccgggtgatccactccatcctcaactccccctatgccaagctctacaacccagagaacatctacctgtcggaacatggaggaggagctggcaacaactgggccagcggattctcccagggagaaaagatccatgaggacatttttgacatcatagaccgggaggcagatggtagtgacagtctagagggctttgtgctgtgtcactccattgctggggggacaggctctggactgggttcctacctcttagaacggctgaatgacaggtatcctaagaagctggtgcagacatactcagtgtttcccaaccaggacgagatgagcgatgtggtggtccagccttacaattcactcctcacactcaagaggctgacgcagaatgcagactgtgtgggtgagtcctggattctacctctcccaactctcaacaccccatacccactcgagtctattaaatcattttcatgtatttaaaaaaaatccattttagccaggtgcagtggctcatgactgtaatcccatcactttgggaggccaaggtcgttggatcgtttgagtttaggagttcgagaccagcctgggcaacatggcgaaaccccatctctactaaaaatacaaaaattagtcgggagtggtgatatgtgcagaaggatcacttgtgcctcagaggcaggggctgcagtgagctgagatcatgtcactgactgcactccagccggggtgacaaagtgaaaccctgtctcaaaaaacaagaacaaa

SEQ ID NO: 296487 - DNA, 733 bp, Homo sapiens
gggaaaatgggagtcctaaaaaactatgagatgggtctagtttgacatcctgccactagatacctgtacactgactgccccttccccatgcagggctttgtgctgtgtcactccattgctggggggacaggctctggactgggttcctacctcttagaacggctgaatgacaggtaagtttgtgtttggggattaggaaaggtctccaacttggcttcctaaatgactaggggacccagcagatataactccatatttgctggaacaggaaagagttcttatattccctcctatagagaggaaaatgaagttacaatgactgagaaccccatcacactcccagtagtgggaactggagcctagaacctgagccctggatgaaagtcgagggagtgtggccaggtctcaatttggaagcccagagtctaagatgtctctgcccttccccctgtagggctacagacttccaaaagtcaaggctcccttctctactgatttgaccccaccccagtttcgccatcaagatttatctgcttctggacagttgttagggagcgccatgttcaccaggccttcggtctgttgccctgatcctttccccaacccccaccaggtatcctaagaagctggtgcagacatactcagtgtttcccaaccaggacgagatgagcgatgtggtggtccagccttacaattcactcctcacactcaagaggctgacgcagaatgcaga

SEQ ID NO: 296488 - DNA, 4520 bp, Homo sapiens
acttcattcacttgcaaatcagtgtgtgcccacaagagccagctctcccgagcccgtaaccttcgcatcccaagagctgcagtttcagccgcgacagcaagaacggcagagccggcgaccgcggcggcggcggcggcggaggcaggagcagcctgggcgggtcgcagggtctccgcgggcgcaggaaggcgagcagagatatcctctgagagccaagcaaagaacattaaggaaggaaggaggaatgaggctggatacggtgcagtgaaaaaggcacttccaagagtggggcactcactacgcacagactcgacggtgccatcagcatgagaacttaccgctacttcttgctgctcttttgggtgggccagccctacccaactctctcaactccactatcaaagaggactagtggtttcccagcaaagaaaagggccctggagctctctggaaacagcaaaaatgagctgaaccgttcaaaaaggagctggatgtggaatcagttctttctcctggaggaatacacaggatccgattatcagtatgtgggcaagttacattcagaccaggatagaggagatggatcacttaaatatatcctttcaggagatggagcaggagatctcttcattattaatgaaaacacaggcgacatacaggccaccaagaggctggacagggaagaaaaacccgtttacatccttcgagctcaagctataaacagaaggacagggagacccgtggagcccgagtctgaattcatcatcaagatccatgacatcaatgacaatgaaccaatattcaccaaggaggtttacacagccactgtccctgaaatgtctgatgtcggtacatttgttgtccaagtcactgcgacggatgcagatgatccaacatatgggaacagtgctaaagttgtctacagtattctacagggacagccctatttttcagttgaatcagaaacaggtattatcaagacagctttgctcaacatggatcgagaaaacagggagcagtaccaagtggtgattcaagccaaggatatgggcggccagatgggaggattatctgggaccaccaccgtgaacatcacactgactgatgtcaacgacaaccctccccgattcccccagagtacataccagtttaaaactcctgaatcttctccaccggggacaccaattggcagaatcaaagccagcgacgctgatgtgggagaaaatgctgaaattgagtacagcatcacagacggtgaggggctggatatgtttgatgtcatcaccgaccaggaaacccaggaagggattataactgtcaaaaagctcttggactttgaaaagaagaaagtgtatacccttaaagtggaagcctccaatccttatgttgagccacgatttctctacttggggcctttcaaagattcagccacggttagaattgtggtggaggatgtagatgagccacctgtcttcagcaaactggcctacatcttacaaataagagaagatgctcagataaacaccacaataggctccgtcacagcccaagatccagatgctgccaggaatcctgtcaagtactctgtagatcgacacacagatatggacagaatattcaacattgattctggaaatggttcgatttttacatcgaaacttcttgaccgagaaacactgctatggcacaacattacagtgatagcaacagagatcaataatccaaagcaaagtagtcgagtacctctatatattaaagttctagatgtcaatgacaacgccccagaatttgctgagttctatgaaacttttgtctgtgaaaaagcaaaggcagatcagttgattcagaccctgcatgctgttgacaaggatgacccttatagtgggcaccaattttcgttttccttggcccctgaagcagccagtggctcaaactttaccattcaagacaacaaagacaacacggcgggaatcttaactcggaaaaatggctataatagacacgagatgagcacctatctcttgcctgtggtcatttcagacaacgactacccagttcaaagcagcactgggacagtgactgtccgggtctgtgcatgtgaccaccacgggaacatgcaatcctgccacgcggaggcgctcatccaccccacgggactgagcacgggggctctggttgccatccttctgtgcatcgtgatcctactagtgacagtggtgctgtttgcagctctgaggcggcagcgaaaaaaagagcctttgatcatttccaaagaggacatcagagataacattgtcagttacaacgacgaaggtggtggagaggaggacacccaggcttttgatatcggcaccctgaggaatcctgaagccatagaggacaacaaattacgaagggacattgtgcccgaagcccttttcctaccccgacggactccaacagctcgcgacaacaccgatgtcagagatttcattaaccaaaggttaaaggaaaatgacacggaccccactgccccgccatacgactccttggccacttacgcctatgaaggcactggctccgtggcggattccctgagctcgctggagtcagtgaccacggatgcagatcaagactatgattaccttagtgactggggacctcgattcaaaaagcttgcagatatgtatggaggagtggacagtgacaaagactcctaatctgttgcctttttcattttccaatacgacactgaaatatgtgaagtggctatttctttatatttatccactactccgtgaaggcttctctgttctacccgttccaaaagccaatggctgcagtccgtgtggatccaatgttagagacttttttctagtacacttttatgagcttccaaggggcaaatttttattttttagtgcatccagttaaccaagtcagcccaacaggcaggtgccggaggggaggacagggaacagtatttccacttgttctcagggcagcgtgcccgcttccgctgtcctggtgttttactacactccatgtcaggtcagccaactgccctaactgtacatttcacaggctaatgggataaaggactgtgctttaaagataaaaatatcatcatagtaaaagaaatgagggcatatcggctcacaaagagataaactacataggggtgtttatttgtgtcacaaagaatttaaaataacacttgcccatgctatttgttcttcaagaactttctctgccatcaactactattcaaaacctcaaatccacccatatgttaaaattctcattactcttaaggaatagaagcaaattaaacggtaacatccaaaagcaaccacaaacctagtacgacttcattccttccactaactcatagtttgttatatcctagactagacatgcgaaagttgcctttgtaccatataaagggggagggaaatagctaataatgttaaccaaggaaatatattttaccatacatttaaagttttggccaccacatgtatcacgggtcacttgaaattctttcagctatcagtaggctaatgtcaaaattgtttaaaaattcttgaaagaattttcctgagacaaattttaacttcttgtctatagttgtcagtattattctactatactgtacatgaaagtagcagtgtgaagtacaataattcatattcttcatatccttcttacacgactaagttgaattagtaaagttagattaaataaaacttaaatctcactctaggagttcagtggagaggttagagccagccacacttgaacctaataccctgcccttgacatctggaaacctctacatatttatataacgtgatacatttggataaacaacattgagattatgatgaaaacctacatattccatgtttggaagacccttggaagaggaaaattggattcccttaaacaaaagtgtttaagattgtaattaaaatgatagttgattttcaaaagcattaattttttttcattgtttttaactttgctttcatgaccatcctgccatccttgactttgaactaatgataaagtaatgatctcaaactatgacagaaaagtaatgtaaaatccatccaatctattatttctctaattatgcaattagcctcatagttattatccagaggacccaactgaactgaactaatccttctggcagattcaaatcgtttatttcacacgctgttctaatggcacttatcattagaatcttaccttgtgcagtcatcagaaattccagcgtactataatgaaaacatccttgttttgaaaacctaaaagacaggctctgtatatatatatacttaagaatatgctgacttcacttattagtcttagggatttattttcaattaatattaattttctacaaataattttagtgtcatttccatttggggatattgtcatatcagcacatattttctgtttggaaacacactgttgtttagttaagttttaaataggtgtattacccaagaagtaaagatggaaacgtt

SEQ ID NO: 296489 - DNA, 2612 bp, Homo sapiens
  misc_feature (2582)..(2582): n is a, c, g, or t
acttcattcacttgcaaatcagtgtgtgcccacaagagccagctctcccgagcccgtaaccttcgcatcccaagagctgcagtttcagccgcgacagcaagaacggcagagccggcgaccgcggcggcggcggcggcggaggcaggagcagcctgggcgggtcgcagggtctccgcgggcgcaggaaggcgagcagagatatcctctgagagccaagcaaagaacattaaggaaggaaggaggaatgaggctggatacggtgcagtgaaaaaggcacttccaagagtggggcactcactacgcacagactcgacggtgccatcagcatgagaacttaccgctacttcttgctgctcttttgggtgggccagccctacccaactctctcaactccactatcaaagaggactagtggtttcccagcaaagaaaagggccctggagctctctggaaacagcaaaaatgagctgaaccgttcaaaaaggagctggatgtggaatcagttctttctcctggaggaatacacaggatccgattatcagtatgtgggcaagttacattcagaccaggatagaggagatggatcacttaaatatatcctttcaggagatggagcaggagatctcttcattattaatgaaaacacaggcgacatacaggccaccaagaggctggacagggaagaaaaacccgtttacatccttcgagctcaagctataaacagaaggacagggagacccgtggagcccgagtctgaattcatcatcaagatccatgacatcaatgacaatgaaccaatattcaccaaggaggtttacacagccactgtccctgaaatgtctgatgtcggtacatttgttgtccaagtcactgcgacggatgcagatgatccaacatatgggaacagtgctaaagttgtctacagtattctacagggacagccctatttttcagttgaatcagaaacaggtattatcaagacagctttgctcaacatggatcgagaaaacagggagcagtaccaagtggtgattcaagccaaggatatgggcggccagatgggaggattatctgggaccaccaccgtgaacatcacactgactgatgtcaacgacaaccctccccgattcccccagagtacataccagtttaaaactcctgaatcttctccaccggggacaccaattggcagaatcaaagccagcgacgctgatgtgggagaaaatgctgaaattgagtacagcatcacagacggtgaggggctggatatgtttgatgtcatcaccgaccaggaaacccaggaagggattataactgtcaaaaagctcttggactttgaaaagaagaaagtgtatacccttaaagtggaagcctccaatccttatgttgagccacgatttctctacttggggcctttcaaagattcagccacggttagaattgtggtggaggatgtagatgagccacctgtcttcagcaaactggcctacatcttacaaataagagaagatgctcagataaacaccacaataggctccgtcacagcccaagatccagatgctgccaggaatcctgtcaagtactctgtagatcgacacacagatatggacagaatattcaacattgattctggaaatggttcgatttttacatcgaaacttcttgaccgagaaacactgctatggcacaacattacagtgatagcaacagagatcaataatccaaagcaaagtagtcgagtacctctatatattaaagttctagatgtcaatgacaacgccccagaatttgctgagttctatgaaacttttgtctgtgaaaaagcaaaggcagatcagttgattcagaccctgcatgctgttgacaaggatgacccttatagtgggcaccaattttcgttttccttggcccctgaagcagccagtggctcaaactttaccattcaagacaacaaagacaacacggcgggaatcttaactcggaaaaatggctataatagacacgagatgagcacctatctcttgcctgtggtcatttcagacaacgactacccagttcaaagcagcactgggacagtgactgtccgggtctgtgcatgtgaccaccacgggaacatgcaatcctgccacgcggaggcgctcatccaccccacgggactgagcacgggggctctggttgccatccttctgtgcatcgtgatcctactaggtaaactggttctccctgcctcctatctccccatggtgaggggctcacactgttactgtgacactctagatttatctgcctcccccattaaggcatacagcctgatctaggtgagtcgagttacatactgagaatctgtgctgtacgatgtgaactcatttttgcttgcaaatggctttggaaaatgaacagatgtgaaacttgctcgtgtctttgcttgcccaggaagcaaagaatctcttgtctatcagactgggaatgaatctcgggggatttcagggcaacataaatgtgcccttttcatttcattcgttgtgtaatttttttacttggaaaacgttgttaagtgtctggcatggagtgtatgatgaggnccctttctataaaggtaaagtttaaagatc

SEQ ID NO: 296490 - DNA, 2693 bp, Homo sapiens
  misc_feature (2582)..(2582): n is a, c, g, or t
acttcattcacttgcaaatcagtgtgtgcccacaagagccagctctcccgagcccgtaaccttcgcatcccaagagctgcagtttcagccgcgacagcaagaacggcagagccggcgaccgcggcggcggcggcggcggaggcaggagcagcctgggcgggtcgcagggtctccgcgggcgcaggaaggcgagcagagatatcctctgagagccaagcaaagaacattaaggaaggaaggaggaatgaggctggatacggtgcagtgaaaaaggcacttccaagagtggggcactcactacgcacagactcgacggtgccatcagcatgagaacttaccgctacttcttgctgctcttttgggtgggccagccctacccaactctctcaactccactatcaaagaggactagtggtttcccagcaaagaaaagggccctggagctctctggaaacagcaaaaatgagctgaaccgttcaaaaaggagctggatgtggaatcagttctttctcctggaggaatacacaggatccgattatcagtatgtgggcaagttacattcagaccaggatagaggagatggatcacttaaatatatcctttcaggagatggagcaggagatctcttcattattaatgaaaacacaggcgacatacaggccaccaagaggctggacagggaagaaaaacccgtttacatccttcgagctcaagctataaacagaaggacagggagacccgtggagcccgagtctgaattcatcatcaagatccatgacatcaatgacaatgaaccaatattcaccaaggaggtttacacagccactgtccctgaaatgtctgatgtcggtacatttgttgtccaagtcactgcgacggatgcagatgatccaacatatgggaacagtgctaaagttgtctacagtattctacagggacagccctatttttcagttgaatcagaaacaggtattatcaagacagctttgctcaacatggatcgagaaaacagggagcagtaccaagtggtgattcaagccaaggatatgggcggccagatgggaggattatctgggaccaccaccgtgaacatcacactgactgatgtcaacgacaaccctccccgattcccccagagtacataccagtttaaaactcctgaatcttctccaccggggacaccaattggcagaatcaaagccagcgacgctgatgtgggagaaaatgctgaaattgagtacagcatcacagacggtgaggggctggatatgtttgatgtcatcaccgaccaggaaacccaggaagggattataactgtcaaaaagctcttggactttgaaaagaagaaagtgtatacccttaaagtggaagcctccaatccttatgttgagccacgatttctctacttggggcctttcaaagattcagccacggttagaattgtggtggaggatgtagatgagccacctgtcttcagcaaactggcctacatcttacaaataagagaagatgctcagataaacaccacaataggctccgtcacagcccaagatccagatgctgccaggaatcctgtcaagtactctgtagatcgacacacagatatggacagaatattcaacattgattctggaaatggttcgatttttacatcgaaacttcttgaccgagaaacactgctatggcacaacattacagtgatagcaacagagatcaataatccaaagcaaagtagtcgagtacctctatatattaaagttctagatgtcaatgacaacgccccagaatttgctgagttctatgaaacttttgtctgtgaaaaagcaaaggcagatcagttgattcagaccctgcatgctgttgacaaggatgacccttatagtgggcaccaattttcgttttccttggcccctgaagcagccagtggctcaaactttaccattcaagacaacaaagacaacacggcgggaatcttaactcggaaaaatggctataatagacacgagatgagcacctatctcttgcctgtggtcatttcagacaacgactacccagttcaaagcagcactgggacagtgactgtccgggtctgtgcatgtgaccaccacgggaacatgcaatcctgccacgcggaggcgctcatccaccccacgggactgagcacgggggctctggttgccatccttctgtgcatcgtgatcctactaggtaaactggttctccctgcctcctatctccccatggtgaggggctcacactgttactgtgacactctagatttatctgcctcccccattaaggcatacagcctgatctaggtgagtcgagttacatactgagaatctgtgctgtacgatgtgaactcatttttgcttgcaaatggctttggaaaatgaacagatgtgaaacttgctcgtgtctttgcttgcccaggaagcaaagaatctcttgtctatcagactgggaatgaatctcgggggatttcagggcaacataaatgtgcccttttcatttcattcgttgtgtaatttttttacttggaaaacgttgttaagtgtctggcatggagtgtatgatgaggnccctttctataaaggtaaagtttaaagatctatgggaaagtgggaagaggagtatgatgacttttctctcatcctagaaaaataaaaactatgaaatttttttaacccaaa

SEQ ID NO: 296491 - DNA, 728 bp, Homo sapiens
  misc_feature (67)..(67): n is a, c, g, or t
ggattagctactctcatttacagataatggaaagggggccaatgaggaggtgagaaatcgctcaagnctgcaggtacggtggctcacacctgtaatcccaacacgttgggaggccaaggtgggcagatcacttgaggtcaggagttcaagaccagcctggccaacatggcaaaaccccatctctactaaaatccaaaaattagtcgggtatggcagtgcacgcctgtaatcccagatactcggaaggctgaggcaggagaatcatttgaacctgggaagtggaggttgcagtgagccaagatcgtgtcactgcactctagcctaggtgataaagcgagactcagtctcaaaaaataaaggaagaaaaagaaaccaggtgactgttgtgcccgtctcttgtccccgatctttctcccaatcctgaggtccatcagctggaaggacatatccatccggaggcctccccaagtgtggtgggagaaatccatcccctctctgacactccccccgcctttccctcccgacacccagtccccgggagatcaaaatttaacctggtgttatctaggctggagcctgaagagcccggtgggaagtggaggacggagaggaggggcatggacccagaaagttagcaggaagtcttcagagacccttatttttaaattatttatttttgtttgttttgttttttgtttttttgtttccctcttgttgcccaggctgga

SEQ ID NO: 296492 - DNA, 5760 bp, Homo sapiens
gcggctgccgggcctccaatctcggcggcggcggcggcaacaggggagcctgggtctcgcggcctgcgagtccgtcgcgtgctgagggagacgcaggaggtggagccggccgggtgctcgagggaaggagactggaagctggttccggcgtgaggagagtctgaaaaaggggagcgcggagaggaggctggaagaggaagatgcctagcacagaccttctgatgttgaaggcctttgagccctacttagagattttggaagtatactccacaaaagccaagaattatgtaaatggacattgcaccaagtatgagccctggcagctaattgcatggagtgtcgtgtggaccctgctgatagtctggggatatgagtttgtcttccagccagagagtttatggtcaaggtttaaaaagaaatgttttaagctcaccaggaagatgcccattattggtcgtaagattcaagacaagttgaacaagaccaaggatgatattagcaagaacatgtcattcctgaaagtggacaaagagtatgtgaaagctttaccctcccagggtctgagctcatctgctgttttggagaaacttaaggagtacagctctatggacgccttctggcaagaggggagagcctctggaacagtgtacagtggggaggagaagctcactgagctccttgtgaaggcttatggagattttgcatggagtaaccccctgcatccagatatcttcccaggactacgcaagatagaggcagaaattgtgaggatagcttgttccctgttcaatgggggaccagattcgtgtggatgtgtgacttctgggggaacagaaagcatactgatggcctgcaaagcatatcgggatctggcctttgagaaggggatcaaaactccagaaattgtggctccccaaagtgcccatgctgcatttaacaaagcagccagttactttgggatgaagattgtgcgggtcccattgacgaagatgatggaggtggatgtgcgggcaatgagaagagctatctccaggaacactgccatgctcgtctgttctaccccacagtttcctcatggtgtaatagatcctgtccctgaagtggccaagctggctgtcaaatacaaaataccccttcatgtcgacgcttgtctgggaggcttcctcatcgtctttatggagaaagcaggatacccactggagcacccatttgatttccgggtgaaaggtgtaaccagcatttcagctgacacccataagtatggctatgccccaaaaggctcatcattggtgttgtatagtgacaagaagtacaggaactatcagttcttcgtcgatacagattggcagggtggcatctatgcttccccaaccatcgcaggctcacggcctggtggcattagcgcagcctgttgggctgccttgatgcacttcggtgagaacggctatgttgaagctaccaaacagatcatcaaaactgctcgcttcctcaagtcagaactggaaaatatcaaaggcatctttgtttttgggaatccccaattgtcagtcattgctctgggatcccgtgattttgacatctaccgactatcaaacctgatgactgctaaggggtggaacttgaaccagttgcagttcccacccagtattcatttctgcatcacattactacacgcccggaaacgagtagctatacaattcctaaaggacattcgagaatctgtcactcaaatcatgaagaatcctaaagcgaagaccacaggaatgggtgccatctatggcatggcccagacaactgttgacaggaatatggttgcagaattgtcctcagtcttcttggacagcttgtacagcaccgacactgtcacccagggcagccagatgaatggttctccaaaaccccactgaacttggaccctttctagtctcaaggggattccagccttcagaaggttcttgggatatggaacaggccgtgcacaactttgacatctggtcttgctccatagagcacaactcaagatagaccatgagacagcttgagcctcaggattcttgttcttcctcttatcttccttttgtggtttttaatttgaagaccccagagaattccattacataatgattttgcccttgttataaatgttaccctaggaattgttttaaccatttccttttctaaactctctagctttcaactttacttaaacattgtgtggtagctctgacctgtcctgattctttagagaagctggggtacagtttatgagatagctagagcttctttgttatctcaggcaggaggcgtttacataacagatgtttcctcagctgggtgtgaggtatactctaagcaggaggctttttcagccttctctctctttttttttttttttttttttttttgagatggaattttgctcttttgcccagtctggagtgcagtggcatgatctcagctcactgcaacctccacccactgggttcaagcgattcttctgcctcagcctcccgagtagctgggattaccggcacccaccaccacgcctggctaatttttcaattttctttttcagtagagacgggttcaccgtgttggccaggctggtcttgaactcctgacctcaggtgatacccgcccccccgcctcagcctcccaaagtgctgggattacaggcgtgagccaccgtgcctggccctgtctctcttaagagtaggttcattgtctgtcttagagtcacttctattgcaactcattttctttttccagggcacagatcgaccaagctgccgttccctattctgcaggacaggactattctagcatacctgcttcgtccacccaggcagggtttggggtggtctcttctgtgcctgcagtccccatttgacacttggttgccaccatctttggagattattgtttggaatgatgcttccattggctttttcttgttaccatggactaggaagaaaacatggtttccaaataatctgggagcttttggccatggtgccgccttcctgaattggcagtggtcagagcacacctgaaccctatcctgggctggtgatgagcagaaatcagacctttttctatgcttttttgaatatcagagtaggatgaacacccagattcaaatatgtcaccaaagttggtggtggtccttccctgcacccttgcgttaagccattatgtaatgaaaatgtgtttgcttgaaggaacagctcaaagcaccttcacaagttgccttgacttaccctaggtgggtgtgaaagagcacccgtagcaaggaaaattttctctattagtgtgttcttctgcctcttcccccttgattcagctttcagaggtactatggcagttttgcctcaggtgctgaacatttctcagccctggctaaaagggagcagcacagggagagaaacaggataggaaagcagaatggcgagcagcctatggcccagggcctgtaatcccttcccaagactagctgctcagggtggtgcagggacaggaccagaccctgcgcctatttcctgccttctttcccctatagggaactctgtaggctgagccactgtcctgctcttatgacattatatcttgtgcctttctcctcagcagtgagcagtgagctactcctggcccaggccctaggggaaatggatcagtctttgaggtttctatttggggaggggagtacttaagatgagtcaaaagacactttcctctgttccattccccatctcagggactcctgaatattcagcctctccaggctggtgtcttctagtttcccccactgggaatgctggctgggagagccatgactaccagacttttcctcaggctccttggcatgttagtctgaattgttcttgagcactgtactactgacccaacaactgtgactagctggccacgccattcagggctggtgtggcatttatgtgtgtgtgtgtgtgtgtgtgtttttcctgtttgcccagcagtgcattgtgggttccaagagtgggtagtgtgtgtatgtgtgtgtgtcagagggagacctggcaggcacctctttgagagtagctgtggtcagagctgtttggtcagtgcattatgttgaatgaggtccaggaacccagagccacccagcagacaccactgtggcttgccagctgccaagatggagaagcatgtgcccctgtagagcgtctccccagaaccagaccccgagccactcgcttcctctgtgctgtgacaacattggtgccaggggagatggtgtttttcaaagggacctactgtagccactttaatttacaattaagagccttagtttgacttaacacttttgtaggcttttcattgtgtatttttgtgtatgtgtgcatatagcagctactctgtagcagaggtgggtagagacacttaatagtatcatgtcgcatgcagatgtcacatcggcctctgcaaaaactgtactgtcttgtttctgcattagacttaagtagtcatgtgaatatactgctatgtcacttttaatattacgagttttatacttggaaaatggtacttgcttcttttaaatctctgtcttctctaacctcccccttcccatttcaatgctcccttcctaatttcagcaataatctcaaaaagcaattaaatagttaaatgaccctaattgtaattactgtggatggttgcattcatttgattacttgggcacacacgagatgacaaatggggcagtggccatgcttgaatgggctcctggtgagagattgccccctggtggtgaaacaatcgtgtgtgcccactgataccaagaccaatgaaagagacacagttaagcagcaatccatctcatttccaggcacttcaataggtcgctgattggtccttgcaccagcagtggtagtcgtacctatttcagagaggtctgaaattcaggttcttagtttgccagggacaggccctatcttatatttttttccatcttcatcatccacttctgcttacagtttgctgcttacaataacttaatgatggattgagttatctgggtggtctctagccatctgggcagtgtggttctgtctaaccaaagggcattggcctcaaaccctgcatttggtttaggggctaacagagctcctcagataatcttcacacacatgtaactgctggagatcttattctattatgaataagaaacgagaagtttttccaaagtgttagtcaggatctgaaggctgtcattcagataacccagcttttccttttggcttttagcccattcagactttgccagagtcaagccaaggattgcttttttgctacagttttctgccaaatggcctagttcctgagtacctggaaaccagagagaaagaggatccaggatgtacttggatgaggaggcctggcttatctaggaagtcgtgtctggggtgcttattgctgctccatacagctgtacgtcagccccttggccttctctgtaggttcttggcagcaatgagcagctttcactcagtgacacaagtaattactgagtcctaatttgatagccaccaactgtacctgggtaggcaaagtcagatttttgagaacctttttcctgatttgaagttttaattaccttattttcttttatgctttcctctgtcttgtaatcttttctcttcttaatatccttccctataatttcaattatttggattaattttagaataaacctatttatttctaaaaaaaaaaagaaaa

SEQ ID NO: 296493 - DNA, 4693 bp, Homo sapiens
attttgattcgctggtctggggtgctaggggtggactgtgatatctgggaatgaaatctgagccttcaaaggagggagagaaccataacttggctgctctggcgaatctaggcgggctggcgagacagtttaaagctctagaagtaaacaaacctggttcccttttacagagtctgaaaaaggggagcgcggagaggaggctggaagaggaagatgcctagcacagaccttctgatgttgaaggcctttgagccctacttagagattttggaagtatactccacaaaagccaagaattatgtaaatggacattgcaccaagtatgagccctggcagctaattgcatggagtgtcgtgtggaccctgctgatagtctggggatatgagtttgtcttccagccagagagtttatggtcaaggtttaaaaagaaatgttttaagctcaccaggaagatgcccattattggtcgtaagattcaagacaagttgaacaagaccaaggatgatattagcaagaacatgtcattcctgaaagtggacaaagagtatgtgaaagctttaccctcccagggtctgagctcatctgctgttttggagaaacttaaggagtacagctctatggacgccttctggcaagaggggagagcctctggaacagtgtacagtggggaggagaagctcactgagctccttgtgaaggcttatggagattttgcatggagtaaccccctgcatccagatatcttcccaggactacgcaagatagaggcagaaattgtgaggatagcttgttccctgttcaatgggggaccagattcgtgtggatgtgtgacttctgggggaacagaaagcatactgatggcctgcaaagcatatcgggatctggcctttgagaaggggatcaaaactccagaaattgtggctccccaaagtgcccatgctgcatttaacaaagcagccagttactttgggatgaagattgtgcgggtcccattgacgaagatgatggaggtggatgtgcgggcaatgagaagagctatctccaggaacactgccatgctcgtctgttctaccccacagtttcctcatggtgtaatagatcctgtccctgaagtggccaagctggctgtcaaatacaaaataccccttcatgtcgacgcttgtctgggaggcttcctcatcgtctttatggagaaagcaggatacccactggagcacccatttgatttccgggtgaaaggtgtaaccagcatttcagctgacacccataagtatggctatgccccaaaaggctcatcattggtgttgtatagtgacaagaagtacaggaactatcagttcttcgtcgatacagattggcagggtggcatctatgcttccccaaccatcgcaggctcacggcctggtggcattagcgcagcctgttgggctgccttgatgcacttcggtgagaacggctatgttgaagctaccaaacagatcatcaaaactgctcgcttcctcaagtcagaactggaaaatatcaaaggcatctttgtttttgggaatccccaattgtcagtcattgctctgggatcccgtgattttgacatctaccgactatcaaacctgatgactgctaaggggtggaacttgaaccagttgcagttcccacccagtattcatttctgcatcacattactacacgcccggaaacgagtagctatacaattcctaaaggacattcgagaatctgtcactcaaatcatgaagaatcctaaagcgaagaccacaggaatgggtgccatctatggcatggcccagacaactgttgacaggaatatggttgcagaattgtcctcagtcttcttggacagcttgtacagcaccgacactgtcacccagggcagccagatgaatggttctccaaaaccccactgaacttggaccctttctagtctcaaggggattccagccttcagaaggttcttgggatatggaacaggccgtgcacaactttgacatctggtcttgctccatagagcacaactcaagatagaccatgagacagcttgagcctcaggattcttgttcttcctcttatcttccttttgtggtttttaatttgaagaccccagagaattccattacataatgattttgcccttgttataaatgttaccctaggaattgttttaaccatttccttttctaaactctctagctttcaactttacttaaacattgtgtggtagctctgacctgtcctgattctttagagaagctggggtacagtttatgagatagctagagcttctttgttatctcaggcaggaggcgtttacataacagatgtttcctcagctgggtgtgaggtatactctaagcaggaggctttttcagccttctctctctttttttttttttttttttttttttgagatggaattttgctcttttgcccagtctggagtgcagtggcatgatctcagctcactgcaacctccacccactgggttcaagcgattcttctgcctcagcctcccgagtagctgggattaccggcacccaccaccacgcctggctaatttttcaattttctttttcagtagagacgggttcaccgtgttggccaggctggtcttgaactcctgacctcaggtgatacccgcccccccgcctcagcctcccaaagtgctgggattacaggcgtgagccaccgtgcctggccctgtctctcttaagagtaggttcattgtctgtcttagagtcacttctattgcaactcattttctttttccagggcacagatcgaccaagctgccgttccctattctgcaggacaggactattctagcatacctgcttcgtccacccaggcagggtttggggtggtctcttctgtgcctgcagtccccatttgacacttggttgccaccatctttggagattattgtttggaatgatgcttccattggctttttcttgttaccatggactaggaagaaaacatggtttccaaataatctgggagcttttggccatggtgccgccttcctgaattggcagtggtcagagcacacctgaaccctatcctgggctggtgatgagcagaaatcagacctttttctatgcttttttgaatatcagagtaggatgaacacccagattcaaatatgtcaccaaagttggtggtggtccttccctgcacccttgcgttaagccattatgtaatgaaaatgtgtttgcttgaaggaacagctcaaagcaccttcacaagttgccttgacttaccctaggtgggtgtgaaagagcacccgtagcaaggaaaattttctctattagtgtgttcttctgcctcttcccccttgattcagctttcagaggtactatggcagttttgcctcaggtgctgaacatttctcagccctggctaaaagggagcagcacagggagagaaacaggataggaaagcagaatggcgagcagcctatggcccagggcctgtaatcccttcccaagactagctgctcagggtggtgcagggacaggaccagaccctgcgcctatttcctgccttctttcccctatagggaactctgtaggctgagccactgtcctgctcttatgacattatatcttgtgcctttctcctcagcagtgagcagtgagctactcctggcccaggccctaggggaaatggatcagtctttgaggtttctatttggggaggggagtacttaagatgagtcaaaagacactttcctctgttccattccccatctcagggactcctgaatattcagcctctccaggctggtgtcttctagtttcccccactgggaatgctggctgggagagccatgactaccagacttttcctcaggctccttggcatgttagtctgaattgttcttgagcactgtactactgacccaacaactgtgactagctggccacgccattcagggctggtgtggcatttatgtgtgtgtgtgtgtgtgtgtgtttttcctgtttgcccagcagtgcattgtgggttccaagagtgggtagtgtgtgtatgtgtgtgtgtcagagggagacctggcaggcacctctttgagagtagctgtggtcagagctgtttggtcagtgcattatgttgaatgaggtccaggaacccagagccacccagcagacaccactgtggcttgccagctgccaagatggagaagcatgtgcccctgtagagcgtctccccagaaccagaccccgagccactcgcttcctctgtgctgtgacaacattggtgccaggggagatggtgtttttcaaagggacctactgtagccactttaatttacaattaagagccttagtttgacttaacacttttgtaggcttttcattgtgtatttttgtgtatgtgtgcatatagcagctactctgtagcagaggtgggtagagacacttaatagtatcatgtcgcatgcagatgtcacatcggcctctgcaaaaactgtactgtcttgtttctgcattagacttaagtagtcatgtgaatatactgctatgtcacttttaatattacgagttttatacttggaaaatggtacttgcttcttttaaatctctgtcttctctaacctcccccttcccatttcaatgctcccttcctaatttcagcaataatctcaaaaagcaattaaatagttaaatgaccctaattgta

SEQ ID NO: 296494 - DNA, 5284 bp, Homo sapiens
attttgattcgctggtctggggtgctaggggtggactgtgatatctgggaatgaaatctgagccttcaaaggagggagagaaccataacttggctgctctggcgaatctaggcgggctggcgagacagtttaaagctctagaagtaaacaaacctggttcccttttacagagtctgaaaaaggggagcgcggagaggaggctggaagaggaagatgcctagcacagaccttctgatgttgaaggcctttgagccctacttagagattttggaagtatactccacaaaagccaagaattatgtaaatggacattgcaccaagtatgagccctggcagctaattgcatggagtgtcgtgtggaccctgctgatagtctggggatatgagtttgtcttccagccagagagtttatggtcaaggtttaaaaagaaatgttttaagctcaccaggaagatgcccattattggtcgtaagattcaagacaagttgaacaagaccaaggatgatattagcaagaacatgtcattcctgaaagtggacaaagagtatgtgaaagctttaccctcccagggtctgagctcatctgctgttttggagaaacttaaggagtacagctctatggacgccttctggcaagaggggagagcctctggaacagtgtacagtggggaggagaagctcactgagctccttgtgaaggcttatggagattttgcatggagtaaccccctgcatccagatatcttcccaggactacgcaagatagaggcagaaattgtgaggatagcttgttccctgttcaatgggggaccagattcgtgtggatgtgtgacttctgggggaacagaaagcatactgatggcctgcaaagcatatcgggatctggcctttgagaaggggatcaaaactccagaaattgtggctccccaaagtgcccatgctgcatttaacaaagcagccagttactttgggatgaagattgtgcgggtcccattgacgaagatgatggaggtggatgtgcgggcaatgagaagagctatctccaggaacactgccatgctcgtctgttctaccccacagtttcctcatggtgtaatagatcctgtccctgaagtggccaagctggctgtcaaatacaaaataccccttcatgtcgacgcttgtctgggaggcttcctcatcgtctttatggagaaagcaggatacccactggagcacccatttgatttccgggtgaaaggtgtaaccagcatttcagctgacacccataagtatggctatgccccaaaaggctcatcattggtgttgtatagtgacaagaagtacaggaatatggttgcagaattgtcctcagtcttcttggacagcttgtacagcaccgacactgtcacccagggcagccagatgaatggttctccaaaaccccactgaacttggaccctttctagtctcaaggggattccagccttcagaaggttcttgggatatggaacaggccgtgcacaactttgacatctggtcttgctccatagagcacaactcaagatagaccatgagacagcttgagcctcaggattcttgttcttcctcttatcttccttttgtggtttttaatttgaagaccccagagaattccattacataatgattttgcccttgttataaatgttaccctaggaattgttttaaccatttccttttctaaactctctagctttcaactttacttaaacattgtgtggtagctctgacctgtcctgattctttagagaagctggggtacagtttatgagatagctagagcttctttgttatctcaggcaggaggcgtttacataacagatgtttcctcagctgggtgtgaggtatactctaagcaggaggctttttcagccttctctctctttttttttttttttttttttttttgagatggaattttgctcttttgcccagtctggagtgcagtggcatgatctcagctcactgcaacctccacccactgggttcaagcgattcttctgcctcagcctcccgagtagctgggattaccggcacccaccaccacgcctggctaatttttcaattttctttttcagtagagacgggttcaccgtgttggccaggctggtcttgaactcctgacctcaggtgatacccgcccccccgcctcagcctcccaaagtgctgggattacaggcgtgagccaccgtgcctggccctgtctctcttaagagtaggttcattgtctgtcttagagtcacttctattgcaactcattttctttttccagggcacagatcgaccaagctgccgttccctattctgcaggacaggactattctagcatacctgcttcgtccacccaggcagggtttggggtggtctcttctgtgcctgcagtccccatttgacacttggttgccaccatctttggagattattgtttggaatgatgcttccattggctttttcttgttaccatggactaggaagaaaacatggtttccaaataatctgggagcttttggccatggtgccgccttcctgaattggcagtggtcagagcacacctgaaccctatcctgggctggtgatgagcagaaatcagacctttttctatgcttttttgaatatcagagtaggatgaacacccagattcaaatatgtcaccaaagttggtggtggtccttccctgcacccttgcgttaagccattatgtaatgaaaatgtgtttgcttgaaggaacagctcaaagcaccttcacaagttgccttgacttaccctaggtgggtgtgaaagagcacccgtagcaaggaaaattttctctattagtgtgttcttctgcctcttcccccttgattcagctttcagaggtactatggcagttttgcctcaggtgctgaacatttctcagccctggctaaaagggagcagcacagggagagaaacaggataggaaagcagaatggcgagcagcctatggcccagggcctgtaatcccttcccaagactagctgctcagggtggtgcagggacaggaccagaccctgcgcctatttcctgccttctttcccctatagggaactctgtaggctgagccactgtcctgctcttatgacattatatcttgtgcctttctcctcagcagtgagcagtgagctactcctggcccaggccctaggggaaatggatcagtctttgaggtttctatttggggaggggagtacttaagatgagtcaaaagacactttcctctgttccattccccatctcagggactcctgaatattcagcctctccaggctggtgtcttctagtttcccccactgggaatgctggctgggagagccatgactaccagacttttcctcaggctccttggcatgttagtctgaattgttcttgagcactgtactactgacccaacaactgtgactagctggccacgccattcagggctggtgtggcatttatgtgtgtgtgtgtgtgtgtgtgtttttcctgtttgcccagcagtgcattgtgggttccaagagtgggtagtgtgtgtatgtgtgtgtgtcagagggagacctggcaggcacctctttgagagtagctgtggtcagagctgtttggtcagtgcattatgttgaatgaggtccaggaacccagagccacccagcagacaccactgtggcttgccagctgccaagatggagaagcatgtgcccctgtagagcgtctccccagaaccagaccccgagccactcgcttcctctgtgctgtgacaacattggtgccaggggagatggtgtttttcaaagggacctactgtagccactttaatttacaattaagagccttagtttgacttaacacttttgtaggcttttcattgtgtatttttgtgtatgtgtgcatatagcagctactctgtagcagaggtgggtagagacacttaatagtatcatgtcgcatgcagatgtcacatcggcctctgcaaaaactgtactgtcttgtttctgcattagacttaagtagtcatgtgaatatactgctatgtcacttttaatattacgagttttatacttggaaaatggtacttgcttcttttaaatctctgtcttctctaacctcccccttcccatttcaatgctcccttcctaatttcagcaataatctcaaaaagcaattaaatagttaaatgaccctaattgtaattactgtggatggttgcattcatttgattacttgggcacacacgagatgacaaatggggcagtggccatgcttgaatgggctcctggtgagagattgccccctggtggtgaaacaatcgtgtgtgcccactgataccaagaccaatgaaagagacacagttaagcagcaatccatctcatttccaggcacttcaataggtcgctgattggtccttgcaccagcagtggtagtcgtacctatttcagagaggtctgaaattcaggttcttagtttgccagggacaggccctatcttatatttttttccatcttcatcatccacttctgcttacagtttgctgcttacaataacttaatgatggattgagttatctgggtggtctctagccatctgggcagtgtggttctgtctaaccaaagggcattggcctcaaaccctgcatttggtttaggggctaacagagctcctcagataatcttcacacacatgtaactgctggagatcttattctattatgaataagaaacgagaagtttttccaaagtgttagtcaggatctgaaggctgtcattcagataacccagcttttccttttggcttttagcccattcagactttgccagagtcaagccaaggattgcttttttgctacagttttctgccaaatggcctagttcctgagtacctggaaaccagagagaaagaggatccaggatgtacttggatgaggaggcctggcttatctaggaagtcgtgtctggggtgcttattgctgctccatacagctgtacgtcagccccttggccttctctgtaggttcttggcagcaatgagcagctttcactcagtgacacaagtaattactgagtcctaatttgatagccaccaactgtacctgggtaggcaaagtcagatttttgagaacctttttcctgatttgaagttttaattaccttattttcttttatgctttcctctgtcttgtaatcttttctcttcttaatatccttccctataatttcaattatttggattaattttagaataaacctatttatttctaaaaaaaaaaagaaaa

SEQ ID NO: 296495 - DNA, 5673 bp, Homo sapiens
attttgattcgctggtctggggtgctaggggtggactgtgatatctgggaatgaaatctgagccttcaaaggagggagagaaccataacttggctgctctggcgaatctaggcgggctggcgagacagtttaaagctctagaagtaaacaaacctggttcccttttacagagtctgaaaaaggggagcgcggagaggaggctggaagaggaagatgcctagcacagaccttctgatgttgaaggcctttgagccctacttagagattttggaagtatactccacaaaagccaagaattatgtaaatggacattgcaccaagtatgagccctggcagctaattgcatggagtgtcgtgtggaccctgctgatagtctggggatatgagtttgtcttccagccagagagtttatggtcaaggtttaaaaagaaatgttttaagctcaccaggaagatgcccattattggtcgtaagattcaagacaagttgaacaagaccaaggatgatattagcaagaacatgtcattcctgaaagtggacaaagagtatgtgaaagctttaccctcccagggtctgagctcatctgctgttttggagaaacttaaggagtacagctctatggacgccttctggcaagaggggagagcctctggaacagtgtacagtggggaggagaagctcactgagctccttgtgaaggcttatggagattttgcatggagtaaccccctgcatccagatatcttcccaggactacgcaagatagaggcagaaattgtgaggatagcttgttccctgttcaatgggggaccagattcgtgtggatgtgtgacttctgggggaacagaaagcatactgatggcctgcaaagcatatcgggatctggcctttgagaaggggatcaaaactccagaaattgtggctccccaaagtgcccatgctgcatttaacaaagcagccagttactttgggatgaagattgtgcgggtcccattgacgaagatgatggaggtggatgtgcgggcaatgagaagagctatctccaggaacactgccatgctcgtctgttctaccccacagtttcctcatggtgtaatagatcctgtccctgaagtggccaagctggctgtcaaatacaaaataccccttcatgtcgacgcttgtctgggaggcttcctcatcgtctttatggagaaagcaggatacccactggagcacccatttgatttccgggtgaaaggtgtaaccagcatttcagctgacacccataagtatggctatgccccaaaaggctcatcattggtgttgtatagtgacaagaagtacaggaactatcagttcttcgtcgatacagattggcagggtggcatctatgcttccccaaccatcgcaggctcacggcctggtggcattagcgcagcctgttgggctgccttgatgcacttcggtgagaacggctatgttgaagctaccaaacagatcatcaaaactgctcgcttcctcaagtcagaactggaaaatatcaaaggcatctttgtttttgggaatccccaattgtcagtcattgctctgggatcccgtgattttgacatctaccgactatcaaacctgatgactgctaaggggtggaacttgaaccagttgcagttcccacccagtattcatttctgcatcacattactacacgcccggaaacgagtagctatacaattcctaaaggacattcgagaatctgtcactcaaatcatgaagaatcctaaagcgaagaccacaggaatgggtgccatctatggcatggcccagacaactgttgacaggaatatggttgcagaattgtcctcagtcttcttggacagcttgtacagcaccgacactgtcacccagggcagccagatgaatggttctccaaaaccccactgaacttggaccctttctagtctcaaggggattccagccttcagaaggttcttgggatatggaacaggccgtgcacaactttgacatctggtcttgctccatagagcacaactcaagatagaccatgagacagcttgagcctcaggattcttgttcttcctcttatcttccttttgtggtttttaatttgaagaccccagagaattccattacataatgattttgcccttgttataaatgttaccctaggaattgttttaaccatttccttttctaaactctctagctttcaactttacttaaacattgtgtggtagctctgacctgtcctgattctttagagaagctggggtacagtttatgagatagctagagcttctttgttatctcaggcaggaggcgtttacataacagatgtttcctcagctgggtgtgaggtatactctaagcaggaggctttttcagccttctctctctttttttttttttttttttttttttgagatggaattttgctcttttgcccagtctggagtgcagtggcatgatctcagctcactgcaacctccacccactgggttcaagcgattcttctgcctcagcctcccgagtagctgggattaccggcacccaccaccacgcctggctaatttttcaattttctttttcagtagagacgggttcaccgtgttggccaggctggtcttgaactcctgacctcaggtgatacccgcccccccgcctcagcctcccaaagtgctgggattacaggcgtgagccaccgtgcctggccctgtctctcttaagagtaggttcattgtctgtcttagagtcacttctattgcaactcattttctttttccagggcacagatcgaccaagctgccgttccctattctgcaggacaggactattctagcatacctgcttcgtccacccaggcagggtttggggtggtctcttctgtgcctgcagtccccatttgacacttggttgccaccatctttggagattattgtttggaatgatgcttccattggctttttcttgttaccatggactaggaagaaaacatggtttccaaataatctgggagcttttggccatggtgccgccttcctgaattggcagtggtcagagcacacctgaaccctatcctgggctggtgatgagcagaaatcagacctttttctatgcttttttgaatatcagagtaggatgaacacccagattcaaatatgtcaccaaagttggtggtggtccttccctgcacccttgcgttaagccattatgtaatgaaaatgtgtttgcttgaaggaacagctcaaagcaccttcacaagttgccttgacttaccctaggtgggtgtgaaagagcacccgtagcaaggaaaattttctctattagtgtgttcttctgcctcttcccccttgattcagctttcagaggtactatggcagttttgcctcaggtgctgaacatttctcagccctggctaaaagggagcagcacagggagagaaacaggataggaaagcagaatggcgagcagcctatggcccagggcctgtaatcccttcccaagactagctgctcagggtggtgcagggacaggaccagaccctgcgcctatttcctgccttctttcccctatagggaactctgtaggctgagccactgtcctgctcttatgacattatatcttgtgcctttctcctcagcagtgagcagtgagctactcctggcccaggccctaggggaaatggatcagtctttgaggtttctatttggggaggggagtacttaagatgagtcaaaagacactttcctctgttccattccccatctcagggactcctgaatattcagcctctccaggctggtgtcttctagtttcccccactgggaatgctggctgggagagccatgactaccagacttttcctcaggctccttggcatgttagtctgaattgttcttgagcactgtactactgacccaacaactgtgactagctggccacgccattcagggctggtgtggcatttatgtgtgtgtgtgtgtgtgtgtgtttttcctgtttgcccagcagtgcattgtgggttccaagagtgggtagtgtgtgtatgtgtgtgtgtcagagggagacctggcaggcacctctttgagagtagctgtggtcagagctgtttggtcagtgcattatgttgaatgaggtccaggaacccagagccacccagcagacaccactgtggcttgccagctgccaagatggagaagcatgtgcccctgtagagcgtctccccagaaccagaccccgagccactcgcttcctctgtgctgtgacaacattggtgccaggggagatggtgtttttcaaagggacctactgtagccactttaatttacaattaagagccttagtttgacttaacacttttgtaggcttttcattgtgtatttttgtgtatgtgtgcatatagcagctactctgtagcagaggtgggtagagacacttaatagtatcatgtcgcatgcagatgtcacatcggcctctgcaaaaactgtactgtcttgtttctgcattagacttaagtagtcatgtgaatatactgctatgtcacttttaatattacgagttttatacttggaaaatggtacttgcttcttttaaatctctgtcttctctaacctcccccttcccatttcaatgctcccttcctaatttcagcaataatctcaaaaagcaattaaatagttaaatgaccctaattgtaattactgtggatggttgcattcatttgattacttgggcacacacgagatgacaaatggggcagtggccatgcttgaatgggctcctggtgagagattgccccctggtggtgaaacaatcgtgtgtgcccactgataccaagaccaatgaaagagacacagttaagcagcaatccatctcatttccaggcacttcaataggtcgctgattggtccttgcaccagcagtggtagtcgtacctatttcagagaggtctgaaattcaggttcttagtttgccagggacaggccctatcttatatttttttccatcttcatcatccacttctgcttacagtttgctgcttacaataacttaatgatggattgagttatctgggtggtctctagccatctgggcagtgtggttctgtctaaccaaagggcattggcctcaaaccctgcatttggtttaggggctaacagagctcctcagataatcttcacacacatgtaactgctggagatcttattctattatgaataagaaacgagaagtttttccaaagtgttagtcaggatctgaaggctgtcattcagataacccagcttttccttttggcttttagcccattcagactttgccagagtcaagccaaggattgcttttttgctacagttttctgccaaatggcctagttcctgagtacctggaaaccagagagaaagaggatccaggatgtacttggatgaggaggcctggcttatctaggaagtcgtgtctggggtgcttattgctgctccatcttggcagctggcaagccacagtggtgtctgctgggtggctctgggttcctggacctcattcaacataatgcactgaccaaacagctctgaccacagctactctcaaagaggtgcctgccaggtctccctctgacacacacacatacacacactacccactcttggaacccacgatgcactgctggcgggatcctct

SEQ ID NO: 296496 - DNA, 4484 bp, Homo sapiens
attttgattcgctggtctggggtgctaggggtggactgtgatatctgggaatgaaatctgagccttcaaaggagggagagaaccataacttggctgctctggcgaatctaggcgggctggcgagacagtttaaagctctagaagtaaacaaacctggttcccttttacagagtctgaaaaaggggagcgcggagaggaggctggaagaggaagatgcctagcacagaccttctgatgttgaaggcctttgagccctacttagagattttggaagtatactccacaaaagccaagaattatgtaaatggacattgcaccaagtatgagccctggcagctaattgcatggagtgtcgtgtggaccctgctgatagtctggggatatgagtttgtcttccagccagagagtttatggtcaaggtttaaaaagaaatgttttaagctcaccaggaagatgcccattattggtcgtaagattcaagacaagttgaacaagaccaaggatgatattagcaagaacatgtcattcctgaaagtggacaaagagtatgtgaaagctttaccctcccagggtctgagctcatctgctgttttggagaaacttaaggagtacagctctatggacgccttctggcaagaggggagagcctctggaacagtgtacagtggggaggagaagctcactgagctccttgtgaaggcttatggagattttgcatggagtaaccccctgcatccagatatcttcccaggactacgcaagatagaggcagaaattgtgaggatagcttgttccctgttcaatgggggaccagattcgtgtggatgtgtgacttctgggggaacagaaagcatactgatggcctgcaaagcatatcgggatctggcctttgagaaggggatcaaaactccagaaattgtggctccccaaagtgcccatgctgcatttaacaaagcagccagttactttgggatgaagattgtgcgggtcccattgacgaagatgatggaggtggatgtgcgggcaatgagaagagctatctccaggaacactgccatgctcgtctgttctaccccacagtttcctcatggtgtaatagatcctgtccctgaagtggccaagctggctgtcaaatacaaaataccccttcatgtcgacgcttgtctgggaggcttcctcatcgtctttatggagaaagcaggatacccactggagcacccatttgatttccgggtgaaaggtgtaaccagcatttcagctgacacccataagtatggctatgccccaaaaggctcatcattggtgttgtatagtgacaagaagtacaggaactatcagttcttcgtcgatacagattggcagggtggcatctatgcttccccaaccatcgcaggctcacggcctggtggcattagcgcagcctgttgggctgccttgatgcacttcggtgagaacggctatgttgaagctaccaaacagatcatcaaaactgctcgcttcctcaagtcagaactggaaaatatcaaaggcatctttgtttttgggaatccccaattgtcagtcattgctctgggatcccgtgattttgacatctaccgactatcaaacctgatgactgctaaggggtggaacttgaaccagttgcagttcccacccagtattcatttctgcatcacattactacacgcccggaaacgagtagctatacaattcctaaaggacattcgagaatctgtcactcaaatcatgaagaatcctaaagcgaagaccacaggaatgggtgccatctatggcatggcccagacaactgttgacaggaatatggttgcagaattgtcctcagtcttcttggacagcttgtacagcaccgacactgtcacccagggcagccagatgaatggttctccaaaaccccactgaacttggaccctttctagtctcaaggggattccagccttcagaaggttcttgggatatggaacaggccgtgcacaactttgacatctggtcttgctccatagagcacaactcaagatagaccatgagacagcttgagcctcaggattcttgttcttcctcttatcttccttttgtggtttttaatttgaagaccccagagaattccattacataatgattttgcccttgttataaatgttaccctaggaattgttttaaccatttccttttctaaactctctagctttcaactttacttaaacattgtgtggtagctctgacctgtcctgattctttagagaagctggggtacagtttatgagatagctagagcttctttgttatctcaggcaggaggcgtttacataacagatgtttcctcagctgggtgtgaggtatactctaagcaggaggctttttcagccttctctctctttttttttttttttttttttttttgagatggaattttgctcttttgcccagtctggagtgcagtggcatgatctcagctcactgcaacctccacccactgggttcaagcgattcttctgcctcagcctcccgagtagctgggattaccggcacccaccaccacgcctggctaatttttcaattttctttttcagtagagacgggttcaccgtgttggccaggctggtcttgaactcctgacctcaggtgatacccgcccccccgcctcagcctcccaaagtgctgggattacaggcgtgagccaccgtgcctggccctgtctctcttaagagtaggttcattgtctgtcttagagtcacttctattgcaactcattttctttttccagggcacagatcgaccaagctgccgttccctattctgcaggacaggactattctagcatacctgcttcgtccacccaggcagggtttggggtggtctcttctgtgcctgcagtccccatttgacacttggttgccaccatctttggagattattgtttggaatgatgcttccattggctttttcttgttaccatggactaggaagaaaacatggtttccaaataatctgggagcttttggccatggtgccgccttcctgaattggcagtggtcagagcacacctgaaccctatcctgggctggtgatgagcagaaatcagacctttttctatgcttttttgaatatcagagtaggatgaacacccagattcaaatatgtcaccaaagttggtggtggtccttccctgcacccttgcgttaagccattatgtaatgaaaatgtgtttgcttgaaggaacagctcaaagcaccttcacaagttgccttgacttaccctaggtgggtgtgaaagagcacccgtagcaaggaaaattttctctattagtgtgttcttctgcctcttcccccttgattcagctttcagaggtactatggcagttttgcctcaggtgctgaacatttctcagccctggctaaaagggagcagcacagggagagaaacaggataggaaagcagaatggcgagcagcctatggcccagggcctgtaatcccttcccaagactagctgctcagggtggtgcagggacaggaccagaccctgcgcctatttcctgccttctttcccctatagggaactctgtaggctgagccactgtcctgctcttatgacattatatcttgtgcctttctcctcagcagtgagcagtgagctactcctggcccaggccctaggggaaatggatcagtctttgaggtttctatttggggaggggagtacttaagatgagtcaaaagacactttcctctgttccattccccatctcagggactcctgaatattcagcctctccaggctggtgtcttctagtttcccccactgggaatgctggctgggagagccatgactaccagacttttcctcaggctccttggcatgttagtctgaattgttcttgagcactgtactactgacccaacaactgtgactagctggccacgccattcagggctggtgtggcatttatgtgtgtgtgtgtgtgtgtgtgtttttcctgtttgcccagcagtgcattgtgggttccaagagtgggtagtgtgtgtatgtgctgtgacaacattggtgccaggggagatggtgtttttcaaagggacctactgtagccactttaatttacaattaagagccttagtttgacttaacacttttgtaggcttttcattgtgtatttttgtgtatgtgtgcatatagcagctactctgtagcagaggtgggtagagacacttaatagtatcatgtcgcatgcagatgtcacatcggcctctgcaaaaactgtactgtcttgtttctgcattagacttaagtagtcatgtgaatatactgctatgtcacttttaatattacgagttttatacttggaaaatggtacttgcttcttttaaatctctgtcttctctaacctcccccttcccatttcaatgctcccttcctaatttcagcaataatctcaaaaagcaattaaatagttaaatgaccctaattgta

SEQ ID NO: 296497 - DNA, 2889 bp, Homo sapiens
attttgattcgctggtctggggtgctaggggtggactgtgatatctgggaatgaaatctgagccttcaaaggagggagagaaccataacttggctgctctggcgaatctaggcgggctggcgagacagtttaaagctctagaagtaaacaaacctggttcccttttacagagtctgaaaaaggggagcgcggagaggaggctggaagaggaagatgcctagcacagaccttctgatgttgaaggcctttgagccctacttagagattttggaagtatactccacaaaagccaagaattatgtaaatggacattgcaccaagtatgagccctggcagctaattgcatggagtgtcgtgtggaccctgctgatagtctggggatatgagtttgtcttccagccagagagtttatggtcaaggtttaaaaagaaatgttttaagctcaccaggaagatgcccattattggtcgtaagattcaagacaagttgaacaagaccaaggatgatattagcaagaacatgtcattcctgaaagtggacaaagagtatgtgaaagctttaccctcccagggtctgagctcatctgctgttttggagaaacttaaggagtacagctctatggacgccttctggcaagaggggagagcctctggaacagtgtacagtggggaggagaagctcactgagctccttgtgaaggcttatggagattttgcatggagtaaccccctgcatccagatatcttcccaggactacgcaagatagaggcagaaattgtgaggatagcttgttccctgttcaatgggggaccagattcgtgtggatgtgtgacttctgggggaacagaaagcatactgatggcctgcaaagcatatcgggatctggcctttgagaaggggatcaaaactccagaaattgtggctccccaaagtgcccatgctgcatttaacaaagcagccagttactttgggatgaagattgtgcgggtcccattgacgaagatgatggaggtggatgtgcgggcaatgagaagagctatctccaggaacactgccatgctcgtctgttctaccccacagtttcctcatggtgtaatagatcctgtccctgaagtggccaagctggctgtcaaatacaaaataccccttcatgtcgacgcttgtctgggaggcttcctcatcgtctttatggagaaagcaggatacccactggagcacccatttgatttccgggtgaaaggtgtaaccagcatttcagctgacacccataagcagacaccactgtggcttgccagctgccaagatggagaagcatgtgcccctgtagagcgtctccccagaaccagaccccgagccactcgcttcctctgtgctgtgacaacattggtgccaggggagatggtgtttttcaaagggacctactgtagccactttaatttacaattaagagccttagtttgacttaacacttttgtaggcttttcattgtgtatttttgtgtatgtgtgcatatagcagctactctgtagcagaggtgggtagagacacttaatagtatcatgtcgcatgcagatgtcacatcggcctctgcaaaaactgtactgtcttgtttctgcattagacttaagtagtcatgtgaatatactgctatgtcacttttaatattacgagttttatacttggaaaatggtacttgcttcttttaaatctctgtcttctctaacctcccccttcccatttcaatgctcccttcctaatttcagcaataatctcaaaaagcaattaaatagttaaatgaccctaattgtaattactgtggatggttgcattcatttgattacttgggcacacacgagatgacaaatggggcagtggccatgcttgaatgggctcctggtgagagattgccccctggtggtgaaacaatcgtgtgtgcccactgataccaagaccaatgaaagagacacagttaagcagcaatccatctcatttccaggcacttcaataggtcgctgattggtccttgcaccagcagtggtagtcgtacctatttcagagaggtctgaaattcaggttcttagtttgccagggacaggccctatcttatatttttttccatcttcatcatccacttctgcttacagtttgctgcttacaataacttaatgatggattgagttatctgggtggtctctagccatctgggcagtgtggttctgtctaaccaaagggcattggcctcaaaccctgcatttggtttaggggctaacagagctcctcagataatcttcacacacatgtaactgctggagatcttattctattatgaataagaaacgagaagtttttccaaagtgttagtcaggatctgaaggctgtcattcagataacccagcttttccttttggcttttagcccattcagactttgccagagtcaagccaaggattgcttttttgctacagttttctgccaaatggcctagttcctgagtacctggaaaccagagagaaagaggatccaggatgtacttggatgaggaggcctggcttatctaggaagtcgtgtctggggtgcttattgctgctccatacagctgtacgtcagccccttggccttctctgtaggttcttggcagcaatgagcagctttcactcagtgacacaagtaattactgagtcctaatttgatagccaccaactgtacctgggtaggcaaagtcagatttttgagaacctttttcctgatttgaagttttaattaccttattttcttttatgctttcctctgtcttgtaatcttttctcttcttaatatccttccctataatttcaattatttggattaattttagaataaacctatttatttctaaaaaaaaaaagaaaa

SEQ ID NO: 296498 - DNA, 3689 bp, Homo sapiens
attttgattcgctggtctggggtgctaggggtggactgtgatatctgggaatgaaatctgagccttcaaaggagggagagaaccataacttggctgctctggcgaatctaggcgggctggcgagacagtttaaagctctagaagtaaacaaacctggttcccttttacagagtctgaaaaaggggagcgcggagaggaggctggaagaggaagatgcctagcacagaccttctgatgttgaaggcctttgagccctacttagagattttggaagtatactccacaaaagccaagaattatgtaaatggacattgcaccaagtatgagccctggcagctaattgcatggagtgtcgtgtggaccctgctgatagtctggggatatgagtttgtcttccagccagagagtttatggtcaaggtttaaaaagaaatgttttaagctcaccaggaagatgcccattattggtcgtaagattcaagacaagttgaacaagaccaaggatgatattagcaagaacatgtcattcctgaaagtggacaaagagtatgtgaaagctttaccctcccagggtctgagctcatctgctgttttggagaaacttaaggagtacagctctatggacgccttctggcaagaggggagagcctctggaacagtgtacagtggggaggagaagctcactgagctccttgtgaaggcttatggagattttgcatggagtaaccccctgcatccagatatcttcccaggactacgcaagatagaggcagaaattgtgaggatagcttgttccctgttcaatgggggaccagattcgtgtggatgtgtgacttctgggggaacagaaagcatactgatggcctgcaaagcatatcgggatctggcctttgagaaggggatcaaaactccagaaattgtggctccccaaagtgcccatgctgcatttaacaaagcagccagttactttgggatgaagattgtgcgggtcccattgacgaagatgatggaggtggatgtgcgggcaatgagaagagctatctccaggaacactgccatgctcgtctgttctaccccacagtttcctcatggtgtaatagatcctgtccctgaagtggccaagctggctgtcaaatacaaaataccccttcatgtcgacgcttgtctgggaggcttcctcatcgtctttatggagaaagcaggatacccactggagcacccatttgatttccgggtgaaaggtgtaaccagcatttcagctgacacccataagtatggctatgccccaaaaggctcatcattggtgttgtatagtgacaagaagtacaggaactatcagttcttcgtcgatacagattggcagggtggcatctatgcttccccaaccatcgcaggctcacggcctggtggcattagcgcagcctgttgggctgccttgatgcacttcggtgagaacggctatgttgaagctaccaaacagatcatcaaaactgctcgcttcctcaagtcagaactggaaaatatcaaaggcatctttgtttttgggaatccccaattgtcagtcattgctctgggatcccgtgattttgacatctaccgactatcaaacctgatgactgctaaggggtggaacttgaaccagttgcagttcccacccagtattcatttctgcatcacattactacacgcccggaaacgagtagctatacaattcctaaaggacattcgagaatctgtcactcaaatcatgaagaatcctaaagcgaagaccacaggaatgggtgccatctatggcatggcccagacaactgttgacaggaatatggttgcagaattgtcctcagtcttcttggacagcttgtacagcaccgacactgtcacccagggcagccagatgaatggttctccaaaaccccactgaacttggaccctttctagtctcaaggggattccagccttcagaaggttcttgggatatggaacaggccgtgcacaactttgacatctggtcttgctccatagagcacaactcaagatagaccatgagacagcttgagcctcaggattcttgttcttcctcttatcttccttttgtggtttttaatttgaagaccccagagaattccattacataatgattttgcccttgttataaatgttaccctaggaattgttttaaccatttccttttctaaactctctagctttcaactttacttaaacattgtgtggtagctctgacctgtcctgattctttagagaagctggggtacagtttatgagatagctagagcttctttgttatctcaggcaggaggcgtttacataacagatgtttcctcagctgggtgtgaggtatactctaagcaggaggctttttcagccttctctctctttttttttttttttttttttttttgagatggaattttgctcttttgcccagtctggagtgcagtggcatgatctcagctcactgcaacctccacccactgggttcaagcgattcttctgcctcagcctcccgagtagctgggattaccggcacccaccaccacgcctggctaatttttcaattttctttttcagtagagacgggttcaccgtgttggccaggctggtcttgaactcctgacctcaggtgatacccgcccccccgcctcagcctcccaaagtgctgggattacaggcgtgagccaccgtgcctggccctgtctctcttaagagtaggttcattgtctgtcttagagtcacttctattgcaactcattttctttttccagggcacagatcgaccaagctgccgttccctattctgcaggacaggactattctagcatacctgcttcgtccacccaggcagggtttggggtggtctcttctgtgcctgcagtccccatttgacacttggttgccaccatctttggagattattgtttggaatgatgcttccattggctttttcttgttaccatggactaggaagaaaacatggtttccaaataatctgggagcttttggccatggtgccgccttcctgaattggcagtggtcagagcacacctgaaccctatcctgggctggtgatgagcagaaatcagacctttttctatgcttttttgaatatcagagtaggatgaacacccagattcaaatatgtcaccaaagttggtggtggtccttccctgcacccttgcgttaagccattatgtaatgaaaatgtgtttgcttgaaggaacagctcaaagcaccttcacaagttgccttgacttaccctaggtgggtgtgaaagagcacccgtagcaaggaaaattttctctattagtgtgttcttctgcctcttcccccttgattcagctttcagaggtactatggcagttttgcctcaggtgctgaacatttctcagccctggctaaaagggaagacacttaatagtatcatgtcgcatgcagatgtcacatcggcctctgcaaaaactgtactgtcttgtttctgcattagacttaagtagtcatgtgaatatactgctatgtcacttttaatattacgagttttatacttggaaaatggtacttgcttcttttaaatctctgtcttctctaacctcccccttcccatttcaatgctcccttcctaatttcagcaataatctcaaaaagcaattaaatagttaaatgaccctaattgta

SEQ ID NO: 296499 - DNA, 3587 bp, Homo sapiens
  misc_feature (3397)..(3397): n is a, c, g, or t
attttgattcgctggtctggggtgctaggggtggactgtgatatctgggaatgaaatctgagccttcaaaggagggagagaaccataacttggctgctctggcgaatctaggcgggctggcgagacagtttaaagctctagaagtaaacaaacctggttcccttttacagagtctgaaaaaggggagcgcggagaggaggctggaagaggaagatgcctagcacagaccttctgatgttgaaggcctttgagccctacttagagattttggaagtatactccacaaaagccaagaattatgtaaatggacattgcaccaagtatgagccctggcagctaattgcatggagtgtcgtgtggaccctgctgatagtctggggatatgagtttgtcttccagccagagagtttatggtcaaggtttaaaaagaaatgttttaagctcaccaggaagatgcccattattggtcgtaagattcaagacaagttgaacaagaccaaggatgatattagcaagaacatgtcattcctgaaagtggacaaagagtatgtgaaagctttaccctcccagggtctgagctcatctgctgttttggagaaacttaaggagtacagctctatggacgccttctggcaagaggggagagcctctggaacagtgtacagtggggaggagaagctcactgagctccttgtgaaggcttatggagattttgcatggagtaaccccctgcatccagatatcttcccaggactacgcaagatagaggcagaaattgtgaggatagcttgttccctgttcaatgggggaccagattcgtgtggatgtgtgacttctgggggaacagaaagcatactgatggcctgcaaagcatatcgggatctggcctttgagaaggggatcaaaactccagaaattgtggctccccaaagtgcccatgctgcatttaacaaagcagccagttactttgggatgaagattgtgcgggtcccattgacgaagatgatggaggtggatgtgcgggcaatgagaagagctatctccaggaacactgccatgctcgtctgttctaccccacagtttcctcatggtgtaatagatcctgtccctgaagtggccaagctggctgtcaaatacaaaataccccttcatgtcgacgcttgtctgggaggcttcctcatcgtctttatggagaaagcaggatacccactggagcacccatttgatttccgggtgaaaggtgtaaccagcatttcagctgacacccataagtatggctatgccccaaaaggctcatcattggtgttgtatagtgacaagaagtacaggaactatcagttcttcgtcgatacagattggcagggtggcatctatgcttccccaaccatcgcaggctcacggcctggtggcattagcgcagcctgttgggctgccttgatgcacttcggtgagaacggctatgttgaagctaccaaacagatcatcaaaactgctcgcttcctcaagtcagaactggaaaatatcaaaggcatctttgtttttgggaatccccaattgtcagtcattgctctgggatcccgtgattttgacatctaccgactatcaaacctgatgactgctaaggggtggaacttgaaccagttgcagttcccacccagtattcatttctgcatcacattactacacgcccggaaacgagtagctatacaattcctaaaggacattcgagaatctgtcactcaaatcatgaagaatcctaaagcgaagaccacaggaatgggtgccatctatggcatggcccagacaactgttgacaggaatatggttgcagaattgtcctcagtcttcttggacagcttgtacagcaccgacactgtcacccagggcagccagatgaatggttctccaaaaccccactgaacttggaccctttctagtctcaaggggattccagccttcagaaggttcttgggatatggaacaggccgtgcacaactttgacatctggtcttgctccatagagcacaactcaagatagaccatgagacagcttgagcctcaggattcttgttcttcctcttatcttccttttgtggtttttaatttgaagaccccagagaattccattacataatgattttgcccttgttataaatgttaccctaggaattgttttaaccatttccttttctaaactctctagctttcaactttacttaaacattgtgtggtagctctgacctgtcctgattctttagagaagctggggtacagtttatgagatagctagagcttctttgttatctcaggcaggaggcgtttacataacagatgtttcctcagctgggtgtgaggtatactctaagcaggaggctttttcagccttctctctctttttttttttttttttttttttttgagatggaattttgctcttttgcccagtctggagtgcagtggcatgatctcagctcactgcaacctccacccactgggttcaagcgattcttctgcctcagcctcccgagtagctgggattaccggcacccaccaccacgcctggctaatttttcaattttctttttcagtagagacgggttcaccgtgttggccaggctggtcttgaactcctgacctcaggtgatacccgcccccccgcctcagcctcccaaagtgctgggattacaggcgtgagccaccgtgcctggccctgtctctcttaagagtaggttcattgtctgtcttagagtcacttctattgcaactcattttctttttccagggcacagatcgaccaagctgccgttccctattctgcaggacaggactattctagcatacctgcttcgtccacccaggcagggtttggggtggtctcttctgtgcctgcagtccccatttgacacttggttgccaccatctttggagattattgtttggaatgatgcttccattggctttttcttgttaccatggactaggaagaaaacatggtttccaaataatctgggagcttttggccatggtgccgccttcctgaattggcagtggtcagagcacacctgaaccctatcctgggctggtgatgagcagaaatcagacctttttctatgcttttttgaatatcagagtaggatgaacacccagattcaaatatgtcaccaaagttggtggtggtccttccctgcacccttgcgttaagccattatgtaatgaaaatgtgtttgcttgaaggaacagctcaaagcaccttcacaagttgccttgacttaccctaggtgggtgtgaaagagcacccgtagcaaggaaaattttctctattagtgtgttcttctgcctcttcccccttgattcagctttcagaggtactatggcagttttgcctcaggtgctcaangccaacttagggggaaaaaaattcaacccggggagagaaacgggaaaggaaagcaagaatgggcgtccagactatggaccagggcgtgtaatactttgacgtgacaagctgctcagcggtggtgtcaggcatacggaaactatgacctatgcgcgtatttcatgcattatatacgctactaggtaatttt

SEQ ID NO: 296500 - DNA, 929 bp, Homo sapiens
attttgattcgctggtctggggtgctaggggtggactgtgatatctgggaatgaaatctgagccttcaaaggagggagagaaccataacttggctgctctggcgaatctaggcgggctggcgagacagtttaaagctctagaagtaaacaaacctggttcccttttacagagtctgaaaaaggggagcgcggagaggaggctggaagaggaagatgcctagcacagaccttctgatgttgaaggcctttgagccctacttagagattttggaagtatactccacaaaagccaagaattatgtaaatggacattgcaccaagtatgagccctggcagctaattgcatggagtgtcgtgtggaccctgctgatagtctggggatatgagtttgtcttccagccagagagtttatggtcaaggtttaaaaagaaatgttttaagctcaccaggaagatgcccattattggtcgtaagattcaagacaagttgaacaagaccaaggatgatattagcaagaacatgtcattcctgaaagtggacaaagagtatgtgaaagctttaccctcccagggtctgagctcatctgctgttttggagaaacttaaggagtacagctctatggacgccttctggcaagaggggagagcctctggaacagtgtacagtggggaggagaagctcactgagctccttgtgaaggcttatggagattttgcatggagtaaccccctgcatccagatatcttcccaggactacgcaagatagaggcagaaattgtgaggatagcttgttccctgttcaatgggggaccagattcgtgtggatgtgaagcattgtttttgttttgtttttctaatatgttggcgccatgaaaatcatcatgttcaaatattagtagtaataaaggtgatatgcctggcaaaaaaaa

SEQ ID NO: 296501 - DNA, 1770 bp, Homo sapiens
attttgattcgctggtctggggtgctaggggtggactgtgatatctgggaatgaaatctgagccttcaaaggagggagagaaccataacttggctgctctggcgaatctaggcgggctggcgagacagtttaaagctctagaagtaaacaaacctggttcccttttacagagtctgaaaaaggggagcgcggagaggaggctggaagaggaagatgcctagcacagaccttctgatgttgaaggcctttgagccctacttagagattttggaagtatactccacaaaagccaagaattatgtaaatggacattgcaccaagtatgagccctggcagctaattgcatggagtgtcgtgtggaccctgctgatagtctggggatatgagtttgtcttccagccagagagtttatggtcaaggtttaaaaagaaatgttttaagctcaccaggaagatgcccattattggtcgtaagattcaagacaagttgaacaagaccaaggatgatattagcaagaacatgtcattcctgaaagtggacaaagagtatgtgaaagctttaccctcccagggtctgagctcatctgctgttttggagaaacttaaggagtacagctctatggacgccttctggcaagaggggagagcctctggaacagtgtacagtggggaggagaagctcactgagctccttgtgaaggcttatggagattttgcatggagtaaccccctgcatccagatatcttcccaggactacgcaagatagaggcagaaattgtgaggatagcttgttccctgttcaatgggggaccagattcgtgtggatgtgtgacttctgggggaacagaaagcatactgatggcctgcaaagcatatcgggatctggcctttgagaaggggatcaaaactccagaaattgtggctccccaaagtgcccatgctgcatttaacaaagcagccagttactttgggatgaagattgtgcgggtcccattgacgaagatgatggaggtggatgtgcgggcaatgagaagagctatctccaggaacactgccatgctcgtctgttctaccccacagtttcctcatggtgtaatagatcctgtccctgaagtggccaagctggctgtcaaatacaaaataccccttcatgtcgacgcttgtctgggaggcttcctcatcgtctttatggagaaagcaggatacccactggagcacccatttgatttccgggtgaaaggtgtaaccagcatttcagctgacacccataagtatggctatgccccaaaaggctcatcattggtgttgtatagtgacaagaagtacaggaactatcagttcttcgtcgatacagattggcagggtggcatctatgcttccccaaccatcgcaggctcacggcctggtggcattagcgcagcctgttgggctgccttgatgcacttcggtgagaacggctatgttgaagctaccaaacagatcatcaaaactgctcgcttcctcaagtcagaactggaaaatatcaaaggcatctttgtttttgggaatccccaattgtcagtcattgctctgggatcccgtgattgtcatacatctctggtataagcaacatttgatttttgaagtgtgtatgaccatctcttcatattttcatagatgtaattttacatttttgcatttgatcagacagtattggccataatcctagatgcacgcttctattattgtacctgcatcaacttctcgaattcggaacctctggcgctccct

SEQ ID NO: 296502 - DNA, 940 bp, Homo sapiens
attttgattcgctggtctggggtgctaggggtggactgtgatatctgggaatgaaatctgagccttcaaaggagggagagaaccataacttggctgctctggcgaatctaggcgggctggcgagacagtttaaagctctagaagtaaacaaacctggttcccttttacagagtctgaaaaaggggagcgcggagaggaggctggaagaggaagatgcctagcacagaccttctgatgttgaaggcctttgagccctacttagagattttggaagtatactccacaaaagccaagaattatgtaaatggacattgcaccaagtatgagccctggcagctaattgcatggagtgtcgtgtggaccctgctgatagtctggggatatgagtttgtcttccagccagagagtttatggtcaaggtttaaaaagaaatgttttaagctcaccaggaagatgcccattattggtcgtaagattcaagacaagttgaacaagaccaaggatgatattagcaagaacatgtcattcctgaaagtggacaaagagtatgtgaaagctttaccctcccagggtctgagctcatctgctgttttggagaaacttaaggagtacagctctatggacgccttctggcaagaggggagagcctctggaacagtgtacagtggggaggagaagctcactgagctccttgtgaaggcttatggagattttgcatggagtaaccccctgcatccagatatcttcccaggactacgcaagatagaggcagaaattgtgaggatagcttgttccctgttcaatgggggaccagattcgtgtggatgtgtaagtatatgcaaggggcatccaatagccttattttttaggttaaaatagaagagtttttaataaatattaattatattttaaaaaataaaaaatattaaaaatattttac

SEQ ID NO: 296503 - DNA, 542 bp, Homo sapiens
ttgtagttcacagataaggaacagactgaagtagcatactcagggtttcactgctggtacgttgtggggctggggctcacatttggctctttggcctcttagctcaatattattttcgcccccacagcgattctgttcttattttgtgctctcagactattctccaaatggacttacctggagtcacctgtgtcctgtcaccgtggtgggatgcagtcttctcccagttggagtggtgaaggagggggtactggtggaactggaactctaagctagcagcccaaattgctcttggcagcagaagagaagagtaattgtgacatagattctcattttcctttaaactttaaatccctaggcaatgagaagagctatctccaggaacactgccatgctcgtctgttctaccccacagtttcctcatggtgtaatagatcctgtccctgaagtggccaaggtatatgagagaaatgggctgctaaggcaggcaaatggatattttaaaacaaagcctaatggggcagtacttggcaaatagaagc

SEQ ID NO: 296504 - DNA, 176 bp, Homo sapiens
tggaagtatactccacaaaagccaagaattatgtaaatggacattgcaccaagtatgagccctggcagctaattgcatggagtgtcgtgtggaccctgctgatagtctggggatatgagtttgtcttccagccagagagtaagtatgctgtctcctctgtaaaggtatagtggtgt

SEQ ID NO: 296505 - DNA, 314 bp, Homo sapiens
ggggtgctaggggtggactgtgatatctgggaatgaaatctgagccttcaaaggagggagagaaccataacttggctgctctggcgaatctaggcgggctggcgagacagtttaaagctctagaagtaaacaaacctggttcccttttacagagtctgaaaaaggggagcgcggagaggaggctggaagaggaagatgcctagcacagaccttctgatgttggtgagccttttgcagacatcctcctggttccaaggcatttgtctccgtttttttagtccaaaggatcccagtgtgtagatttcacctctgat

SEQ ID NO: 296506 - DNA, 2301 bp, Homo sapiens
acaaaaggaggaaggacagcacagctgacagccgtgctcagaaagtttctggatcccaggctcatctccacagaggagaacacgcaggcagcagagaccatggggcccatctcagccccttcctgcagatggcgcatcccctggcaggggctcctgctcacagcctcacttttcaccttctggaacccgcccaccactgctcagctcactattgaagctgtgccatccaatgctgcagaggggaaggaggttcttctacttgtccacaatctgccccaggaccctcgtggctacaactggtacaaaggggaaacagtggatgccaaccgtcgaattataggatatgtaatatcaaatcaacagattaccccagggcctgcatacagcaatcgagagacaatataccccaatgcatccctgctgatgcggaacgtcaccagaaatgacacaggatcctacaccctacaagtcataaagctaaatcttatgagtgaagaagtaactggccagttcagcgtacatccggagactcccaagccctccatctccagcaacaactccaaccccgtggaggacaaggatgctgtggccttcacctgtgaacctgagactcagaacacaacctacctgtggtgggtaaatggtcagagtctcccggtcagtcccaggctgcagctgtccaatggcaacaggaccctcactctactcagtgtcacaaggaatgacgtaggaccctatgaatgtgaaatacagaacccagcgagtgcaaacttcagtgacccagtcaccctgaatgtcctctatggcccagatgcccccaccatttccccttcagacacctattaccatgcaggggtaaatctcaacctctcctgccatgcggcctctaatccaccctcacagtattcttggtctgtcaatggcacattccagcaatacacacaaaagctctttatccccaacatcactacaaagaacagcggatcctatgcctgccacaccactaactcagccactggccgcaacaggaccacagtcaggatgatcacagtctctgatgctttagtacaaggaagttctcctggcctctcagctagagccactgtcagcatcatgattggagtactggccagggtggctctgatatagtagctctggtgtagtttctgcatttcaagaagactggcagacagttgtttttattcttcctcaaagcatttgcaatcagctaccattcaaaattgcttcttcttcaagatttatggaaaatactctgacgagtactcttgaacacaagttcctgataactttaagatcacgccactggactgtctatgaacttgcaaacaggctgatacctttgtgaagttgcccaccaaaacacagaaggaaaaaaacatgaatttcattgaactaaataataatgaggataatgtttttaagattttttttttttttttttttgagatggaatctcgctctgtcgcccaggctggagtgcagtggcacgatctcaactcactgcaacgtccgcctcctgggttcacaccattctcctgcctcagcctcctgagtagctgggactacaggcgcctgccacaacgcccggctaattttttgtatttttagtagagacggggtttcactgtggtctcaatctcctgacttcatggtccgcctgcctcagcctcccaaagttctgggattacaggtgtgagccaccgcgcccagcccgtttttaagattttttatttgaaaaattgccaattctttaagtgttttctttttcagatttatgaatttctttatcttttaagctatctataccttactgcaatttggtaaagcagacttttgtgaacaaaaattataacatttacttttgctccctacctgactgccacagaactgggcaactattcatgagtattcatatgtttatggtaattcagttatttgcacaagttcagtgagaatctgctgtctttataatgggatatagtttaaaacattggttatattaccaaggctttgattgggatgttatatttgagaaaatacagagaatgatagattaacggagtgtctaatctatcgtgtcaaccccaaatttttacgtatgagatcctttagtccacccaatggctgacagtaacagcatctttaacacaactctttgttcaaatgtactatggtctcttttagagtcagactcctagactcacttgttctcactgtctgttttaatttaacccaggcatgcaatgctagataataaaattgctccctattggctgatca

SEQ ID NO: 296507 - DNA, 1868 bp, Homo sapiens
cacactgggtcgatgtcgagaccagtctcgtcacacgggaaactcacctggccacagcaggactacatgtcaagacaatcacagtctctgcggagactcccaagccctccatctccagcaacaactccaaccccgtggaggacaaggatgctgtggccttcacctgtgaacctgagactcagaacacaacctacctgtggtgggtaaatggtcagagtctcccggtcagtcccaggctgcagctgtccaatggcaacaggaccctcactctactcagtgtcacaaggaatgacgtaggaccctatgaatgtgaaatacagaacccagcgagtgcaaacttcagtgacccagtcaccctgaatgtcctctatggcccagatgcccccaccatttccccttcagacacctattaccatgcaggggtaaatctcaacctctcctgccatgcggcctctaatccaccctcacagtattcttggtctgtcaatggcacattccagcaatacacacaaaagctctttatccccaacatcactacaaagaacagcggatcctatgcctgccacaccactaactcagccactggccgcaacaggaccacagtcaggatgatcacagtctctgatgctttagtacaaggaagttctcctggcctctcagctagagccactgtcagcatcatgattggagtactggccagggtggctctgatatagtagctctggtgtagtttctgcatttcaagaagactggcagacagttgtttttattcttcctcaaagcatttgcaatcagctaccattcaaaattgcttcttcttcaagatttatggaaaatactctgacgagtactcttgaacacaagttcctgataactttaagatcacgccactggactgtctatgaacttgcaaacaggctgatacctttgtgaagttgcccaccaaaacacagaaggaaaaaaacatgaatttcattgaactaaataataatgaggataatgtttttaagattttttttttttttttttttgagatggaatctcgctctgtcgcccaggctggagtgcagtggcacgatctcaactcactgcaacgtccgcctcctgggttcacaccattctcctgcctcagcctcctgagtagctgggactacaggcgcctgccacaacgcccggctaattttttgtatttttagtagagacggggtttcactgtggtctcaatctcctgacttcatggtccgcctgcctcagcctcccaaagttctgggattacaggtgtgagccaccgcgcccagcccgtttttaagattttttatttgaaaaattgccaattctttaagtgttttctttttcagatttatgaatttctttatcttttaagctatctataccttactgcaatttggtaaagcagacttttgtgaacaaaaattataacatttacttttgctccctacctgactgccacagaactgggcaactattcatgagtattcatatgtttatggtaattcagttatttgcacaagttcagtgagaatctgctgtctttataatgggatatagtttaaaacattggttatattaccaaggctttgattgggatgttatatttgagaaaatacagagaatgatagattaacggagtgtctaatctatcgtgtcaaccccaaatttttacgtatgagatcctttagtccacccaatggctgacagtaacagcatctttaacacaactctttgttcaaatgtactatggtctcttttagagtcagactcctagactcacttgttctcactgtctgttttaatttaacccaggcatgcaatgctagataataaaattgctccctattggctgatca

SEQ ID NO: 296508 - DNA, 1831 bp, Homo sapiens
cccgccaccaccacgcagaacgcgcctaatattaggcgcgttctgcgtacatccggagactcccaagccctccatctccagcaacaactccaaccccgtggaggacaaggatgctgtggccttcacctgtgaacctgagactcagaacacaacctacctgtggtgggtaaatggtcagagtctcccggtcagtcccaggctgcagctgtccaatggcaacaggaccctcactctactcagtgtcacaaggaatgacgtaggaccctatgaatgtgaaatacagaacccagcgagtgcaaacttcagtgacccagtcaccctgaatgtcctctatggcccagatgcccccaccatttccccttcagacacctattaccatgcaggggtaaatctcaacctctcctgccatgcggcctctaatccaccctcacagtattcttggtctgtcaatggcacattccagcaatacacacaaaagctctttatccccaacatcactacaaagaacagcggatcctatgcctgccacaccactaactcagccactggccgcaacaggaccacagtcaggatgatcacagtctctgatgctttagtacaaggaagttctcctggcctctcagctagagccactgtcagcatcatgattggagtactggccagggtggctctgatatagtagctctggtgtagtttctgcatttcaagaagactggcagacagttgtttttattcttcctcaaagcatttgcaatcagctaccattcaaaattgcttcttcttcaagatttatggaaaatactctgacgagtactcttgaacacaagttcctgataactttaagatcacgccactggactgtctatgaacttgcaaacaggctgatacctttgtgaagttgcccaccaaaacacagaaggaaaaaaacatgaatttcattgaactaaataataatgaggataatgtttttaagattttttttttttttttttttgagatggaatctcgctctgtcgcccaggctggagtgcagtggcacgatctcaactcactgcaacgtccgcctcctgggttcacaccattctcctgcctcagcctcctgagtagctgggactacaggcgcctgccacaacgcccggctaattttttgtatttttagtagagacggggtttcactgtggtctcaatctcctgacttcatggtccgcctgcctcagcctcccaaagttctgggattacaggtgtgagccaccgcgcccagcccgtttttaagattttttatttgaaaaattgccaattctttaagtgttttctttttcagatttatgaatttctttatcttttaagctatctataccttactgcaatttggtaaagcagacttttgtgaacaaaaattataacatttacttttgctccctacctgactgccacagaactgggcaactattcatgagtattcatatgtttatggtaattcagttatttgcacaagttcagtgagaatctgctgtctttataatgggatatagtttaaaacattggttatattaccaaggctttgattgggatgttatatttgagaaaatacagagaatgatagattaacggagtgtctaatctatcgtgtcaaccccaaatttttacgtatgagatcctttagtccacccaatggctgacagtaacagcatctttaacacaactctttgttcaaatgtactatggtctcttttagagtcagactcctagactcacttgttctcactgtctgttttaatttaacccaggcatgcaatgctagataataaaattgctccctattggctgatca

SEQ ID NO: 296509 - DNA, 336 bp, Homo sapiens
ggacactgtggctcttccacagaccaggagcttccccttccctctgatgacatcacctgtgactttattcttttgctctagatggcccagatgcccccaccatttccccttcagacacctattaccatgcaggggtaaatctcaacctctcctgccatgcggcctctaatccaccctcacagtattcttggtctgtcaatggcacattccagcaatacacacaaaagctctttatccccaacatcactacaaagaacagcggatcctatgcctgccacaccactaactcagccactggccgcaacaggaccacagtcaggatgatcacagtctctg

SEQ ID NO: 296510 - DNA, 724 bp, Homo sapiens
ccgaaagtttctatttcttgtataaactcctacatcaaaaattgataaaacaatatgaaagcatgttttctgttattagtttcatagtcagcaaatattaagtttttatatagcattaataaaaaataattattttctatatatagctgtaaacaaaataaaattaaagcactatataaattaaaacaaattgcagtcagcatggaggaatgccacattctgaaacagcaaactcaattattctgcagcaattctgcaactgaaacaaatggaaaagctggatgcaggtactagaaagtttgagacaaccagagagcttccaagacagtgaagctgtgcggagctaaattccagagaaaagggaaggaccaaaaccaacaaatatctagaataaatctaacaaatatggataagatttctattcagtacattatacaacattatagagaaacattagagaatacctaagtaaacagatgggcctaccatgtgcatagattggaagactcaatattataaaaatgtcagttctcccctaggtgatctatagattcaaggcaatccaaataaaaattctagcaggatttgtttgtgtaaaccggcaaactgactctaaaatttaaatggaagtgcaaaaggtcaataactaccaagaaatttcaaagaacaaacttagaggaattgtttttcctagatataaagacttataacaaaactatattag

SEQ ID NO: 296511 - DNA, 444 bp, Homo sapiens
ccggcgcgggagagggctaggtagcctctggcagtcagtctgctcccggccgtgaagccagcacctccgccagcccaccaccagttccttctcctgggctccctcctggccctccaccaagcggcaacatctcccaggacaaaggacacaggatcaggacagcaaggttccaggaggatgagacagaggttccaggaagttatgtccggcaaagcgagcttcatcccccagctcttcctcaattctgagagagatgaaccacaaaggaagtggtcagggatgcaggaggatcctgcttctctctctaggggtcccccagactccaaccacccccacaccacctgcttttgtgtcctgccccaaggcttagcattccctggctttcccatgtgatctctgggatttgtcaatcaggccatcaataaacccaggaagcaaaaacca

SEQ ID NO: 296512 - DNA, 1382 bp, Homo sapiens
ctttacagtcagaggttcatttcctcttcttaacaccaaaaaaaaaaaactctggtgggtctaggcgcggatcggacccaagcaggtcggcggcggcggcaggagagcggccgggcgtcagctcctcgacccccgtgtcgggctagagctggctgctgaatgtaagagtgcaggctaccccgggactttgatcccctacagatgtgacctatcaaatgaagaggacatcctctccatgttctcagctatccgttctcagcacagcggtgtagacatctgcatcaacaatgctggcttggcccggcctgacaccctgctctcaggcagcaccagtggttggaaggacatgttcaatgtgaacgtgctggccctcagcatctgcacacgggaagcctaccagtccatgaaggagcggaatgtggacgatgggcacatcattaacatcaatagcatgtctggccaccgagtgttacccctgtctgtgacccacttctatagtgccaccaagtatgccgtcactgcgctgacagagggactgaggcaagagcttcgggaggcccagacccacatccgagccacgtgcatctctccaggtgtggtggagacacaattcgccttcaaactccacgacaaggaccctgagaaggcagctgccacctatgagcaaatgaagtgtctcaaacccgaggatgtggccgaggctgttatctacgtcctcagcacccccgcacacatccagattggagacatccagatgaggcccacggagcaggtgacctagtgactgtgggagctcctccttccctccccacccttcatggcttgcctcctgcctctggattttaggtgttgatttctggatcacgggataccacttcctgtccacaccccgaccaggggctagaaaatttgtttgagatttttatatcatcttgtcaaattgcttcagttgtaaatgtgaaaaatgggctggggaaaggaggtggtgtccctaattgttttacttgttaacttgttcttgtgcccctgggcacttggcctttgtctgctctcagtgtcttccctttgacatgggaaaggagttgtggccaaaatccccatcttcttgcacctcaacgtctgtggctcagggctggggtggcagagggaggccttcaccttatatctgtgttgttatccagggctccagacttcctcctctgcctgccccactgcaccctctcccccttatctatctccttctcggctccccagcccagtcttggcttcttgtcccctcctggggtcatccctccactctgactctgactatggcagcagaacaccagggcctggcccagtggatttcatggtgatcattaaaaaagaaaaatcgcaaccaa

SEQ ID NO: 296513 - DNA, 872 bp, Homo sapiens
acacttgtggctactaagccagagaagttggctccttccaggcaagacattttccaagaacaattggctgccattcctgagtttctgaatataggacccttgttcaagtcttctgagcctgttcaacttacagaagcagagacagaatattttgttcgatgtatcaagcacatgtttaccaatcacatcgtgttccagtttgactgcaccaacactctcaatgaccagctgctggaaaaagtgacagtgcagatggagccatcagattcctatgaagtgctgtcttgtatcccagcccccacccttcatggcttgcctcctgcctctggattttaggtgttgatttctggatcacgggataccacttcctgtccacaccccgaccaggggctagaaaatttgtttgagatttttatatcatcttgtcaaattgcttcagttgtaaatgtgaaaaatgggctggggaaaggaggtggtgtccctaattgttttacttgttaacttgttcttgtgcccctgggcacttggcctttgtctgctctcagtgtcttccctttgacatgggaaaggagttgtggccaaaatccccatcttcttgcacctcaacgtctgtggctcagggctggggtggcagagggaggccttcaccttatatctgtgttgttatccagggctccagacttcctcctctgcctgccccactgcaccctctcccccttatctatctccttctcggctccccagcccagtcttggcttcttgtcccctcctggggtcatccctccactctgactctgactatggcagcagaacaccagggcctggcccagtggatttcatggtgatcattaaaaaagaaaaatcgcaaccaa

SEQ ID NO: 296514 - DNA, 654 bp, Homo sapiens
  misc_feature (176)..(176): n is a, c, g, or t
cgtcattgagaatgagtagctaatcacaggaaagcgccaggagctggtcaccaagattatcaaatgaagaggacatcctctccatgttctcagctatccgttctgagccaaggtgcctgcactttgctgtggcaggcagattgggtggtagtgggaggttgtgcatggaggccagngaaagctgacatcaggacatggtcaatgtgaacgtgctggccctcagcatctgcacacgggaagcctaccagtccatgaaggagcggaatgtggacgatgggcacatcattaacatcaatagcatgtctggccaccgagtgttacccctgtctgtgacccacttctatagtgccaccaagtatgccgtcactgcgctgacagagggactgaggcaagagcttcgggaggcccagacccacatccgagccacgtgcatctctccaggtgtggtggagacacaattcgccttcaaactccacgacaaggaccctgagaaggcagctgccacctatgagcaaatgaagtgtttaaacccgagatgtggcgcggtgtttttacgtcttagacccccgacacattcagatgaaacatccaataagcccccgagcagggaactaaggactggggagctcttctttccttccaaccttataggta

SEQ ID NO: 296515 - DNA, 1602 bp, Homo sapiens
ggcggggcggccgggccgcggcggcctccgactggatacggcggatcgccgggggcctgagggtggagtcccggccggaggcaggccgggactctggtgggtctaggcgcggatcggacccaagcaggtcggcggcggcggcaggagagcggccgggcgtcagctcctcgacccccgtgtcgggctagtccagcgaggcggacgggcggcgtgggcccatggccaggcccggcatggagcggtggcgcgaccggctggcgctggtgacgggggcctcggggggcatcggcgcggccgtggcccgggccctggtccagcagggactgaaggtggtgggctgcgcccgcactgtgggcaacatcgaggagctggctgctgaatgtaagagtgcaggctaccccgggactttgatcccctacagatgtgacctatcaaatgaagaggacatcctctccatgttctcagctatccgttctcagcacagcggtgtagacatctgcatcaacaatgctggcttggcccggcctgacaccctgctctcaggcagcaccagtggttggaaggacatgttcaatgtgaacgtgctggccctcagcatctgcacacgggaagcctaccagtccatgaaggagcggaatgtggacgatgggcacatcattaacatcaatagcatgtctggccaccgagtgttacccctgtctgtgacccacttctatagtgccaccaagtatgccgtcactgcgctgacagagggactgaggcaagagcttcgggaggcccagacccacatccgagccacgtgcatctctccaggtgtggtggagacacaattcgccttcaaactccacgacaaggaccctgagaaggcagctgccacctatgagcaaatgaagtgtctcaaacccgaggatgtggccgaggctgttatctacgtcctcagcacccccgcacacatccagattggagacatccagatgaggcccacggagcaggtgacctagtgactgtgggagctcctccttccctccccacccttcatggcttgcctcctgcctctggattttaggtgttgatttctggatcacgggataccacttcctgtccacaccccgaccaggggctagaaaatttgtttgagatttttatatcatcttgtcaaattgcttcagttgtaaatgtgaaaaatgggctggggaaaggaggtggtgtccctaattgttttacttgttaacttgttcttgtgcccctgggcacttggcctttgtctgctctcagtgtcttccctttgacatgggaaaggagttgtggccaaaatccccatcttcttgcacctcaacgtctgtggctcagggctggggtggcagagggaggccttcaccttatatctgtgttgttatccagggctccagacttcctcctctgcctgccccactgcaccctctcccccttatctatctccttctcggctccccagcccagtcttggcttcttgtcccctcctggggtcatccctccactctgactctgactatggcagcagaacaccagggcctggcccagtggatttcatggtgatcattaaaaaagaaaaatcgcaaccaa

SEQ ID NO: 296516 - DNA, 1765 bp, Homo sapiens
ggcggggcggccgggccgcggcggcctccgactggatacggcggatcgccgggggcctgagggtggagtcccggccggaggcaggccgggactctggtgggtctaggcgcggatcggacccaagcaggtcggcggcggcggcaggagagcggccgggcgtcagctcctcgacccccgtgtcgggctagtccagcgaggcggacgggcggcgtgggcccatggccaggcccggcatggagcggtggcgcgaccggctggcgctggtgacgggggcctcggggggcatcggcgcggccgtggcccgggccctggtccagcagggactgaaggtggtgggctgcgcccgcactgtgggcaacatcgaggagctggctgctgaatgtaagagtgcaggctaccccgggactttgatcccctacagatgtgacctatcaaatgaagaggacatcctctccatgttctcagctatccgttctcagcacagcggtgtagacatctgcatcaacaatgctggcttggcccggcctgacaccctgctctcaggcagcaccagtggttggaaggacatgttcaatgtgaacgtgctggccctcagcatctgcacacgggaagcctaccagtccatgaaggagcggaatgtggacgatgggcacatcattaacatcaatagcatgtctggccaccgagtgttacccctgtctgtgacccacttctatagtgccaccaagtatgccgtcactgcgctgacagagggactgaggcaagagcttcgggaggcccagacccacatccgagccacgtgcatctctccaggtgtggtggagacacaattcgccttcaaactccacgacaaggaccctgagaaggcagctgccacctatgagcaaatgaagtgtctcaaacccgaggatgtggccgaggctgttatctacgtcctcagcacccccgcacacatccagattggagacatccagatgaggcccacggagcaggtgacctagtgactgtgggagctcctccttccctccccacccttcatggcttgcctcctgcctctggattttaggtgttgatttctggatcacgggataccacttcctgtccacaccccgaccaggggctagaaaatttgtttgagatttttatatcatcttgtcaaattgcttcagttgtaaatgtgaaaaatgggctggggaaaggaggtggtgtccctaattgttttacttgttaacttgttcttgtgcccctgggcacttggcctttgtctgctctcagtgtcttccctttgacatgggaaaggagttgtggccaaaatccccatcttcttgcacctcaacgtctgtggctcagggctggggtggcagagggaggccttcaccttatatctgtgttgttatccagggctccagacttcctcctctgcctgccccactgcaccctctcccccttatctatctccttctcggctccccagcccagtcttggcttcttgtcccctcctggggtcatccctccactctgactctgactatggcagcagaacaccagggcctggcccagtggatttcatggtgatcattaaaaaagaaaaatcgcaaccaaaaaaaaacactggatgagagaaagaaacggacagaaggcgacaatacaaatacagggggggcccttcgaagaacagaccgacccaggggggtcaaaaaacgaaggactgccaccaacagtcttgagacacagggggcgcacaaaggagaaggaggacaacagg

SEQ ID NO: 296517 - DNA, 1509 bp, Homo sapiens
ggcggggcggccgggccgcggcggcctccgactggatacggcggatcgccgggggcctgagggtggagtcccggccggaggcaggccgggactctggtgggtctaggcgcggatcggacccaagcaggtcggcggcggcggcaggagagcggccgggcgtcagctcctcgacccccgtgtcgggctagtccagcgaggcggacgggcggcgtgggcccatggccaggcccggcatggagcggtggcgcgaccggctggcgctggtgacgggggcctcggggggcatcggcgcggccgtggcccgggccctggtccagcagggactgaaggtggtgggctgcgcccgcactgtgggcaacatcgaggagctggctgctgaatgtaagagtgcaggctaccccgggactttgatcccctacagatgtgacctatcaaatgaagaggacatcctctccatgttctcagctatccgttctcagcacagcggtgtagacatctgcatcaacaatgctggcttggcccggcctgacaccctgctctcaggcagcaccagtggttggaaggacatgttcaatgtgaacgtgctggccctcagcatctgcacacgggaagcctaccagtccatgaaggagcggaatgtggacgatgggcacatcattaacatcaatagcatgtctggccaccgagtgttacccctgtctgtgacccacttctatagtgccaccaagtatgccgtcactgcgctgacagagggactgaggcaagagcttcgggaggcccagacccacatccgagccacgtgtctcaaacccgaggatgtggccgaggctgttatctacgtcctcagcacccccgcacacatccagattggagacatccagatgaggcccacggagcaggtgacctagtgactgtgggagctcctccttccctccccacccttcatggcttgcctcctgcctctggattttaggtgttgatttctggatcacgggataccacttcctgtccacaccccgaccaggggctagaaaatttgtttgagatttttatatcatcttgtcaaattgcttcagttgtaaatgtgaaaaatgggctggggaaaggaggtggtgtccctaattgttttacttgttaacttgttcttgtgcccctgggcacttggcctttgtctgctctcagtgtcttccctttgacatgggaaaggagttgtggccaaaatccccatcttcttgcacctcaacgtctgtggctcagggctggggtggcagagggaggccttcaccttatatctgtgttgttatccagggctccagacttcctcctctgcctgccccactgcaccctctcccccttatctatctccttctcggctccccagcccagtcttggcttcttgtcccctcctggggtcatccctccactctgactctgactatggcagcagaacaccagggcctggcccagtggatttcatggtgatcattaaaaaagaaaaatcgcaaccaa

SEQ ID NO: 296518 - DNA, 2222 bp, Homo sapiens
ggcggggcggccgggccgcggcggcctccgactggatacggcggatcgccgggggcctgagggtggagtcccggccggaggcaggccgggactctggtgggtctaggcgcggatcggacccaagcaggtcggcggcggcggcaggagagcggccgggcgtcagctcctcgacccccgtgtcgggctagtccagcgaggcggacgggcggcgtgggcccatggccaggcccggcatggagcggtggcgcgaccggctggcgctggtgacgggggcctcggggggcatcggcgcggccgtggcccgggccctggtccagcagggactgaaggtggtgggctgcgcccgcactgtgggcaacatcgaggagctggctgctgaatgtaagagtgcaggctaccccgggactttgatcccctacagatgtgacctatcaaatgaagaggacatcctctccatgttctcagctatccgttctcagcacagcggtgtagacatctgcatcaacaatgctggcttggcccggcctgacaccctgctctcaggcagcaccagtggttggaaggacatgttcaatgtgaacgtgctggccctcagcatctgcacacgggaagcctaccagtccatgaaggagcggaatgtggacgatgggcacatcattaacatcaatagcatgtctggccaccgagtgttacccctgtctgtgacccacttctatagtgccaccaagtatgccgtcactgcgctgacagagggactgaggcaagagcttcgggaggcccagacccacatccgagccacggtgaggctgtggcctagccctggtgggcacagggtggcgcaggccctccccacccacacacaccgttcaggaagcccatgttcagaatgtgccgctcagagctcctgggagtggactgggcacagaactgggtgctgctgctccaggcatggccctatgcagcccttcatttcctcatttcactgatccaggagccaacgaccagacttagactttgagctgggagggggctgacctgagggaaagcaagggactgtgggaaaccaggtgcacagtggctggaaaccgggactctgggctcttctcttgaaggccgcatgatcgtgagcgagtcactgaacctccctaagcctcggccttctcacttgtgaaaaggagatgatgagcttttcagggacacttttttgtaaaacgtttacctgacatataggaaaggctctgtagatggtaggtatcattgtggtcactgccagtggcagcttcggagggaggaggccgctgccggatatcaggcagccatcactgtgaagctggggttctgtggcctccatcctctcccctcgacctccccaagacctggcaaagctcagcccctgagaaggccctctctgttggcccagtgcatctctccaggtgtggtggagacacaattcgccttcaaactccacgacaaggaccctgagaaggcagctgccacctatgagcaaatgaagtgtctcaaacccgaggatgtggccgaggctgttatctacgtcctcagcacccccgcacacatccagattggagacatccagatgaggcccacggagcaggtgacctagtgactgtgggagctcctccttccctccccacccttcatggcttgcctcctgcctctggattttaggtgttgatttctggatcacgggataccacttcctgtccacaccccgaccaggggctagaaaatttgtttgagatttttatatcatcttgtcaaattgcttcagttgtaaatgtgaaaaatgggctggggaaaggaggtggtgtccctaattgttttacttgttaacttgttcttgtgcccctgggcacttggcctttgtctgctctcagtgtcttccctttgacatgggaaaggagttgtggccaaaatccccatcttcttgcacctcaacgtctgtggctcagggctggggtggcagagggaggccttcaccttatatctgtgttgttatccagggctccagacttcctcctctgcctgccccactgcaccctctcccccttatctatctccttctcggctccccagcccagtcttggcttcttgtcccctcctggggtcatccctccactctgactctgactatggcagcagaacaccagggcctggcccagtggatttcatggtgatcattaaaaaagaaaaatcgcaaccaa

SEQ ID NO: 296519 - DNA, 1456 bp, Homo sapiens
ctttacagtcagaggttcatttcctcttcttaacaccaaaaaaaaaaaactctggtgggtctaggcgcggatcggacccaagcaggtcggcggcggcggcaggagagcggccgggcgtcagctcctcgacccccgtgtcgggctagtccagcgaggcggacgggcggcgtgggcccatggccaggcccggcatggagcggtggcgcgaccggctggcgctggtccagcagggactgaaggtggtgggctgcgcccgcactgtgggcaacatcgagatgtgacctatcaaatgaagaggacatcctctccatgttctcagctatccgttctcagcacagcggtgtagacatctgcatcaacaatgctggcttggcccggcctgacaccctgctctcaggcagcaccagtggttggaaggacatgttcaatgtgaacgtgctggccctcagcatctgcacacgggaagcctaccagtccatgaaggagcggaatgtggacgatgggcacatcattaacatcaatagcatgtctggccaccgagtgttacccctgtctgtgacccacttctatagtgccaccaagtatgccgtcactgcgctgacagagggactgaggcaagagcttcgggaggcccagacccacatccgagccacgtgcatctctccaggtgtggtggagacacaattcgccttcaaactccacgacaaggaccctgagaaggcagctgccacctatgagcaaatgaagtgtctcaaacccgaggatgtggccgaggctgttatctacgtcctcagcacccccgcacacatccagattggagacatccagatgaggcccacggagcaggtgacctagtgactgtgggagctcctccttccctccccacccttcatggcttgcctcctgcctctggattttaggtgttgatttctggatcacgggataccacttcctgtccacaccccgaccaggggctagaaaatttgtttgagatttttatatcatcttgtcaaattgcttcagttgtaaatgtgaaaaatgggctggggaaaggaggtggtgtccctaattgttttacttgttaacttgttcttgtgcccctgggcacttggcctttgtctgctctcagtgtcttccctttgacatgggaaaggagttgtggccaaaatccccatcttcttgcacctcaacgtctgtggctcagggctggggtggcagagggaggccttcaccttatatctgtgttgttatccagggctccagacttcctcctctgcctgccccactgcaccctctcccccttatctatctccttctcggctccccagcccagtcttggcttcttgtcccctcctggggtcatccctccactctgactctgactatggcagcagaacaccagggcctggcccagtggatttcatggtgatcattaaaaaagaaaaatcgcaaccaa

SEQ ID NO: 296520 - DNA, 1985 bp, Homo sapiens
  misc_feature (1701)..(1701): n is a, c, g, or t
ggcggggcggccgggccgcggcggcctccgactggatacggcggatcgccgggggcctgagggtggagtcccggccggaggcaggccgggactctggtgggtctaggcgcggatcggacccaagcaggtcggcggcggcggcaggagagcggccgggcgtcagctcctcgacccccgtgtcgggctagtccagcgaggcggacgggcggcgtgggcccatggccaggcccggcatggagcggtggcgcgaccggctggcgctggtgacgggggcctcggggggcatcggcgcggccgtggcccgggccctggtccagcagggactgaaggtggtgggctgcgcccgcactgtgggcaacatcgaggagctggctgctgaatgtaagagtgcaggctaccccgggactttgatcccctacagatgtgacctatcaaatgaagaggacatcctctccatgttctcagctatccgttctcagcacagcggtgtagacatctgcatcaacaatgctggcttggcccggcctgacaccctgctctcaggcagcaccagtggttggaaggacatgttcaatgtgaacgtgctggccctcagcatctgcacacgggaagcctaccagtccatgaaggagcggaatgtggacgatgggcacatcattaacatcaatagcatgtctggccaccgagtgttacccctgtctgtgacccacttctatagtgccaccaagtatgccgtcactgcgctgacagagggactgaggcaagagcttcgggaggcccagacccacatccgagccacgtgcatctctccaggtgtggtggagacacaattcgccttcaaactccacgacaaggaccctgagaaggcagctgccacctatgagcaaatgaagtgtctcaaacccgaggatgtggccgaggctgttatctacgtcctcagcacccccgcacacatccagattggagacatccagatgaggcccacggagcaggtgacctagtgactgtgggagctcctccttccctccccacccttcatggcttgcctcctgcctctggattttaggtgttgatttctggatcacgggataccacttcctgtccacaccccgaccaggggctagaaaatttgtttgagatttttatatcatcttgtcaaattgcttcagttgtaaatgtgaaaaatgggctggggaaaggaggtggtgtccctaattgttttacttgttaacttgttcttgtgcccctgggcacttggcctttgtctgctctcagtgtcttccctttgacatgggaaaggagttgtggccaaaatccccatcttcttgcacctcaacgtctgtggctcagggctggggtggcagagggaggccttcaccttatatctgtgttgttatccagggctccagacttcctcctctgcctgccccactgcaccctctcccccttatctatctccttctcggctccccagcccagtcttggcttcttgtcccctcctggggtcatccctccactctgactctgactatggcagcagaacaccagggcctggcccagtggatttcatggtgatcattaaaaaagaaaaatcgcaaccaaaaaaaaaaaaaaaaaaaaaaaaaaaaaaaaaaaaaaaaaaaaaaaaaaaaataaaaagaaaaaataaaaaacaaaaaaatataaaacaagaaatacagngatatagaaagatacaaccagtgacgacggtactactcgagcttattcattggtatggaatcaattgattagaacatgataagaaatcagcagactcaggatgtcagacgacctaactacgacataggctacgaaacagatcaagtcatctaggcggccaaagtataaagtaggatggaataagtactactaaatagttatagatgattactatttctatcagtattaatacaaacatctagatatgtaaggcgaatagtgattaaaacatacgtttttacttt

SEQ ID NO: 296521 - DNA, 1523 bp, Homo sapiens
ggcggggcggccgggccgcggcggcctccgactggatacggcggatcgccgggggcctgagggtggagtcccggccggaggcaggccgggactctggtgggtctaggcgcggatcggacccaagcaggtcggcggcggcggcaggagagcggccgggcgtcagctcctcgacccccgtgtcgggctagtccagcgaggcggacgggcggcgtgggcccatggccaggcccggcatggagcggtggcgcgaccggctggcgctggtgacgggggcctcggggggcatcggcgcggccgtggcccgggccctggtccagcagggactgaaggtggtgggctgcgcccgcactgtgggcaacatcgaggagctggctgctgaatgtaagagtgcaggctaccccgggactttgatcccctacagatgtgacctatcaaatgaagaggacatcctctccatgttctcagctatccgttctcagcacagcggtgtagacatctgcatcaacaatgctggcttggcccggcctgacaccctgctctcaggcagcaccagtggttggaaggacatgttcaatgtgaacgtgctggccctcagcatctgcacacgggaagcctaccagtccatgaaggagcggaatgtggacgatgggcacatcattaacatcaatagcatgtctggccaccgagtgttacccctgtctgtgacccacttctatagtgccaccaagtatgccgtcactgcgctgacagagggactgaggcaagagcttcgggaggcccagacccacatccgagccacgtgcatctctccaggtgtggtggagacacaattcgccttcaaactccacgacaaggaccctgagaaggcagctgccacctatgagcaaatgaagtgtctcaaacccgaggatgtggccgaggctgttatctacgtcctcagcacccccgcacacatccagattggagacatccagatgaggcccacggagcaggtgacctagtgactgtgggagctcctccttccctccccacccttcatggctagaaaatttgtttgagatttttatatcatcttgtcaaattgcttcagttgtaaatgtgaaaaatgggctggggaaaggaggtggtgtccctaattgttttacttgttaacttgttcttgtgcccctgggcacttggcctttgtctgctctcagtgtcttccctttgacatgggaaaggagttgtggccaaaatccccatcttcttgcacctcaacgtctgtggctcagggctggggtggcagagggaggccttcaccttatatctgtgttgttatccagggctccagacttcctcctctgcctgccccactgcaccctctcccccttatctatctccttctcggctccccagcccagtcttggcttcttgtcccctcctggggtcatccctccactctgactctgactatggcagcagaacaccagggcctggcccagtggatttcatggtgatcattaaaaaagaaaaatcgcaaccaa
